United States Patent Application Publication US 2011/0183924 A1 - sequence listing, part 147

SEQ ID NO: 381444 - DNA, 4900 bp, Homo sapiens
caaagctgggttcgcggctggcccaggagtgcggggcgcgactgggcggccggcggcggggaggggcggagcgcaggagtcggaggcgggagcagaccagcacggcctcgcggagccggcccggcggaccgtgacgggtcccctcacctcctcttctctcccctccccgcccgccctctctccctcccttcctccctcccgctcgcttcttctcacgccgggagcaggctcgcgcctcgcaccgctgccccgcgagcagctcctcttctcccgaggcgcgcggggcgcccccgcgagccccgcggctgagaccccgcagcctggaggagggctgtccggggctttgggttgcacgttttcaaaaaatacctaatggtgaaaatgagacaatgattcctgtattgacatcaaaaaaagcaagtgaattaccagtcagtgaagttgcaagcattctccaagctgatcttcagaatggtctaaacaaatgtgaagttagtcataggcgagcctttcatggctggaatgagtttgatattagtgaagatgagccactgtggaagaagtatatttctcagtttaaaaatccccttattatgctgcttctggcttctgcagtcatcagtgttttaatgcatcagtttgatgatgccgtcagtatcactgtggcaatacttatcgttgttacagttgcctttgttcaggaatatcgttcagaaaaatctcttgaagaattgagtaaacttgtgccaccagaatgccattgtgtgcgtgaaggaaaattggagcatacacttgcccgagacttggttccaggtgatacagtttgcctttctgttggggatagagttcctgctgacttacgcttgtttgaggctgtggatctttccattgatgagtccagcttgacaggtgagacaacgccttgttctaaggtgacagctcctcagccagctgcaactaatggagatcttgcatcgagaagtaacattgcctttatgggaacactggtcagatgtggcaaagcaaagggtgttgtcattggaacaggagaaaattctgaatttggggaggtttttaaaatgatgcaagcagaagaggcaccaaaaacccctctgcagaagagcatggacctcttaggaaaacaactttccttttactcctttggtataataggaatcatcatgttggttggctggttactgggaaaagatatcctggaaatgtttactattagtgtaagtttggctgtagcagcaattcctgaaggtctccccattgtggtcacagtgacgctagctcttggtgttatgagaatggtgaagaaaagggccattgtgaaaaagctgcctattgttgaaactctgggctgctgtaatgtgatttgttcagataaaactggaacactgacgaagaatgaaatgactgttactcacatatttacttcagatggtctgcatgctgaggttactggagttggctataatcaatttggggaagtgattgttgatggtgatgttgttcatggattctataacccagctgttagcagaattgttgaggcgggctgtgtgtgcaatgatgctgtaattagaaacaatactctaatggggaagccaacagaaggggccttaattgctcttgcaatgaagatgggtcttgatggacttcaacaagactacatcagaaaagctgaatacccttttagctctgagcaaaagtggatggctgttaagtgtgtacaccgaacacagcaggacagaccagagatttgttttatgaaaggtgcttacgaacaagtaattaagtactgtactacataccagagcaaagggcagaccttgacacttactcagcagcagagagatgtgtaccaacaagagaaggcacgcatgggctcagcgggactcagagttcttgctttggcttctggtcctgaactgggacagctgacatttcttggcttggtgggaatcattgatccacctagaactggtgtgaaagaagctgttacaacactcattgcctcaggagtatcaataaaaatgattactggagattcacaggagactgcagttgcaatcgccagtcgtctgggattgtattccaaaacttcccagtcagtctcaggagaagaaatagatgcaatggatgttcagcagctttcacaaatagtaccaaaggttgcagtattttacagagctagcccaaggcacaagatgaaaattattaagtcgctacagaagaacggttcagttgtagccatgacaggagatggagtaaatgatgcagttgctctgaaggctgcagacattggagttgcgatgggccagactggtacagatgtttgcaaagaggcagcagacatgatcctagtggatgatgattttcaaaccataatgtctgcaatcgaagagggtaaagggatttataataacattaaaaatttcgttagattccagctgagcacgagtatagcagcattaactttaatctcattggctacattaatgaactttcctaatcctctcaatgccatgcagattttgtggatcaatattattatggatggacccccagctcagagccttggagtagaaccagtggataaagatgtcattcgtaaacctcctcgcaactggaaagacagcattttgactaaaaacttgatacttaaaatacttgtttcatcaataatcattgtttgtgggactttgtttgtcttctggcgtgagctacgagacaatgtgattacacctcgagacacaacaatgaccttcacatgctttgtgttttttgacatgttcaatgcactaagttccagatcccagaccaagtctgtgtttgagattggactctgcagtaatagaatgttttgctatgcagttcttggatccatcatgggacaattactagttatttactttcctccgcttcagaaggtttttcagactgagagcctaagcatactggatctgttgtttcttttgggtctcacctcatcagtgtgcatagtggcagaaattataaagaaggttgaaaggagcagggaaaagatccagaagcatgttagttcgacatcatcatcttttcttgaagtatgatgcatattgcattattttatttgcaaactaggaattgcagtctgaggatcatttagaagggcaagttcaagaggatatgaagatttgagaactttttaactattcattgactaaaaatgaacattaatgttaaagacttaagactttaacctgctggcagtcccaaatgaaattatgcaactttgatatcatattccttgatttaaattggcttttgtgattgagtgaaactttataaagcatatggtcagttatttaattaaaaaggcaaaacctgaaccaccttctgcacttaaagaagtctaacagtacaaatacactatctatcttagatagatatatttttttttatttttaaatattgtactatttatggtggtggggctttcttactaatacacaaataaatttaatcatttcaaaggcattctatttggtttagaagttgattcccaggagtgccatatttcagctactgtatttcctttttcttgtaatgtaagcagctcagataccatgtgctatcatttttgtatcaagttttttgcacaggatgtgaccactgtcagatcactgttcttttctttctttttgtgattgaaaagcctatactacaatttgaagtaaatttttgtttttcttagtaagtgtaaatggttgctttatttttattttaaaaaggtatgtctttggtttggcagaattcatgcagggctatcaagtggtgttctagggtaacagtgtccataattaacgcttagtcatagagtcaaaaacatttaagactgattgggttgaagtttataataaattatattaacatgtcttcctttttgaggtaaagatatatactttgtcaaatatcattttgtcatcctctaaatataaatccaaatacctcagctaagtaattctattttattatttttactgttatgtatgtttttaatcatatttcttaggaagtataggctactggacttagaataaaaagtccccaaacccaaacaaatggtttatgaaccagagtatatgtggaagattctttgctggtcttgctctgtgtgcatctgaagcttctttggcctagattttagcacaaacctgagtatatctcttctactttcatcatgtgttctgtaccttcttttgtttcattgggcatgctagggaaataggtggattttgtgtgtaatgccatcagtttttatgaaagcttgatgaggtataggtcatttgttttgagtatgtgggccagaaatttaaaattagaaatttgtttttctgttgagtatataaacaaaaattggtcccaattctaacaggtttaatccttcttgaagccaataagttttatcttttataatctgtcaggatgaaccactccttagcttttatccaatattaaactgcaagtgttagcactgaaatattgtcattgatagggaaaatatctattctttgagtcattgttactgaggcagttgagtgtaaggagctggctgcagtttattctacttaaccctttaaggctgaattgtcaaatgtacattgttccatgtcgttagatggaacatggaagccattgtctaatcaactctatcattagtgacttgatgtctcataccttaattttgtaatgatttttattctctgttacaaagacttgaaatacgtattaaatgcacgttaatgttttgctttgcattttaggttcagattatgacttgattgaaataaatgtgcctatacattcatttgctttgtactataaaaataaaaatgatttcttaagttaa

SEQ ID NO: 381445 - DNA, 716 bp, Homo sapiens
caaagctgggttcgcggctggcccaggagtgcggggcgcgactgggcggccggcggcggggaggggcggagcgcaggagtcggaggcgggagcagaccagcacggcctcgcggagccggcccggcggaccgtgacgggtcccctcacctcctcttctctcccctccccgcccgccctctctccctcccttcctccctcccgctcgcttcttctcacgccgggagcaggctcgcgcctcgcaccgctgccccgcgagcagctcctcttctcccgaggcgcgcggggcgcccccgcgagccccgcggctgagaccccgcagcctggaggagggctgtccggggctttggatggccagccggagcagtgacaaggatggtgactctgtccacacggccagcgaagtcccgctgaccccacggaccaattccccggatggaagacgctcgtcctcagacacatccaagtctacatacagcctgacgcggaggatttcgagtcttgagtcaagacgtcccagctctccactcatcgatattaaacccatcgagtttggcgttctcagcgccaagaaggagcccatccaaccttcggtgctcagacggacctataaccccgacgactatttcaggaagttcgaaccccacctgtactccctcgactccaacagcgacgatgtggactctctgacagacgaggagatcctgtccaagtaccag

SEQ ID NO: 381446 - DNA, 5139 bp, Homo sapiens
caaagctgggttcgcggctggcccaggagtgcggggcgcgactgggcggccggcggcggggaggggcggagcgcaggagtcggaggcgggagcagaccagcacggcctcgcggagccggcccggcggaccgtgacgggtcccctcacctcctcttctctcccctccccgcccgccctctctccctcccttcctccctcccgctcgcttcttctcacgccgggagcaggctcgcgcctcgcaccgctgccccgcgagcagctcctcttctcccgaggcgcgcggggcgcccccgcgagccccgcggctgagaccccgcagcctggaggagggctgtccggggctttggtgtggccgtggctgacactaaagactttgtagccatcaacccgagtgcagtttcgatggaaaatgaaggttgcacgttttcaaaaaatacctaatggtgaaaatgagacaatgattcctgtattgacatcaaaaaaagcaagtgaattaccagtcagtgaagttgcaagcattctccaagctgatcttcagaatggtctaaacaaatgtgaagttagtcataggcgagcctttcatggctggaatgagtttgatattagtgaagatgagccactgtggaagaagtatatttctcagtttaaaaatccccttattatgctgcttctggcttctgcagtcatcagtgttttaatgcatcagtttgatgatgccgtcagtatcactgtggcaatacttatcgttgttacagttgcctttgttcaggaatatcgttcagaaaaatctcttgaagaattgagtaaacttgtgccaccagaatgccattgtgtgcgtgaaggaaaattggagcatacacttgcccgagacttggttccaggtgatacagtttgcctttctgttggggatagagttcctgctgacttacgcttgtttgaggctgtggatctttccattgatgagtccagcttgacaggtgagacaacgccttgttctaaggtgacagctcctcagccagctgcaactaatggagatcttgcatcgagaagtaacattgcctttatgggaacactggtcagatgtggcaaagcaaagggtgttgtcattggaacaggagaaaattctgaatttggggaggtttttaaaatgatgcaagcagaagaggcaccaaaaacccctctgcagaagagcatggacctcttaggaaaacaactttccttttactcctttggtataataggaatcatcatgttggttggctggttactgggaaaagatatcctggaaatgtttactattagtgtaagtttggctgtagcagcaattcctgaaggtctccccattgtggtcacagtgacgctagctcttggtgttatgagaatggtgaagaaaagggccattgtgaaaaagctgcctattgttgaaactctgggctgctgtaatgtgatttgttcagataaaactggaacactgacgaagaatgaaatgactgttactcacatatttacttcagatggtctgcatgctgaggttactggagttggctataatcaatttggggaagtgattgttgatggtgatgttgttcatggattctataacccagctgttagcagaattgttgaggcgggctgtgtgtgcaatgatgctgtaattagaaacaatactctaatggggaagccaacagaaggggccttaattgctcttgcaatgaagatgggtcttgatggacttcaacaagactacatcagaaaagctgaatacccttttagctctgagcaaaagtggatggctgttaagtgtgtacaccgaacacagcaggacagaccagagatttgttttatgaaaggtgcttacgaacaagtaattaagtactgtactacataccagagcaaagggcagaccttgacacttactcagcagcagagagatgtgtaccaacaagagaaggcacgcatgggctcagcgggactcagagttcttgctttggcttctggtcctgaactgggacagctgacatttcttggcttggtgggaatcattgatccacctagaactggtgtgaaagaagctgttacaacactcattgcctcaggagtatcaataaaaatgattactggagattcacaggagactgcagttgcaatcgccagtcgtctgggattgtattccaaaacttcccagtcagtctcaggagaagaaatagatgcaatggatgttcagcagctttcacaaatagtaccaaaggttgcagtattttacagagctagcccaaggcacaagatgaaaattattaagtcgctacagaagaacggttcagttgtagccatgacaggagatggagtaaatgatgcagttgctctgaaggctgcagacattggagttgcgatgggccagactggtacagatgtttgcaaagaggcagcagacatgatcctagtggatgatgattttcaaaccataatgtctgcaatcgaagagggtaaagggatttataataacattaaaaatttcgttagattccagctgagcacgagtatagcagcattaactttaatctcattggctacattaatgaactttcctaatcctctcaatgccatgcagattttgtggatcaatattattatggatggacccccagctcagagccttggagtagaaccagtggataaagatgtcattcgtaaacctcctcgcaactggaaagacagcattttgactaaaaacttgatacttaaaatacttgtttcatcaataatcattgtttgtgggactttgtttgtcttctggcgtgagctacgagacaatgtgattacacctcgagacacaacaatgaccttcacatgctttgtgttttttgacatgttcaatgcactaagttccagatcccagaccaagtctgtgtttgagattggactctgcagtaatagaatgttttgctatgcagttcttggatccatcatgggacaattactagttatttactttcctccgcttcagaaggtttttcagactgagagcctaagcatactggatctgttgtttcttttgggtctcacctcatcagtgtgcatagtggcagaaattataaagaaggttgaaaggagcagggaaaagatccagaagcatgttagttcgacatcatcatcttttcttgaagtatgatgcatattgcattattttatttgcaaactaggaattgcagtctgaggatcatttagaagggcaagttcaagaggatatgaagatttgagaactttttaactattcattgactaaaaatgaacattaatgttaaagacttaagactttaacctgctggcagtcccaaatgaaattatgcaactttgatatcatattccttgatttaaattggcttttgtgattgagtgaaactttataaagcatatggtcagttatttaattaaaaaggcaaaacctgaaccaccttctgcacttaaagaagtctaacagtacaaatacactatctatcttagatagatatatttttttttatttttaaatattgtactatttatggtggtggggctttcttactaatacacaaataaatttaatcatttcaaaggcattctatttggtttagaagttgattcccaggagtgccatatttcagctactgtatttcctttttcttgtaatgtaagcagctcagataccatgtgctatcatttttgtatcaagttttttgcacaggatgtgaccactgtcagatcactgttcttttctttctttttgtgattgaaaagcctatactacaatttgaagtaaatttttgtttttcttagtaagtgtaaatggttgctttatttttattttaaaaaggtatgtctttggtttggcagaattcatgcagggctatcaagtggtgttctagggtaacagtgtccataattaacgcttagtcatagagtcaaaaacatttaagactgattgggttgaagtttataataaattatattaacatgtcttcctttttgaggtaaagatatatactttgtcaaatatcattttgtcatcctctaaatataaatccaaatacctcagctaagtaattctattttattatttttactgttatgtatgtttttaatcatatttcttaggaagtataggctactggacttagaataaaaagtccccaaacccaaacaaatggtttatgaaccagagtatatgtggaagattctttgctggtcttgctctgtgtgcatctgaagcttctttggcctagattttagcacaaacctgagtatatctcttctactttcatcatgtgttctgtaccttcttttgtttcattgggcatgctagggaaataggtggattttgtgtgtaatgccatcagtttttatgaaagcttgatgaggtataggtcatttgttttgagtatgtgggccagaaatttaaaattagaaatttgtttttctgttgagtatataaacaaaaattggtcccaattctaacaggtttaatccttcttgaagccaataagttttatcttttataatctgtcaggatgaaccactccttagcttttatccaatattaaactgcaagtgttagcactgaaatattgtcattgatagggaaaatatctattctttgagtcattgttactgaggcagttgagtgtaaggagctggctgcagtttattctacttaaccctttaaggctgaattgtcaaatgtacattgttccatgtcgttagatggaacatggaagccattgtctaatcaactctatcattagtgacttgatgtctcataccttaattttgtaatgatttttattctctgttacaaagacttgaaatacgtattaaatgcacgttaatgttttgctttgcattttaggttcagattatgacttgattgaaataaatgtgcctatacattcatttgctttgtactataaaaataaaaatgatttcttaagttaaaaaaaaaaaaaaaaaactgaaaatcaaaaaaaaaaagaaaaaaaaaaaaaataaacttacaagacataagtaaataacaggagaacactagaggataactgaaatataaaacctttggggggggcccggaacccaatttcctcttagggtggggtgaataaaattaaatgg

SEQ ID NO: 381447 - DNA, 5118 bp, Homo sapiens
caaagctgggttcgcggctggcccaggagtgcggggcgcgactgggcggccggcggcggggaggggcggagcgcaggagtcggaggcgggagcagaccagcacggcctcgcggagccggcccggcggaccgtgacgggtcccctcacctcctcttctctcccctccccgcccgccctctctccctcccttcctccctcccgctcgcttcttctcacgccgggagcaggctcgcgcctcgcaccgctgccccgcgagcagctcctcttctcccgaggcgcgcggggcgcccccgcgagccccgcggctgagaccccgcagcctggaggagggctgtccggggctttggtgtggccgtggctgacactaaagactttgtagccatcaacccgagtgcagtttcgatggaaaatgaaggttgcacgttttcaaaaaatacctaatggtgaaaatgagacaatgattcctgtattgacatcaaaaaaagcaagtgaattaccagtcagtgaagttgcaagcattctccaagctgatcttcagaatggtctaaacaaatgtgaagttagtcataggcgagcctttcatggctggaatgagtttgatattagtgaagatgagccactgtggaagaagtatatttctcagtttaaaaatccccttattatgctgcttctggcttctgcagtcatcagtgttttaatgcatcagtttgatgatgccgtcagtatcactgtggcaatacttatcgttgttacagttgcctttgttcaggaatatcgttcagaaaaatctcttgaagaattgagtaaacttgtgccaccagaatgccattgtgtgcgtgaaggaaaattggagcatacacttgcccgagacttggttccaggtgatacagtttgcctttctgttggggatagagttcctgctgacttacgcttgtttgaggctgtggatctttccattgatgagtccagcttgacaggtgagacaacgccttgttctaaggtgacagctcctcagccagctgcaactaatggagatcttgcatcgagaagtaacattgcctttatgggaacactggtcagatgtggcaaagcaaagggtgttgtcattggaacaggagaaaattctgaatttggggaggtttttaaaatgatgcaagcagaagaggcaccaaaaacccctctgcagaagagcatggacctcttaggaaaacaactttccttttactcctttggtataataggaatcatcatgttggttggctggttactgggaaaagatatcctggaaatgtttactattagtgtaagtttggctgtagcagcaattcctgaaggtctccccattgtggtcacagtgacgctagctcttggtgttatgagaatggtgaagaaaagggccattgtgaaaaagctgcctattgttgaaactctgggctgctgtaatgtgatttgttcagataaaactggaacactgacgaagaatgaaatgactgttactcacatatttacttcagatggtctgcatgctgaggttactggagttggctataatcaatttggggaagtgattgttgatggtgatgttgttcatggattctataacccagctgttagcagaattgttgaggcgggctgtgtgtgcaatgatgctgtaattagaaacaatactctaatggggaagccaacagaaggggccttaattgctcttgcaatgaagatgggtcttgatggacttcaacaagactacatcagaaaagctgaatacccttttagctctgagcaaaagtggatggctgttaagtgtgtacaccgaacacagcaggacagaccagagatttgttttatgaaaggtgcttacgaacaagtaattaagtactgtactacataccagagcaaagggcagaccttgacacttactcagcagcagagagatgtgtaccaacaagagaaggcacgcatgggctcagcgggactcagagttcttgctttggcttctggtcctgaactgggacagctgacatttcttggcttggtgggaatcattgatccacctagaactggtgtgaaagaagctgttacaacactcattgcctcaggagtatcaataaaaatgattactggagattcacaggagactgcagttgcaatcgccagtcgtctgggattgtattccaaaacttcccagtcagtctcaggagaagaaatagatgcaatggatgttcagcagctttcacaaatagtaccaaaggttgcagtattttacagagctagcccaaggcacaagatgaaaattattaagtcgctacagaagaacggttcagttgtagccatgacaggagatggagtaaatgatgcagttgctctgaaggctgcagacattggagttgcgatgggccagactggtacagatgtttgcaaagaggcagcagacatgatcctagtggatgatgattttcaaaccataatgtctgcaatcgaagagggtaaagggatttataataacattaaaaatttcgttagattccagctgagcacgagtatagcagcattaactttaatctcattggctacattaatgaactttcctaatcctctcaatgccatgcagattttgtggatcaatattattatggatggacccccagctcagagccttggagtagaaccagtggataaagatgtcattcgtaaacctcctcgcaactggaaagacagcattttgactaaaaacttgatacttaaaatacttgtttcatcaataatcattgtttgtgggactttgtttgtcttctggcgtgagctacgagacaatgtgattacacctcgagacacaacaatgaccttcacatgctttgtgttttttgacatgttcaatgcactaagttccagatcccagaccaagtctgtgtttgagattggactctgcagtaatagaatgttttgctatgcagttcttggatccatcatgggacaattactagttatttactttcctccgcttcagaaggtttttcagactgagagcctaagcatactggatctgttgtttcttttgggtctcacctcatcagtgtgcatagtggcagaaattataaagaaggttgaaaggagcagggaaaagatccagaagcatgttagttcgacatcatcatcttttcttgaagtatgatgcatattgcattattttatttgcaaactaggaattgcagtctgaggatcatttagaagggcaagttcaagaggatatgaagatttgagaactttttaactattcattgactaaaaatgaacattaatgttaaagacttaagactttaacctgctggcagtcccaaatgaaattatgcaactttgatatcatattccttgatttaaattggcttttgtgattgagtgaaactttataaagcatatggtcagttatttaattaaaaaggcaaaacctgaaccaccttctgcacttaaagaagtctaacagtacaaatacactatctatcttagatagatatatttttttttatttttaaatattgtactatttatggtggtggggctttcttactaatacacaaataaatttaatcatttcaaaggcattctatttggtttagaagttgattcccaggagtgccatatttcagctactgtatttcctttttcttgtaatgtaagcagctcagataccatgtgctatcatttttgtatcaagttttttgcacaggatgtgaccactgtcagatcactgttcttttctttctttttgtgattgaaaagcctatactacaatttgaagtaaatttttgtttttcttagtaagtgtaaatggttgctttatttttattttaaaaaggtatgtctttggtttggcagaattcatgcagggctatcaagtggtgttctagggtaacagtgtccataattaacgcttagtcatagagtcaaaaacatttaagactgattgggttgaagtttataataaattatattaacatgtcttcctttttgaggtaaagatatatactttgtcaaatatcattttgtcatcctctaaatataaatccaaatacctcagctaagtaattctattttattatttttactgttatgtatgtttttaatcatatttcttaggaagtataggctactggacttagaataaaaagtccccaaacccaaacaaatggtttatgaaccagagtatatgtggaagattctttgctggtcttgctctgtgtgcatctgaagcttctttggcctagattttagcacaaacctgagtatatctcttctactttcatcatgtgttctgtaccttcttttgtttcattgggcatgctagggaaataggtggattttgtgtgtaatgccatcagtttttatgaaagcttgatgaggtataggtcatttgttttgagtatgtgggccagaaatttaaaattagaaatttgtttttctgttgagtatataaacaaaaattggtcccaattctaacaggtttaatccttcttgaagccaataagttttatcttttataatctgtcaggatgaaccactccttagcttttatccaatattaaactgcaagtgttagcactgaaatattgtcattgatagggaaaatatctattctttgagtcattgttactgaggcagttgagtgtaaggagctggctgcagtttattctacttaaccctttaaggctgaattgtcaaatgtacattgttccatgtcgttagatggaacatggaagccattgtctaatcaactctatcattagtgacttgatgtctcataccttaattttgtaatgatttttattctctgttacaaagacttgaaatacgtattaaatgcacgttaatgttttgctttgcattttaggttcagattatgacttgattgaaataaatgtgcctatacattcatttgctttgtactataaaaataaaaatgatttcttaagttaaaaaaaaaaatacaaaatcaaaattaaagtaacaaaacacattaacacccaaaactattcacatatatcaacataatcacatatagtattaattaaacacttttttaattataattccttctggggggagtccggaatccaaattcccata

SEQ ID NO: 381448 - DNA, 3550 bp, Homo sapiens
gggaactccttcctcagcctctcgtcagcgccgcttctcctggtttctcttgcagatgctgctgctaggggtggtgggagcagccgtgggacgcgtggccgggagcgggggtgacagcctgggattccgggggcttctcttccttgtcctcctcctctcctctctattcccagtgtggccgtggctgacactaaagactttgtagccatcaacccgagtgcagtttcgatggaaaatgaaggttgcacgttttcaaaaaatacctaatggtgaaaatgagacaatgattcctgtattgacatcaaaaaaagcaagtgaattaccagtcagtgaagttgcaagcattctccaagctgatcttcagaatggtctaaacaaatgtgaagttagtcataggcgagcctttcatggctggaatgagtttgatattagtgaagatgagccactgtggaagaagtatatttctcagtttaaaaatccccttattatgctgcttctggcttctgcagtcatcagtgttttaatgcatcagtttgatgatgccgtcagtatcactgtggcaatacttatcgttgttacagttgcctttgttcaggaatatcgttcagaaaaatctcttgaagaattgagtaaacttgtgccaccagaatgccattgtgtgcgtgaaggaaaattggagcatacacttgcccgagacttggttccaggtgatacagtttgcctttctgttggggatagagttcctgctgacttacgcttgtttgaggctgtggatctttccattgatgagtccagcttgacaggtgagacaacgccttgttctaaggtgacagctcctcagccagctgcaactaatggagatcttgcatcgagaagtaacattgcctttatgggaacactggtcagatgtggcaaagcaaagggtgttgtcattggaacaggagaaaattctgaatttggggaggtttttaaaatgatgcaagcagaagaggcaccaaaaacccctctgcagaagagcatggacctcttaggaaaacaactttccttttactcctttggtataataggaatcatcatgttggttggctggttactgggaaaagatatcctggaaatgtttactattagtgtaagtttggctgtagcagcaattcctgaaggtctccccattgtggtcacagtgacgctagctcttggtgttatgagaatggtgaagaaaagggccattgtgaaaaagctgcctattgttgaaactctgggctgctgtaatgtgatttgttcagataaaactggaacactgacgaagaatgaaatgactgttactcacatatttacttcagatggtctgcatgctgaggttactggagttggctataatcaatttggggaagtgattgttgatggtgatgttgttcatggattctataacccagctgttagcagaattgttgaggcgggctgtgtgtgcaatgatgctgtaattagaaacaatactctaatggggaagccaacagaaggggccttaattgctcttgcaatgaagatgggtcttgatggacttcaacaagactacatcagaaaagctgaatacccttttagctctgagcaaaagtggatggctgttaagtgtgtacaccgaacacagcaggacagaccagagatttgttttatgaaaggtgcttacgaacaagtaattaagtactgtactacataccagagcaaagggcagaccttgacacttactcagcagcagagagatgtgtaccaacaagagaaggcacgcatgggctcagcgggactcagagttcttgctttggcttctggtcctgaactgggacagctgacatttcttggcttggtgggaatcattgatccacctagaactggtgtgaaagaagctgttacaacactcattgcctcaggagtatcaataaaaatgattactggagattcacaggagactgcagttgcaatcgccagtcgtctgggattgtattccaaaacttcccagtcagtctcaggagaagaaatagatgcaatggatgttcagcagctttcacaaatagtaccaaaggttgcagtattttacagagctagcccaaggcacaagatgaaaattattaagtcgctacagaagaacggttcagttgtagccatgacaggagatggagtaaatgatgcagttgctctgaaggctgcagacattggagttgcgatgggccagactggtacagatgtttgcaaagaggcagcagacatgatcctagtggatgatgattttcaaaccataatgtctgcaatcgaagagggtaaagggatttataataacattaaaaatttcgttagattccagctgagcacgagtatagcagcattaactttaatctcattggctacattaatgaactttcctaatcctctcaatgccatgcagattttgtggatcaatattattatggatggacccccagctcagagccttggagtagaaccagtggataaagatgtcattcgtaaacctcctcgcaactggaaagacagcattttgactaaaaacttgatacttaaaatacttgtttcatcaataatcattgtttgtgggactttgtttgtcttctggcgtgagctacgagacaatgtgattacacctcgagacacaacaatgaccttcacatgctttgtgttttttgacatgttcaatgcactaagttccagatcccagaccaagtctgtgtttgagattggactctgcagtaatagaatgttttgctatgcagttcttggatccatcatgggacaattactagttatttactttcctccgcttcagaaggtttttcagactgagagcctaagcatactggatctgttgtttcttttgggtctcacctcatcagtgtgcatagtggcagaaattataaagaaggttgaaaggagcagggaaaagatccagaagcatgttagttcgacatcatcatcttttcttgaagtctggctctgggagaggagtggacagcagctggttgagatacatccccatctggagacaggactgccactgacagaagatgtgagctgtgtctaagtccagtcttgtgcccagccgtgtctgcgccttcactctttggaactctgcatacaacatcttagcaccatcttcctgcagctcttccttacctaaataaagaaacagcccaagggcagtatttctaaaagcactgtaacagcttttcattttctccacatatactacaaattctataaagaaagaaattaatttaaaaaaactaagatgtttttctcttctggcttcataaatgccttgctgtataaattgaaatattgatactgaactgtctttttaatgatgacctaactttattcaacccatcggaatttactttttccctgaaataagatcttttccactggtctactacctgaccataaacatgtctgcatttgaattctctaaaccctaaatctgtgtctatgaaaaatacaaatgactattaaatattattctctttactgttctctttcaccgaaa

SEQ ID NO: 381449 - DNA, 1051 bp, Homo sapiens
gggaactccttcctcagcctctcgtcagcgccgcttctcctggtttctcttgcagatgctgctgctaggggtggtgggagcagccgtgggacgcgtggccgggagcgggggtgacagcctgggattccgggggcttctcttccttgtcctcctcctctcctctctattcccagtgtggccgtggctgacactaaagactttgtagccatcaacccgagtgcagtttcgatggaaaatgaaggttgcacgttttcaaaaaatacctaatggtgaaaatgagacaatgattcctgtattgacatcaaaaaaagcaagtgaattaccagtcagtgaagttgcaagcattctccaagctgatcttcagaatggtctaaacaaatgtgaagttagtcataggcgagcctttcatggctggaatgagtttgatattagtgaagatgagccactgtggaagaagtatatttctcagtttaaaaatccccttattatgctgcttctggcttctgcagtcatcagtgttttaatgcatcagtttgatgatgccgtcagtatcactgtggcaatacttatcgttgttacagttgcctttgttcaggaatatcgttcagaaaaatctcttgaagaattgagtaaacttgtgccaccagaatgccattgtgtgcgtgaaggaaaattggagcatacacttgcccgagacttggttccaggtgatacagtttgcctttctgttggggatagagttcctgctgacttacgcttgtttgaggtaaatttgggatctgattgtaataagtgaaaatacgtggatgtagattaaaggataaacattactagttttaaggaattaacacatagttgatttgaaccatttggtattctactttaaaatgtgacatatataaacttttttttttccttaaaatgtatctgtctctactgtaacatcttttgaggtgtttgtttagtgaatcagcagatctttatagaaacctgcatattagggactgtgggagatacaaagatgatatgacagaatacttgtgactaggga

SEQ ID NO: 381450 - DNA, 466 bp, Homo sapiens
ctaatgtcactttctcagcaagactttccctcacccaacaatctggaggaggcctgttccctcccaccccagtcactatcacatcatcctttttcatttcttcagagcacatctcactgtaagaaatgatcttgtttacatgtatattatgtctccccagtttatctgaaaattcttatctgtcctgtttacactatatccccagtacataaaaatgtgccatatatatttttttgtttttttaaacagaaacatagcttacagtttttttgttttgttgtttaagcttacagtttttaaactttttatttggagataattatagactcacaggaatttgtaaaatagtacagaaaacagaagaacaatagagaaagtcaatgaaatcaaaagttggttctttgagaggattaacacattggcaaacctttagctaaactaaccaaaaaaagatgggggagaagat

SEQ ID NO: 381451 - DNA, 449 bp, Homo sapiens
tcccagcctgccagctcagctgtttctccctatagcgcatctctcagttatttctaggagttcttaaaggtgtgcatcgcatcatctcaaaaaccagcccgtccaacttgtgttatctgccctgttgatctacctttgttttcccaaggtctgcagcctccaaagcttctgaaatgggacttgctgctgctggtatctttagaggggcatgtggtatcctgccaagggtgattccttagcctgtcagtggcccagggctcaggattctacctgcctcacatctcctggatccatctgcatgtcttggcccaatctccatatcctcggttctggcccctccactacctggttgccactgatgattccaaggattcagatcagctcacagtgctccaaaaatatagcaaagtgaaacaaatgtgcaaataaatgataaaaacaaaagaaga

SEQ ID NO: 381452 - DNA, 464 bp, Homo sapiens
gcatcaaaatggaaaccaacaagtggaatctgctttttattaaaaaaaaaccataatcaagtaaaatttatgcaacaaatgaaaagattattcaaaattgagaaatctattaatgtgatttacaacattaacagattatagaagaaaaagctggccaggcacagtggctcatgcctgtaatcccagcactttgggaggccaaggtgggaggattgcttaagctcaggagttcaagaccagcctgggcaatctggcaagaccccatttctacagaaaaataaaaagaaattagctgggcatggtgatgaactcctatagtcccagctacttgggaagctgaggctggagggtctcttgagcacagaaggtcaaggctgcagtgagccgttgtgccactgcactccagcatgggtgacagaacaaaatactgtctcaaaaataacgtaaaatgaaataaaaataaa

SEQ ID NO: 381453 - DNA, 236 bp, Homo sapiens
ttttttcccactgatcacagggaaggagcaaccctgtgatatgtatgtttcctaattaaagcttaaatctagttccctgcaattgcacttctgaaatgttggaaccacagagtgaaatatttttaactttttccatccatcacattggtttttaggttgctagtaatgtcagccagaaaagtatctgaattgggaacatttttcttagagatttctacacttcttaaatgggtaag

SEQ ID NO: 381454 - DNA, 376 bp, Homo sapiens
gagtacagtggtgtgatctcagctcactgcaacctccgcctcccagttcaagtgactgtcctgcctcagcctcccaaggaggtgggattacaggtgtgcaccaccacgcccggctaatttttgtacttttagtagatggggtttcaccatgttggccgggctggtcttgaactcctaacatcaggcaatcctcccacctctgcctcccaaaatcccatgcctgggattacaggcatgagccaccccgcctggccaggattcacaatttgaacaaattctattttaagcttcatattttcctcagcatttaaaaaaaaaacatgtacagagaccatgtccagggcagcagctgcagccggacccccacgccaggcca

SEQ ID NO: 381455 - DNA, 248 bp, Homo sapiens
  misc_feature (1)..(2): n is a, c, g, or t
nngggggaggcccaaagattatgccatgaagaacttcaacattctggcacgatcaaaaaaaaaaaaaaaagtgaaaccttgggacgtactgattttaagtagaatcctagcaactgaaattatcaacttccttctgtgggtgaatgtgatgctaagcttgagcatagtaatgaattggttacccattcatttgctgtatagcatttactagtctaaaatttgggacagcaggcagagttcagggatgg

SEQ ID NO: 381456 - DNA, 362 bp, Homo sapiens
attggtgtggagcagtttcagcagtgggaggggtgaaagcccagctggagtgggctgtcaggagacttgggcggtaggcagaatgccccccaaaggtgtcacgcccttatgcctgcgcctgtaatattatgttacataacaaaagggactttgcagatgtaagtaggttaccaattagtgaccttaaaatagggagattatcctgtttatctgggtggacccaatctaatcacaggaacacttaaaggcataaagctttctccagctgaaggtgggagaaatgggacagaaaggatcaaagacgtgaagtagtagaaaggctggctttggccgggcacaatggctcacacctgtaatcccag

SEQ ID NO: 381457 - DNA, 352 bp, Homo sapiens
tccctccgtctagataagattctttaagaaaatcaatccagagcaaagccctgctcctttaagccctcactcaagtcagctaacacaagtccaatgctgataagccctttctgatacttctcactgagatgtactatggttccccatggtgtatattttccttaattgcaatgagcagtaaacccagcttgttcaactagagttggttcctgtggtccttgacttaagagcattgacaggacagtgggtcatcctcagagtcactctgatgggcagatgttatcccctccactcccatatacatatgccatgatatctagattactaagaaagcccattgtggcactgccaa

SEQ ID NO: 381458 - DNA, 1666 bp, Homo sapiens
tctcggccccccaaagtgctgggattacaggtgtgagccactgcgccgggcctggcaactcactttcaagctggctgggcttggctcctcacatttgtgcattctgaacacaggctgcagggacagctgctacccccagggaaagctcttttcgtggtgaagggagaagcataaaaaggcaagctgcattgtgcatatgcatatctgtgtctctccttatgttgtgtcatccaatatcccattggccaaagcacgtcacatagccaagctccaaatcaagggtcagagaagtaaatgatatctttttcctgaggggaactgcaacactacagggcaatggacacagccacagggaggggtgaagaattcaggtggacaatgcaatgaaccatgctgatgtttcctggagctgggatcttcaggagcctgtgcttggctgtgcccatccagtcaccaaggaggaacccccctactgcagagctgctttggggcctcgatgccattgttgccaaactgacattccatgatgaaaatggactgtaatttgtacagctatttgccagttgttttttctattttgcactgtggaaatctttgcccaaattactgcaagagtctcgagcatcctgctgtcgtaagtgcagagtcaaaggaagaaaacgatgattttttaaaccatctttctgctttctagtctcacctgagtgcctcacatttggcagaatcaacctggaatcctgctcataagactatcagggaaatataatttccagacttccatttccagaaaaatgtaataaatacttttaaaggggatggagatggtaccgtgtgctaaccccactctgagacaaacctgggtcacaggaaccatagggaagatgtctgcagtagaaggggacctcgaagtactcaagtacttggctcacaacagcactattcacataaagcctggcctgccccttggtgacctccttcccttacgcctctagactctactaggtgatcagaaatccctgcaagctagttggggagggaagagtgaaagtgaaaaatggagaggaaacactgctacccgcccaatgcctgaagccaaatgcaagcctgggccaggcttgggggaggaatcaagaggaagcttaaacttaaaatgaaatcgaaagtttagactcctacatgggattggacattttaaatgctgaacagagcctatttttatagctagaagttacaggacaaatttttggttaactgagaatgatccaaaaatcatgtgaattttgtgatccagaaagtcacagaacatgccctagattttatcccaggggcagggaggagtgacctgcagagcaagtttgaattggtaaatagaaaacaagaataaaatagtttgctgtttacattccataagcctggctctttcaacatcatgggtatatttcttggttgaatttagtatgccactatgactccggattgtgatatttgcctaggatgttttgtcctaatatttagtatggaattatttgcccaaatcacctgcccctctccacttgtagctttatttcaagaggtatgtttctcaaagtggagtgactgccagagtgggagaaaggagctagcccttacagctgtagtaggtctttgtacatcagcttggtaaatc

SEQ ID NO: 381459 - DNA, 1552 bp, Homo sapiens
gcatgctgatatgatagagaggcactcatcactaagcagagtagaatgtgatgcgacgtctcccgaccaacctgcttcgctagattttatgtaaggaaaagcttggaaagccaggacacaacgctgctgcctgctttgtgcagggtcctccggggctcagccctgagttggcatcacctgcgcagggccctctggggctcagccctgagctagtgtcacctgcacagggccctctggggctcagccctgagctggcgtcacctgtgcagggcccgcatgctgatgtttcctggagctgggatcttcaggagcctgtgcttggctgtgcccatccagtcaccaaggaggaacccccctactgcagagctgctttggggcctcgatgccattgttgccaaactgacattccatgatgaaaatggactgtaatttgtacagctatttgccagttgttttttctattttgcactgtggaaatctttgcccaaattactgcaagagtctcgagcatcctgctgtcgtaagtgcagagtcaaaggaagaaaacgatgattttttaaaccatctttctgctttctagtctcacctgagtgcctcacatttggcagaatcaacctggaatcctgctcataagactatcagggaaatataatttccagacttccatttccagaaaaatgtaataaatacttttaaaggggatggagatggtaccgtgtgctaaccccactctgagacaaacctgggtcacaggaaccatagggaagatgtctgcagtagaaggggacctcgaagtactcaagtacttggctcacaacagcactattcacataaagcctggcctgccccttggtgacctccttcccttacgcctctagactctactaggtgatcagaaatccctgcaagctagttggggagggaagagtgaaagtgaaaaatggagaggaaacactgctacccgcccaatgcctgaagccaaatgcaagcctgggccaggcttgggggaggaatcaagaggaagcttaaacttaaaatgaaatcgaaagtttagactcctacatgggattggacattttaaatgctgaacagagcctatttttatagctagaagttacaggacaaatttttggttaactgagaatgatccaaaaatcatgtgaattttgtgatccagaaagtcacagaacatgccctagattttatcccaggggcagggaggagtgacctgcagagcaagtttgaattggtaaatagaaaacaagaataaaatagtttgctgtttacattccataagcctggctctttcaacatcatgggtatatttcttggttgaatttagtatgccactatgactccggattgtgatatttgcctaggatgttttgtcctaatatttagtatggaattatttgcccaaatcacctgcccctctccacttgtagctttatttcaagaggtatgtttctcaaagtggagtgactgccagagtgggagaaaggagctagcccttacagctgtagtaggtctttgtacatcagcttggtaaatc

SEQ ID NO: 381460 - DNA, 497 bp, Homo sapiens
tctcggccccccaaagtgctgggattacaggtgtgagccactgcgccgggcctggcaactcactttcaagctggctgggcttggctcctcacatttgtgcattctgaacacaggctgcagggacagctgctacccccagggaaagctcttttcgtggtgaagggagaagcataaaaaggcaagctgcattgtgcatatgcatatctgtgtctctccttatgttgtgtcatccaatatcccattggccaaagcacgtcacatagccaagctccaaatcaagggtcagagaagtaaatgatatctttttcctgaggggaactgcaacactacagggcaatggacacagccacagggaggggtgaagaacggcagcgagcgcaccaagtacacccagaatgaaagccagcgtgaaagagatccggaggaagcagagtcacaacagcatacataagcgaggacagacactaaccacagcgcgtagtacttgggcaacgtgc

SEQ ID NO: 381461 - DNA, 494 bp, Homo sapiens
gaaagcaggctcatttggggactgattccaagcagggttctgaagaaagagctagcccactgcgcagtggcccacctggagaggtagcagtctcctttcctgatgccagatccaagcagaggctaatgctggagaccagcgatgcccgtgggagaatccctgtagctagagggaattatctggaagtaatttatccctgtaccgccttgtggggttgggtgtttcttgcccactgcatgagttggtattactctaagagcgacagatacatgttttcacatgctttccatgtactagacactttctaggcatcagttctcaacatgacaaagagatccttctcagggaaatcagatccctcttccactgctgaaaaaccccacagtggctcccatttcacttggcataaacaccagtggccttgcagtggctgccaaggtcaaaccatctgcctttctgcttcctgctcacccttttccttcatcttctcatct

SEQ ID NO: 381462 - DNA, 783 bp, Homo sapiens
ggaggccaacatgtggaggatcgcttgagcccaggagttcgaggctgcagtgagctgtgatcacaccactgcactccagcctgggcaacagagcgagaccctgtcttaagaaaaaaagaaattcattaattcttccaaacctttataaagtaagaaaccactgaattactagaatagaaagtcagtctcctgagttaatttccacattgttgtctgtcttggagtcacaggttcattacccaagaaaactgccttttaatttttttagattactgttgatttcttaagtatgtaaatgactaacttttaaatataaggtaagttattttaaagaaatctactaagatagaagtcactttttttaaagtaaggaaattccttttgtatctcagtttatgttctcaaatacactactttataaaagtatacaattgactggatacttattcaccttgcccccatttcaagcgcctgttattgtcatatttattaaaaacagggtacctcataatggtgaaaatttctaaattattgggtctatatgtgccttagactgcctgattactttggctgttctcccagtgactgataataatagcatgatttgagtgttcatgtgagaatacatctaatattccttaagatctaagtaaataagttaaattctgatatgccacttatgtcaaaataattgttatatagatgaattattactgtaacatcatgaagtatcttaaaattatatgacttttggcctctcaaatgtcttacatgataataccc

SEQ ID NO: 381463 - DNA, 394 bp, Homo sapiens
gaatagttttgcaaaggaaaatatctttagcatgtgttgcctcagtctattcaaattttacaaccttgttactagttggacattatttttttcctgattgcccaaacaaatttcactgaaagccaataccaagatctgaacataagattataaaaaaagcaagaaataagaaaaatacaaattcacacaattacaatgagaaacctattctgagaataacagcttttgtaaaatttcccatttttattaaaatgttggttccaagaatggatttgtgttgtgccattttcagttcttgttactctcattgtcataatagggaatgagccaaaattgcaatgctttggatagtcttgtcacttggaatagtgtggagacctgctctgaccttctg

SEQ ID NO: 381464 - DNA, 356 bp, Homo sapiens
ctaatttaatcctcacaaaaactctacactagggttttttcctttttacagtaaaaacaacaacagcaacaacaaccacaacaacaaaaacccaaaaaaccaaaaacagagatttagaaactgccccaggacacacagctagtaaatgttggaaccagggtttgaacctagaccatctcattttttgctaccctatgaggaaagaaggataatttattataagagggttgttacagaatgaagggcagaaattcagaaggattacaggatgggctggaaccacaaagctgttgggaactcaggtcgtattctccctcagattcaactgtctgctttttagactagatgtggtatcc

SEQ ID NO: 381465 - DNA, 137 bp, Homo sapiens
cccctctgcttcctgaccaatcctggcacttccccaaaaggccctgtatggtgtggctgcctcctgctcttgggaactgatcaacaaggacctatctcacaggactggaaaaatacaccaaaagtatctgtcatgct

SEQ ID NO: 381466 - DNA, 447 bp, Homo sapiens
gagtgtcaagtgccctccagaagtgcccatgccaaaccagatgatggttccttattcctctacaattttctagtccttgttacaatattgaataatgcctgacaggcactctcatctccctgcaagggaaggtgagtgaagcaaaaataaaatgccaaccttagctcttctcagtatttaaatgcaatattatattatagtatcaatccattcattggtaatgaaatgacaaaaaacgtcacttcatttccccccatcaataatgacaacttttcttcttcccaaaaagctgtttcaggaggttttagtgggatgaataaatgtattcctttttaacacttttgttgtttaaaaatgctattgtttcatttgaggtgtgaggaaatgtgctaaccctgtcattgttggtgcagcagtgcagaaatgataactgtatatagttttttc

SEQ ID NO: 381467 - DNA, 419 bp, Homo sapiens
cagaattcaaccttatatagaaaatatagtgtttttagtgatttcattttgaaatattttgtacataaaaacaaaatgaaactattttgagtactttatgcctatacagactactagtaactgaacattcatataacgtagtatgttttgtaaaatgtttagcggttgcaaactggtttgccagatatgttttgtttagtaaaacttgagttgtaatcctttcaaagatggaagtaatatatagaaacggacgtttctgccctcttgaaaaagatgtggcaagagcaggcccacattttacatggcaacagttgataagggctaagctgtcttccccagatagatggaagaggacattgtccagcttgctgcaatccacacctgggtctctttattcagtcatgttctttgtactttct

SEQ ID NO: 381468 - DNA, 402 bp, Homo sapiens
ttttttgtatttttagtagagacgggatttcaccgtgttagccagaatggtctcgatctcctgacctcgtgatccgcccgtctcggcctcccaaagtgcgagaaagaggtgtttttgagtgagctggagcacggtgccactcctcagggctgtcgagtccctgcttgtgtgtgtgaaaaggcggtagaatgtggtggttaggagcacggacttttcttcaggcgctgccctcaactagctgtgtgaccttgggccagttatttcatctattcctcagtttcttcatctttaaaatgggaataataattccttcttcagaaggttactgtattaagttaaaatatctagagtgcttagaacaggacttgatgcatatttaactcattaaatattagctgctgc

SEQ ID NO: 381469 - DNA, 463 bp, Homo sapiens
  misc_feature (10)..(10): n is a, c, g, or t
  misc_feature (38)..(38): n is a, c, g, or t
  misc_feature (53)..(53): n is a, c, g, or t
  misc_feature (57)..(59): n is a, c, g, or t
  misc_feature (69)..(69): n is a, c, g, or t
  misc_feature (74)..(75): n is a, c, g, or t
  misc_feature (78)..(79): n is a, c, g, or t
  misc_feature (82)..(82): n is a, c, g, or t
aaaaaaattnatttataaatggagcccacactccgganaatggcaaaaaaaanagannncaaaaaaacnagaanntannggncagctgcgcccctagctgggatctggtacctggactaggctaattacagcttctccccaacaggaaactgtgggatttgaaaaggaaagggaagggaaaacagagaacctagtggtctaccaagtggttggcaactttcccaatgtctgcttactctgaggcttggcactgggggccagggcctgccccagggctcctggaatttcccttgatccagctaggctgggacactccctaaatcagctgcgtgttgttagcatcaggcagaatgaatggcagagagtgattctgtcttcatagagggtggggtacttctccataaggcatctcagtcaaatccccatcactgtcataaattcaaataaaatgtctgaacaaggg

SEQ ID NO: 381470 - DNA, 1272 bp, Homo sapiens
agcaacagcctcccgccgagccggccgggacagaggcggcccccacccccactgggcaggggactgcagacggcgctccccgactctcaagacgaccagggagcttcccttttcctcagcggggaggaggttctgggggaagagaagctgaaggagatactgaaggagcgggaacttaaaatttactggggaacggcaaccacgggcaaaccacatgtggcttactttgtgcccatgtcaaagattgcagacttcttaaaggcagggtgtgaggtaacaattctgtttgcggacctccacgcatacctggataacatgaaagccccatgggaacttctagaactccgagtcagttactatgagaatgtgatcaaagcaatgctggagagcattggtgtgcccttggagaagctcaagttcatcaaaggcactgattaccagctcagcaaagagtacacactagatgtgtacagactctcctccgtggtcacacagcacgattccaagaaggctggagctgaggtggtaaagcaggtggagcaccctttgctgagtggcctcttataccccggactgcaggctttggatgaagagtatttaaaagtagatgcccaatttggaggcattgatcagagaaagattttcacctttgcagagaagtacctccctgcacttggctattcaaaacgggtccatctgatgaatcctatggttccaggattaacaggcagcaaaatgagctcttcagaagaggtaagttgccagctgagacttgaatttagaaatcttcagcctcaatggagagattgaggactgaaaagaacagtgacctggctaactagaattctccaatatttgagttagaaggagccttacaccattcaattagtttagtggttcttgagtatcaaaggatccagagcagtcctgatgagatctaatcataacttaatggtttttgctgctgataaaaaaataaaagcaaaagtaatgtctttgttcatacgactgtgatgaaattcagccttattaatgagagcactatggttgcatttcactaattagcattttgattcctagggtaatacttgatatcactaatattatgatatcttttaatatttaagagtccctcttgagctcgtgtacttgagggaaagttcactttggttctgatcattagaacgtggaaatccaaagatgtgaaaggttgagttctgggttcccaaacatggcttaccttcagaatcatctagggaatttaaaaaaaaa

SEQ ID NO: 381471 - DNA, 366 bp, Homo sapiens
aaagaatactacataaaaaaagaagaataacatacacaaatctgttacgggaaatattaattatccctccaccaccacccagtagtcagctccttaccatcatttatttttgtaaagttgtgtgaataatttttaacccatttatcctgtttgtgcatagggtttttaagaaaaaacagcccagtgcaaagagcaacttcccctcccctccctctttttagttttaatttattggttaaactgatggcagcaatccatgaggtgtgtcaaagagtgtacatatgtatgtgtgtatattgaatgctaaacatattactgaaagacacattttaataaagatttctgtcataattcaaaaaaaaaaaa

SEQ ID NO: 381472 - DNA, 490 bp, Homo sapiens
tagtggtggcggaggcagtgaagaggatcccccctgcagacaccacagccaacggaaaaggagtgaaaattgaatttgatgaagatgatggtccaatcacagtggcagatgcctggagagccctcaagaatcccagcattggggaaagcagcattgaaggcctgactagtgtattgagcactagtggaagccctacagatggacttagtgttatgcaaggtccttacagcgaaacggccagctttgcagccctctcagggggcacgctgagtggcggcattctctccagtggcaagggaaaatatagcaggttagaagttcaagccgatgtccaaaaggaaattttccccaaagacacagccagtcttggtgcaattagtgacaacgcaagcactcgtgctatggccggttccataatcagttcctacaacccacaggacagagaatgcaacaatatggaaatccaagtggacatcgctacatgcggccg

SEQ ID NO: 381473 - DNA, 634 bp, Homo sapiens
  misc_feature (403)..(403): n is a, c, g, or t
  misc_feature (405)..(405): n is a, c, g, or t
tcaattaataaacagaaacaaagattctaggccaggcacagtggctcatgcctgtaatcccagcactttgggaggccaaggtgggcggatcacctgaagtcaggagtttgagaccagcctggtcaacacggtgaaaccccgtctctattaaaaatataaaaattagctgggcatggtgatgggcgcctgtaatcccagctactcgggaggctgaggcaggagaattgcttgaacctgggaagcagaggttgcagtgagccaagatcgtgccattgcactccagcctgggcaacagagcgagactccgtctcaaaaaaaataaagtagatgtttatgtccatgtgtttctttccacaggctttggatgaagagtatttaaagtagatgccaatttggaggcatngntcagagaaagatttcacctttgcagagaaggtgagtgtctgctctcctgtcttttttcacttgcacctcagaggtatgcagctgtgtttattgaactatgatgtgtcagtcccactagtcatagtgtatggtaatattctaccttgttttgcagatgagaacactgaggatagaagaatacgaagttcgtccttataatcacacagctagttactgagcgaggactagt

SEQ ID NO: 381474 - DNA, 347 bp, Homo sapiens
cagagtctggctctgttgcccagcctggtcttgaagtcctgggcttaagcaatcctcccgtctcagcctcccaaagtgctagaattacaggtgtgagctaccacacctggccaagactcagtaaattctatgtggaatgcatgaatggaaatacctaaaggaggcaaagctactactgctccctccccgctagtctaataattgagggagagaacagatgaaaatcaggtatgtcatgtctgaaaggttgccaacccagtattaaagaagttacaactcagtgtttagactctggggattctacactaaatcttacctaatctcagtgtcttaacgtggtgggatca

SEQ ID NO: 381475 - DNA, 2491 bp, Homo sapiens
aaaaaaaaaaaaaaaaaaaaaaaaaagagtaagcggagcgccgagcccagctgatgcaacctggctggactcgcgtgacagttcccggcacgcggcggcgacggtgacccaggaaggggctctggtgccgggctgagcgggggaagcaggggtagcggagccatgggggacgctcccagccctgaagagaaactgcaccttatcacccggaacctgcaggaggttctgggggaagagaagctgaaggagatactgaaggagcgggaacttaaaatttactggggaacggcaaccacgggcaaaccacatgtggcttactttgtgcccatgtcaaagattgcagacttcttaaaggcagggtgtgaggtaacaattctgtttgcggacctccacgcatacctggataacatgaaagccccatgggaacttctagaactccgagtcagttactatgagaatgtgatcaaagcaatgctggagagcattggtgtgcccttggagaagctcaagttcatcaaaggcactgattaccagctcagcaaagagtacacactagatgtgtacagactctcctccgtggtcacacagcacgattccaagaaggctggagctgaggtggtaaagcaggtggagcaccctttgctgagtggcctcttataccccggactgcaggctttggatgaagagtatttaaaagtagatgcccaatttggaggcattgatcagagaaagattttcacctttgcagagaagtacctccctgcacttggctattcaaaacgggtccatctgatgaatcctatggttccaggattaacaggcagcaaaatgagctcttcagaagaggagtccaagattgatctccttgatcggaaggaggatgtgaagaaaaaactgaagaaggccttctgtgagccaggaaatgtggagaacaatggggttctgtccttcatcaagcatgtcctttttccccttaagtccgagtttgtgatcctacgagatgagaaatggggtggaaacaaaacctacacagcttacgtggacctggaaaaggactttgctgctgaggttgtacatcctggagacctgaagaattctgttgaagtcgcactgaacaagttgctggatccaatccgggaaaagtttaatacccctgccctgaaaaaactggccagcgctgcctacccagatccctcaaagcagaagccaatggccaaaggccctgccaagaattcagaaccagaggaggtcatcccatcccggctggatatccgtgtggggaaaatcatcactgtggagaagcacccagatgcagacagcctgtatgtagagaagattgacgtgggggaagctgaaccacggactgtggtgagcggcctggtacagttcgtgcccaaggaggaactgcaggacaggctggtagtggtgctgtgcaacctgaaaccccagaagatgagaggagtcgagtcccaaggcatgcttctgtgtgcttctatagaagggataaaccgccaggttgaacctctggaccctccggcaggctctgctcctggtgagcacgtgtttgtgaagggctatgaaaagggccaaccagatgaggagctcaagcccaagaagaaagtcttcgagaagttgcaggctgacttcaaaatttctgaggagtgcatcgcacagtggaagcaaaccaacttcatgaccaagctgggctccatttcctgtaaatcgctgaaaggggggaacattagctagccagcccagcatcttccccccttcttccaccactgagtcatctgctgtctcttcagtctgctccatccatcacccatttacccatctctcaggacacggaagcagcgggtttggactctttattcggtgcagaactcggcaaggggcagcttaccctccccagaacccaggatcatcctgtctggctgcagtgagagaccaacccctaacaagggctgggccacagcagggagtccagccctaccttcttcccttggcagctggagaaatctggtttcaatataactcatttaaaaatttatgccacagtccttataattggaaaaatactggtgcccaggttttcttggagttatccaagcagctgcgcccctagctgggatctggtacctggactaggctaattacagcttctccccaacaggaaactgtgggatttgaaaaggaaagggaagggaaaacagagaacctagtggtctaccaagtggttggcaactttcccaatgtctgcttactctgaggcttggcactgggggccagggcctgccccagggctcctggaatttcccttgatccagctaggctgggacactccctaaatcagctgcgtgttgttagcatcaggcagaatgaatggcagagagtgattctgtcttcatagagggtggggtacttctccataaggcatctcagtcaaatccccatcactgtcataaattcaaataaaatgtctgaacaaggg

SEQ ID NO: 381476 - DNA, 3500 bp, Homo sapiens
gctcctcactttttccggccgctgccggaggggtccaggccgagtaagcggagcgccgagcccagctgatgcaacctggctggactcgcgtgacagttcccggcacgcggcggcgacggtgacccaggaaggggctctggtgccgggctgagcgggggaagcaggggtagcggagccatgggggacgctcccagccctgaagagaaactgcaccttatcacccggaacctgcaggaggttctgggggaagagaagctgaaggagatactgaaggagcgggaacttaaaatttactggggaacggcaaccacgggcaaaccacatgtggcttactttgtgcccatgtcaaagattgcagacttcttaaaggcagggtgtgaggtaacaattctgtttgcggacctccacgcatacctggataacatgaaagccccatgggaacttctagaactccgagtcagttactatgagaatgtgatcaaagcaatgctggagagcattggtgtgcccttggagaagctcaagttcatcaaaggcactgattaccagctcagcaaagagtacacactagatgtgtacagactctcctccgtggtcacacagcacgattccaagaaggctggagctgaggtggtaaagcaggtggagcaccctttgctgagtggcctcttataccccggactgcaggctttggatgaagagtatttaaaagtagatgcccaatttggaggcattgatcagagaaagattttcacctttgcagagaagtacctccctgcacttggctattcaaaacgggtccatctgatgaatcctatggttccaggattaacaggcagcaaaatgagctcttcagaagaggagtccaagattgatctccttgatcggaaggaggatgtgaagaaaaaactgaagaaggccttctgtgagccaggaaatgtggagaacaatggggttctgtccttcatcaagcatgtcctttttccccttaagtccgagtttgtgatcctacgagatgagaaatggggtggaaacaaaacctacacagcttacgtggacctggaaaaggactttgctgctgaggttgtacatcctggagacctgaagaattctgttgaagtcgcactgaacaagttgctggatccaatccgggaaaagtttaatacccctgccctgaaaaaactggccagcgctgcctacccagatccctcaaagcagaagccaatggccaaaggccctgccaagaattcagaaccagaggaggtcatcccatcccggctggatatccgtgtggggaaaatcatcactgtggagaagcacccagatgcagacagcctgtatgtagagaagattgacgtgggggaagctgaaccacggactgtggtgagcggcctggtacagttcgtgcccaaggaggaactgcaggacaggctggtagtggtgctgtgcaacctgaaaccccagaagatgagaggagtcgagtcccaaggcatgcttctgtgtgcttctatagaagggataaaccgccaggttgaacctctggaccctccggcaggctctgctcctggtgagcacgtgtttgtgaagggctatgaaaagggccaaccagatgaggagctcaagcccaagaagaaagtcttcgagaagttgcaggctgacttcaaaatttctgaggagtgcatcgcacagtggaagcaaaccaacttcatgaccaagctgggctccatttcctgtaaatcgctgaaaggggggaacattagctagccagcccagcatcttccccccttcttccaccactgagtcatctgctgtctcttcagtctgctccatccatcacccatttacccatctctcaggacacggaagcagcgggtttggactctttattcggtgcagaactcggcaaggggcagcttaccctccccagaacccaggatcatcctgtctggctgcagtgagagaccaacccctaacaagggctgggccacagcagggagtccagccctaccttcttcccttggcagctggagaaatctggtttcaatataactcatttaaaaatttatgccacagtccttataattggaaaaatactggtgcccaggttttcttggagttatccaagcagctgcgcccctagctgggatctggtacctggactaggctaattacagcttctccccaacaggaaactgtgggatttgaaaaggaaagggaagggaaaacagagaacctagtggtctaccaagtggttggcaactttcccaatgtctgcttactctgaggcttggcactgggggccagggcctgccccagggctcctggaatttcccttgatccagctaggctgggacactccctaaatcagctgcgtgttgttagcatcaggcagaatgaatggcagagagtgattctgtcttcatagagggtggggtacttctccataaggcatctcagtcaaatccccatcactgtcataaattcaaataaaatgtctgaacaagggtgtctggatgtgagctggaccatctcaggagagaacacaagtgtgaggcagctgctggcccctcacctagtctggggttcctttaccctgtaatggggggtggggggtagaagatggacaagacaccttaacagtccctttggcagtactaggcagaagaggcccatacttgggtccaatgtgtgcagcaggcaaaacattttcccttctaaatgtgggcccagaccactgccctgtcccccccacattaagaagcagtagccacagccaagtttcaatcatttaattaacatctttaaatgaaacacagttttcttcatgtgtctcactcaggcttcagggcagagggaatggatttttagacatatcaaagactcaaaaatttaaagaaatatatatatgtatatatatacttctaacattttatggaaattaaaaatcagaggcttttggtctctccatttactctaggtcaagctcatttaccccagaggacaaagaagggctgcctcttctagaccctcccttctcctttgtcctctgtcccacccagcagggaaacaagctcagaagatcctaacaggatagagttccagtaatgttggaggagggagagggaaagagaagtcaggttctctcccacctccagccattcccaggttgctgccagggcctggtttcatgcagctttgacccagtcctggatcctagggggtggggtagatcaggagctctgagcagaacagtgctcactgattatcctctttccccaactcagtgggcaggtgcagcgtacacccagcagcactctccactgcccacaggcaagggaagaatattgattgattagctacaaggagaagacagtagtgactagtggaaaacaccctggagagggccagaggaacctggctctcaccacatcccctctgttcccagccttggtgagggggcggggaggtcatgtcaacctctctccttggtggtgaagcta

SEQ ID NO: 381477 - DNA, 3286 bp, Homo sapiens
gctcctcactttttccggccgctgccggaggggtccaggccgagtaagcggagcgccgagcccagctgatgcaacctggctggactcgcgtgacagttcccggcacgcggcggcgacggtgacccaggaaggggctctggtgccgggctgagcgggggaagcaggggtagcggagccatgggggacgctcccagccctgaagagaaactgcaccttatcacccggaacctgcaggaggttctgggggaagagaagctgaaggagatactgaaggagcgggaacttaaaatttactggggaacggcaaccacgggcaaaccacatgtggcttactttgtgcccatgtcaaagattgcagacttcttaaaggcagggtgtgaggtaacaattctgtttgcggacctccacgcatacctggataacatgaaagccccatgggaacttctagaactccgagtcagttactatgagaatgtgatcaaagcaatgctggagagcattggtgtgcccttggagaagctcaagttcatcaaaggcactgattaccagctcagcaaagagtacacactagatgtgtacagactctcctccgtggtcacacagcacgattccaagaaggctggagctgaggtggtaaagcaggtggagcaccctttgctgagtggcctcttataccccggactgcaggctttggatgaagagtatttaaaagtagatgcccaatttggaggcattgatcagagaaagattttcacctttgcagagaagtacctccctgcacttggctattcaaaacgggtccatctgatgaatcctatggttccaggattaacaggcagcaaaatgagctcttcagaagaggagtccaagattgatctccttgatcggaaggaggatgtgaagaaaaaactgaagaaggccttctgtgagccaggaaatgtggagaacaatggggttctgtccttcatcaagcatgtcctttttccccttaagtccgagtttgtgatcctacgagatgagaaatggggtggaaacaaaacctacacagcttacgtggacctggaaaaggactttgctgctgaggttgtacatcctggagacctgaagaattctgttgaagtcgcactgaacaagttgctggatccaatccgggaaaagtttaatacccctgccctgaaaaaactggccagcgctgcctacccagatccctcaaagcagaagccaatggccaaaggccctgccaagaattcagaaccagaggaggtcatcccatcccggctggatatccgtgtggggaaaatcatcactgtggagaagcacccagatgcagacagcctgtatgtagagaagattgacgtgggggaagctgaaccacggactgtggtgagcggcctggtacagttcgtgcccaaggaggaactgcaggacaggctggtagtggtgctgtgcaacctgaaaccccagaagatgagaggagtcgagtcccaaggcatgcttctgtgtgcttctatagaagggataaaccgccaggttgaacctctggaccctccggcaggctctgctcctggtgagcacgtgtttgtgaagggctatgaaaagggccaaccagatgaggagctcaagcccaagaagaaagtcttcgagaagttgcaggctgacttcaaaatttctgaggagtgcatcgcacagtggaagcaaaccaacttcatgaccaagctgggctccatttcctgtaaatcgctgaaaggggggaacattagctagccagcccagcatcttccccccttcttccaccactgagtcatctgctgtctcttcagtctgctccatccatcacccatttacccatctctcaggacacggaagcagcgggtttggactctttattcggtgcagaactcggcaaggggcagcttaccctccccagaacccaggatcatcctgtctggctgcagtgagagaccaacccctaacaagggctgggccacagcagggagtccagccctaccttcttcccttggcagctggagaaatctggtttcaatataactcatttaaaaatttatgccacagtccttataattggaaaaatactggtgcccaggttttcttggagttatccaagcagctaggctgggacactccctaaatcagctgcgtgttgttagcatcaggcagaatgaatggcagagagtgattctgtcttcatagagggtggggtacttctccataaggcatctcagtcaaatccccatcactgtcataaattcaaataaaatgtctgaacaagggtgtctggatgtgagctggaccatctcaggagagaacacaagtgtgaggcagctgctggcccctcacctagtctggggttcctttaccctgtaatggggggtggggggtagaagatggacaagacaccttaacagtccctttggcagtactaggcagaagaggcccatacttgggtccaatgtgtgcagcaggcaaaacattttcccttctaaatgtgggcccagaccactgccctgtcccccccacattaagaagcagtagccacagccaagtttcaatcatttaattaacatctttaaatgaaacacagttttcttcatgtgtctcactcaggcttcagggcagagggaatggatttttagacatatcaaagactcaaaaatttaaagaaatatatatatgtatatatatacttctaacattttatggaaattaaaaatcagaggcttttggtctctccatttactctaggtcaagctcatttaccccagaggacaaagaagggctgcctcttctagaccctcccttctcctttgtcctctgtcccacccagcagggaaacaagctcagaagatcctaacaggatagagttccagtaatgttggaggagggagagggaaagagaagtcaggttctctcccacctccagccattcccaggttgctgccagggcctggtttcatgcagctttgacccagtcctggatcctagggggtggggtagatcaggagctctgagcagaacagtgctcactgattatcctctttccccaactcagtgggcaggtgcagcgtacacccagcagcactctccactgcccacaggcaagggaagaatattgattgattagctacaaggagaagacagtagtgactagtggaaaacaccctggagagggccagaggaacctggctctcaccacatcccctctgttcccagccttggtgagggggcggggaggtcatgtcaacctctctccttggtggtgaagcta

SEQ ID NO: 381478 - DNA, 2484 bp, Homo sapiens
gctcctcactttttccggccgctgccggaggggtccaggccgagtaagcggagcgccgagcccagctgatgcaacctggctggactcgcgtgacagttcccggcacgcggcggcgacggtgacccaggaaggggctctggtgccgggctgagcgggggaagcaggggtagcggagccatgggggacgctcccagccctgaagagaaactgcaccttatcacccggaacctgcaggaggttctgggggaagagaagctgaaggagatactgaaggagcgggaacttaaaatttactggggaacggcaaccacgggcaaaccacatgtggcttactttgtgcccatgtcaaagattgcagacttcttaaaggcagggtgtgaggtaacaattctgtttgcggacctccacgcatacctggataacatgaaagccccatgggaacttctagaactccgagtcagttactatgagaatgtgatcaaagcaatgctggagagcattggtgtgcccttggagaagctcaagttcatcaaaggcactgattaccagctcagcaaagagtacacactagatgtgtacagactctcctccgtggtcacacagcacgattccaagaaggctggagctgaggtggtaaagcaggtggagcaccctttgctgagtggcctcttataccccggactgcaggctttggatgaagagtatttaaaagtagatgcccaatttggaggcattgatcagagaaagattttcacctttgcagagaagtacctccctgcacttggctattcaaaacgggtccatctgatgaatcctatggttccaggattaacaggcagcaaaatgagctcttcagaagaggagtccaagattgatctccttgatcggaaggaggatgtgaagaaaaaactgaagaaggccttctgtgagccaggaaatgtggagaacaatggggttctgtccttcatcaagcatgtcctttttccccttaagtccgagtttgtgatcctacgagatgagaaatggggtggaaacaaaacctacacagcttacgtggacctggaaaaggactttgctgctgaggttgtacatcctggagacctgaagaattctgttgaagtcgcactgaacaagttgctggatccaatccgggaaaagtttaatacccctgccctgaaaaaactggccagcgctgcctacccagatccctcaaagcagaagccaatggccaaaggccctgccaagaattcagaaccagaggaggtcatcccatcccggctggatatccgtgtggggaaaatcatcactgtggagaagcacccagatgcagacagcctgtatgtagagaagattgacgtgggggaagctgaaccacggactgtggtgagcggcctggtacagttcgtgcccaaggaggaactgcaggacaggctggtagtggtgctgtgcaacctgaaaccccagaagatgagaggagtcgagtcccaagagaagggataaaccgccaggttgaacctctggaccctccggcaggctctgctcctggtgagcacgtgtttgtgaagggctatgaaaagggccaaccagatgaggagctcaagcccaagaagaaagtcttcgagaagttgcaggctgacttcaaaatttctgaggagtgcatcgcacagtggaagcaaaccaacttcatgaccaagctgggctccatttcctgtaaatcgctgaaaggggggaacattagctagccagcccagcatcttccccccttcttccaccactgagtcatctgctgtctcttcagtctgctccatccatcacccatttacccatctctcaggacacggaagcagcgggtttggactctttattcggtgcagaactcggcaaggggcagcttaccctccccagaacccaggatcatcctgtctggctgcagtgagagaccaacccctaacaagggctgggccacagcagggagtccagccctaccttcttcccttggcagctggagaaatctggtttcaatataactcatttaaaaatttatgccacagtccttataattggaaaaatactggtgcccaggttttcttggagttatccaagcagctgcgcccctagctgggatctggtacctggactaggctaattacagcttctccccaacaggaaactgtgggatttgaaaaggaaagggaagggaaaacagagaacctagtggtctaccaagtggttggcaactttcccaatgtctgcttactctgaggcttggcactgggggccagggcctgccccagggctcctggaatttcccttgatccagctaggctgggacactccctaaatcagctgcgtgttgttagcatcaggcagaatgaatggcagagagtgattctgtcttcatagagggtggggtacttctccataaggcatctcagtcaaatccccatcactgtcataaattcaaataaaatgtctgaacaaggg

SEQ ID NO: 381479 - DNA, 2430 bp, Homo sapiens
gctcctcactttttccggccgctgccggaggggtccaggccgagtaagcggagcgccgagcccagctgatgcaacctggctggactcgcgtgacagttcccggcacgcggcggcgacggtgacccaggaaggggctctggtgccgggctgagcgggggaagcaggggtagcggagccatgggggacgctcccagccctgaagagaaactgcaccttatcacccggaacctgcaggaggttctgggggaagagaagctgaaggagatactgaaggagcgggaacttaaaatttactggggaacggcaaccacgggcaaaccacatgtggcttactttgtgcccatgtcaaagattgcagacttcttaaaggcagggtgtgaggtaacaattctgtttgcggacctccacgcatacctggataacatgaaagccccatgggaacttctagaactccgagtcagttactatgagaatgtgatcaaagcaatgctggagagcattggtgtgcccttggagaagctcaagttcatcaaaggcactgattaccagctcagcaaagagtacacactagatgtgtacagactctcctccgtggtcacacagcacgattccaagaaggctggagctgaggtggtaaagcaggtggagcaccctttgctgagtggcctcttataccccggactgcaggctttggatgaagagtatttaaaagtagatgcccaatttggaggcattgatcagagaaagattttcacctttgcagagaagtacctccctgcacttggctattcaaaacgggtccatctgatgaatcctatggttccaggattaacaggcagcaaaatgagctcttcagaagaggagtccaagattgatctccttgatcggaaggaggatgtgaagaaaaaactgaagaaggccttctgtgagccaggaaatgtggagaacaatggggttctgtccttcatcaagcatgtcctttttccccttaagtccgagtttgtgatcctacgagatgagaaatggggtggaaacaaaacctacacagcttacgtggacctggaaaaggactttgctgctgaggttgtacatcctggagacctgaagaattctgttgaagtcgcactgaacaagttgctggatccaatccgggaaaagtttaatacccctgccctgaaaaaactggccagcgctgcctacccagatccctcaaagcagaagccaatggccaaaggccctgccaagaattcagaaccagaggaggtcatcccatcccggctggatatccgtgtggggaaaatcatcactgtggagaagcacccagatgcagacagcctgtatgtagagaagattgacgtgggggaagctgaaccacggactgtggtgagcggcctggtacagttcgtgcccaaggaggaactgcaggacaggctggtagtggtgctgtgcaacctgaaaccccagaagatgagaggagtcgagtcccaaggcatgcttctgtgtgcttctatagaagggataaaccgccaggttgaacctctggaccctccggcaggctctgctcctggtgagcacgtgtttgtgaagggctatgaaaagggccaaccagatgaggagctcaagcccaagaagaaagtcttcgagaagttgcaggctgacttcaaaatttctgaggagtgcatcgcacagtggaagcaaaccaacttcatgaccaagctgggctccatttcctgtaaatcgctgaaaggggggaacattagctagccagcccagcatcttccccccttcttccaccactgagtcatctgctgtctcttcagaactcggcaaggggcagcttaccctccccagaacccaggatcatcctgtctggctgcagtgagagaccaacccctaacaagggctgggccacagcagggagtccagccctaccttcttcccttggcagctggagaaatctggtttcaatataactcatttaaaaatttatgccacagtccttataattggaaaaatactggtgcccaggttttcttggagttatccaagcagctgcgcccctagctgggatctggtacctggactaggctaattacagcttctccccaacaggaaactgtgggatttgaaaaggaaagggaagggaaaacagagaacctagtggtctaccaagtggttggcaactttcccaatgtctgcttactctgaggcttggcactgggggccagggcctgccccagggctcctggaatttcccttgatccagctaggctgggacactccctaaatcagctgcgtgttgttagcatcaggcagaatgaatggcagagagtgattctgtcttcatagagggtggggtacttctccataaggcatctcagtcaaatccccatcactgtcataaattcaaataaaatgtctgaacaaggg

SEQ ID NO: 381480 - DNA, 1969 bp, Homo sapiens
gctcctcactttttccggccgctgccggaggggtccaggccgagtaagcggagcgccgagcccagctgatgcaacctggctggactcgcgtgacagttcccggcacgcggcggcgacggtgacccaggaaggggctctggtgccgggctgagcgggggaagcaggggtagcggagccatgggggacgctcccagccctgaagagaaactgcaccttatcacccggaacctgcaggaggttctgggggaagagaagctgaaggagatactgaaggagcgggaacttaaaatttactggggaacggcaaccacgggcaaaccacatgtggcttactttgtgcccatgtcaaagattgcagacttcttaaaggcagggtgtgaggtaacaattctgtttgcggacctccacgcatacctggataacatgaaagccccatgggaacttctagaactccgagtcagttactatgagaatgtgatcaaagcaatgctggagagcattggtgtgcccttggagaagctcaagttcatcaaaggcactgattaccagctcagcaaagagtacacactagatgtgtacagactctcctccgtggtcacacagcacgattccaagaaggctggagctgaggtggtaaagcaggtggagcaccctttgctgagtggcctcttataccccggactgcaggctttggatgaagagtatttaaaagtagatgcccaatttggaggcattgatcagagaaagattttcacctttgcagagaagtacctccctgcacttggctattcaaaacgggtccatctgatgaatcctatggttccaggattaacaggcagcaaaatgagctcttcagaagaggagtccaagattgatctccttgatcggaaggaggatgtgaagaaaaaactgaagaaggccttctgtgagccaggaaatgtggagaacaatggggttctgtccttcatcaagcatgtcctttttccccttaagtccgagtttgtgatcctacgagatgagaaatggggtggaaacaaaacctacacagcttacgtggacctggaaaaggactttgctgctgaggttgtacatcctggagacctgaagaattctgttgaagtcgcactgaacaagttgctggatccaatccgggaaaagtttaatacccctgccctgaaaaaactggccagcgctgcctacccagatccctcaaagcagaagccaatggccaaaggccctgccaagaattcagaaccagaggaggtcatcccatcccggctggatatccgtgtggggaaaatcatcactgtggagaagcacccagatgcagacagcctgtatgtagagaagattgacgtgggggaagctgaaccacggactgtggtgagcggcctggtacagttcgtgcccaaggaggaactgcaggacaggctggtagtggtgctgtgcaacctgaaaccccagaagatgagaggagtcgagtcccaaggcatgcttctgtgtgcttctatagaagggataaaccgccaggttgaacctctggaccctccggcaggctctgctcctggtgagcacgtgtttgtgaagggctatgaaaagggccaaccagatgaggagctcaagcccaagaagaaagtcttcgagaagttgcaggctgacttcaaaatttctgaggagtgcatcgcacagtggaagcaaaccaacttcatgaccaagctgggctccatttcctgtaaatcgctgaaaggggggaacattagctagccagcccagcatcttccccccttcttccaccactgagtcatctgctgtctcttcagtctgctccatccatcacccatttacccatctctcaggacacggaagcagcgggtttggactctttattcggtgcagaactcggcaaggggcagcttaccctcgcagaataacatcagcgctgtctgagtcagaatataacggggcgagc

SEQ ID NO: 381481 - DNA, 2043 bp, Homo sapiens
gctcctcactttttccggccgctgccggaggggtccaggccgagtaagcggagcgccgagcccagctgatgcaacctggctggactcgcgtgacagttcccggcacgcggcggcgacggtgacccaggaaggggctctggtgccgggctgagcgggggaagcaggggtagcggagccatgggggacgctcccagccctgaagagaaactgcaccttatcacccggaacctgcaggaggttctgggggaagagaagctgaaggagatactgaaggagcgggaacttaaaatttactggggaacggcaaccacgggcaaaccacatgtggcttactttgtgcccatgtcaaagattgcagacttcttaaaggcagggtgtgaggtaacaattctgtttgcggacctccacgcatacctggataacatgaaagccccatgggaacttctagaactccgagtcagttactatgagaatgtgatcaaagcaatgctggagagcattggtgtgcccttggagaagctcaagttcatcaaaggcactgattaccagctcagcaaagagtacacactagatgtgtacagactctcctccgtggtcacacagcacgattccaagaaggctggagctgaggtggtaaagcaggtggagcaccctttgctgagtggcctcttataccccggactgcaggctttggatgaagagtatttaaaagtagatgcccaatttggaggcattgatcagagaaagattttcacctttgcagagaagtacctccctgcacttggctattcaaaacgggtccatctgatgaatcctatggttccaggattaacaggcagcaaaatgagctcttcagaagaggagtccaagattgatctccttgatcggaaggaggatgtgaagaaaaaactgaagaaggccttctgtgagccaggaaatgtggagaacaatggggttctgtccttcatcaagcatgtcctttttccccttaagtccgagtttgtgatcctacgagatgagaaatggggtggaaacaaaacctacacagcttacgtggacctggaaaaggactttgctgctgaggttgtacatcctggagacctgaagaattctgttgaagtcgcactgaacaagttgctggatccaatccgggaaaagtttaatacccctgccctgaaaaaactggccagcgctgcctacccagatccctcaaagcagaagccaatggccaaaggccctgccaagaattcagaaccagaggaggtcatcccatcccggctggatatccgtgtggggaaaatcatcactgtggagaagcacccagatgcagacagcctgtatgtagagaagattgacgtgggggaagctgaaccacggactgtggtgagcggcctggtacagttcgtgcccaaggaggaactgcaggacaggctggtagtggtgctgtgcaacctgaaaccccagaagatgagaggagtcgagtcccaagagaagggataaaccgccaggttgaacctctggaccctccggcaggctctgctcctggtgagcacgtgtttgtgaagggctatgaaaagggccaaccagatgaggagctcaagcccaagaagaaagtcttcgagaagttgcaggctgacttcaaaatttctgaggagtgcatcgcacagtggaagcaaaccaacttcatgaccaagctgggctccatttcctgtaaatcgctgaaaggggggaacattagctagccagcccagcatcttccccccttcttccaccactgagtcatctgctgtctcttcagtctgctccatccatcacccatttacccatctctcaggacacggaagcagcgggtttggactctttattcggtgcagaactcggcaaggggcagcttaccctccccagaacccaggatcatcctgtctggctgcagtgagagaccaacccctaacaagggctgggccacagcagggagtccagccctaccttcttcccttggcagctggagaaatctggtttcaatataactcatttaaaaattta

SEQ ID NO: 381482 - DNA, 1559 bp, Homo sapiens
gctcctcactttttccggccgctgccggaggggtccaggccgagtaagcggagcgccgagcccagctgatgcaacctggctggactcgcgtgacagttcccggcacgcggcggcgacggtgacccaggaaggggctctggtgccgggctgagcgggggaagcaggggtagcggagccatgggggacgctcccagccctgaagagaaactgcaccttatcacccggaacctgcaggaggttctgggggaagagaagctgaaggagatactgaaggagcgggaacttaaaatttactggggaacggcaaccacgggcaaaccacatgtggcttactttgtgcccatgtcaaagattgcagacttcttaaaggcagggtgtgaggtaacaattctgtttgcggacctccacgcatacctggataacatgaaagccccatgggaacttctagaactccgagtcagttactatgagaatgtgatcaaagcaatgctggagagcattggtgtgcccttggagaagctcaagttcatcaaaggcactgattaccagctcagcaaagagtacacactagatgtgtacagactctcctccgtggtcacacagcacgattccaagaaggctggagctgaggtggtaaagcaggtggagcaccctttgctgagtggcctcttataccccggactgcaggctttggatgaagagtatttaaaagtagatgcccaatttggaggcattgatcagagaaagattttcacctttgcagagaagtacctccctgcacttggctattcaaaacgggtccatctgatgaatcctatggttccaggattaacaggcagcaaaatgagctcttcagaagaggagtccaagattgatctccttgatcggaaggaggatgtgaagaaaaaactgaagaaggccttctgtgagccaggaaatgtggagaacaatggggttctgtccttcatcaagcatgtcctttttccccttaagtccgagtttgtgatcctacgagatgagaaatggggtggaaacaaaacctacacagcttacgtggacctggaaaaggactttgctgctgaggttgtacatcctggagacctgaagaattctgttgaagtcgcactgaacaagttgctggatccaatccgggaaaagtttaatacccctgccctgaaaaaactggccagcgctgcctacccagatccctcaaagcagaagccaatggccaaaggccctgccaagaattcagaaccagaggaggtcatcccatcccggctggatatccgtgtggggaaaatcatcactgtggagatcccaatgtctgcttactctgaggcttggcactgggggccagggcctgccccagggctcctggaatttcccttgatccagctaggctgggacactccctaaatcagctgcgtgttgttagcatcaggcagaatgaatggcagagagtgattctgtcttcatagagggtggggtacttctccataaggcatctcagtcaaatccccatcactgtcataaattcaaataaaatgtctgaacaaggg

SEQ ID NO: 381483 - DNA, 2388 bp, Homo sapiens
ggcgagaatgaagactattctcagcaatcagactgtcgacattccagaaaatgtcgacattactctgaagggacgcacagtaagagaaactgcaccttatcacccggaacctgcaggaggttctgggggaagagaagctgaaggagatactgaaggagcgggaacttaaaatttactggggaacggcaaccacgggcaaaccacatgtggcttactttgtgcccatgtcaaagattgcagacttcttaaaggcagggtgtgaggtaacaattctgtttgcggacctccacgcatacctggataacatgaaagccccatgggaacttctagaactccgagtcagttactatgagaatgtgatcaaagcaatgctggagagcattggtgtgcccttggagaagctcaagttcatcaaaggcactgattaccagctcagcaaagagtacacactagatgtgtacagactctcctccgtggtcacacagcacgattccaagaaggctggagctgaggtggtaaagcaggtggagcaccctttgctgagtggcctcttataccccggactgcaggctttggatgaagagtatttaaaagtagatgcccaatttggaggcattgatcagagaaagattttcacctttgcagagaagtacctccctgcacttggctattcaaaacgggtccatctgatgaatcctatggttccaggattaacaggcagcaaaatgagctcttcagaagaggagtccaagattgatctccttgatcggaaggaggatgtgaagaaaaaactgaagaaggccttctgtgagccaggaaatgtggagaacaatggggttctgtccttcatcaagcatgtcctttttccccttaagtccgagtttgtgatcctacgagatgagaaatggggtggaaacaaaacctacacagcttacgtggacctggaaaaggactttgctgctgaggttgtacatcctggagacctgaagaattctgttgaagtcgcactgaacaagttgctggatccaatccgggaaaagtttaatacccctgccctgaaaaaactggccagcgctgcctacccagatccctcaaagcagaagccaatggccaaaggccctgccaagaattcagaaccagaggaggtcatcccatcccggctggatatccgtgtggggaaaatcatcactgtggagaagcacccagatgcagacagcctgtatgtagagaagattgacgtgggggaagctgaaccacggactgtggtgagcggcctggtacagttcgtgcccaaggaggaactgcaggacaggctggtagtggtgctgtgcaacctgaaaccccagaagatgagaggagtcgagtcccaaggcatgcttctgtgtgcttctatagaagggataaaccgccaggttgaacctctggaccctccggcaggctctgctcctggtgagcacgtgtttgtgaagggctatgaaaagggccaaccagatgaggagctcaagcccaagaagaaagtcttcgagaagttgcaggctgacttcaaaatttctgaggagtgcatcgcacagtggaagcaaaccaacttcatgaccaagctgggctccatttcctgtaaatcgctgaaaggggggaacattagctagccagcccagcatcttccccccttcttccaccactgagtcatctgctgtctcttcagtctgctccatccatcacccatttacccatctctcaggacacggaagcagcgggtttggactctttattcggtgcagaactcggcaaggggcagcttaccctccccagaacccaggatcatcctgtctggctgcagtgagagaccaacccctaacaagggctgggccacagcagggagtccagccctaccttcttcccttggcagctggagaaatctggtttcaatataactcatttaaaaatttatgccacagtccttataattggaaaaatactggtgcccaggttttcttggagttatccaagcagctgcgcccctagctgggatctggtacctggactaggctaattacagcttctccccaacaggaaactgtgggatttgaaaaggaaagggaagggaaaacagagaacctagtggtctaccaagtggttggcaactttcccaatgtctgcttactctgaggcttggcactgggggccagggcctgccccagggctcctggaatttcccttgatccagctaggctgggacactccctaaatcagctgcgtgttgttagcatcaggcagaatgaatggcagagagtgattctgtcttcatagagggtggggtacttctccataaggcatctcagtcaaatccccatcactgtcataaattcaaataaaatgtctgaacaaggg

SEQ ID NO: 381484 - DNA, 2341 bp, Homo sapiens
gtggcttagctgttattaactgtgccctggccttaagagaaactgcaccttatcacccggaacctgcaggaggttctgggggaagagaagctgaaggagatactgaaggagcgggaacttaaaatttactggggaacggcaaccacgggcaaaccacatgtggcttactttgtgcccatgtcaaagattgcagacttcttaaaggcagggtgtgaggtaacaattctgtttgcggacctccacgcatacctggataacatgaaagccccatgggaacttctagaactccgagtcagttactatgagaatgtgatcaaagcaatgctggagagcattggtgtgcccttggagaagctcaagttcatcaaaggcactgattaccagctcagcaaagagtacacactagatgtgtacagactctcctccgtggtcacacagcacgattccaagaaggctggagctgaggtggtaaagcaggtggagcaccctttgctgagtggcctcttataccccggactgcaggctttggatgaagagtatttaaaagtagatgcccaatttggaggcattgatcagagaaagattttcacctttgcagagaagtacctccctgcacttggctattcaaaacgggtccatctgatgaatcctatggttccaggattaacaggcagcaaaatgagctcttcagaagaggagtccaagattgatctccttgatcggaaggaggatgtgaagaaaaaactgaagaaggccttctgtgagccaggaaatgtggagaacaatggggttctgtccttcatcaagcatgtcctttttccccttaagtccgagtttgtgatcctacgagatgagaaatggggtggaaacaaaacctacacagcttacgtggacctggaaaaggactttgctgctgaggttgtacatcctggagacctgaagaattctgttgaagtcgcactgaacaagttgctggatccaatccgggaaaagtttaatacccctgccctgaaaaaactggccagcgctgcctacccagatccctcaaagcagaagccaatggccaaaggccctgccaagaattcagaaccagaggaggtcatcccatcccggctggatatccgtgtggggaaaatcatcactgtggagaagcacccagatgcagacagcctgtatgtagagaagattgacgtgggggaagctgaaccacggactgtggtgagcggcctggtacagttcgtgcccaaggaggaactgcaggacaggctggtagtggtgctgtgcaacctgaaaccccagaagatgagaggagtcgagtcccaaggcatgcttctgtgtgcttctatagaagggataaaccgccaggttgaacctctggaccctccggcaggctctgctcctggtgagcacgtgtttgtgaagggctatgaaaagggccaaccagatgaggagctcaagcccaagaagaaagtcttcgagaagttgcaggctgacttcaaaatttctgaggagtgcatcgcacagtggaagcaaaccaacttcatgaccaagctgggctccatttcctgtaaatcgctgaaaggggggaacattagctagccagcccagcatcttccccccttcttccaccactgagtcatctgctgtctcttcagtctgctccatccatcacccatttacccatctctcaggacacggaagcagcgggtttggactctttattcggtgcagaactcggcaaggggcagcttaccctccccagaacccaggatcatcctgtctggctgcagtgagagaccaacccctaacaagggctgggccacagcagggagtccagccctaccttcttcccttggcagctggagaaatctggtttcaatataactcatttaaaaatttatgccacagtccttataattggaaaaatactggtgcccaggttttcttggagttatccaagcagctgcgcccctagctgggatctggtacctggactaggctaattacagcttctccccaacaggaaactgtgggatttgaaaaggaaagggaagggaaaacagagaacctagtggtctaccaagtggttggcaactttcccaatgtctgcttactctgaggcttggcactgggggccagggcctgccccagggctcctggaatttcccttgatccagctaggctgggacactccctaaatcagctgcgtgttgttagcatcaggcagaatgaatggcagagagtgattctgtcttcatagagggtggggtacttctccataaggcatctcagtcaaatccccatcactgtcataaattcaaataaaatgtctgaacaaggg

SEQ ID NO: 381485 - DNA, 1623 bp, Homo sapiens
gctcctcactttttccggccgctgccggaggggtccaggccgagtaagcggagcgccgagcccagctgatgcaacctggctggactcgcgtgacagttcccggcacgcggcggcgacggtgacccaggaaggggctctggtgccgggctgagcgggggaagcaggggtagcggagccatgggggacgctcccagccctgaagagaaactgcaccttatcacccggaacctgcaggaggttctgggggaagagaagctgaaggagatactgaaggagcgggaacttaaaatttactggggaacggcaaccacgggcaaaccacatgtggcttactttgtgcccatgtcaaagattgcagacttcttaaaggcagggtgtgaggtaacaattctgtttgcggacctccacgcatacctggataacatgaaagccccatgggaacttctagaactccgagtcagttactatgagaatgtgatcaaagcaatgctggagagcattggtgtgcccttggagaagctcaagttcatcaaaggcactgattaccagctcagcaaagagtacacactagatgtgtacagactctcctccgtggtcacacagcacgattccaagaaggctggagctgaggtggtaaagcaggtggagcaccctttgctgagtggcctcttataccccggactgcaggctttggatgaagagtatttaaaagtagatgcccaatttggaggcattgatcagagaaagattttcacctttgcagagaagtacctccctgcacttggctattcaaaacgggtccatctgatgaatcctatggttccaggattaacaggcagcaaaatgagctcttcagaagaggagtccaagattgatctccttgatcggaaggaggatgtgaagaaaaaactgaagaaggccttctgtgagccaggaaatgtggagaacaatggggttctgtccttcatcaagcatgtcctttttccccttaagtccgagtttgtgatcctacgagatgagaaatggggtggaaacaaaacctacacagcttacgtggacctggaaaaggactttgctgctgaggttgtacatcctggagacctgaagaattctgttgaagtcgcactgaacaagttgctggatccaatccgggaaaagtttaatacccctgccctgaaaaaactggccagcgctgcctacccagatccctcaaagcagagtaaggccagctggagaggggccgacatcatcaggagagagagcttgtcaatgagccttggaaaaatgcctgtcttaaattgagggcacaacaacccagggggtctgaagtgcaggaatgtcatgtcctactggctcctagaatggaacttgagtcattttgatttgggtttggttaacatcaggaagtgatcacatccttttgtaccggcattgctgagagctgctggtgtaagatgtatactttggtccttctagtctgtttgttaaatctgcctcttcattaaagatagtgaccggggccagacacagtggctcacacctgtaatcttaacactttggaaggctgaggcaggcggatcacttgagcccaaaagttagagaccaaaacccagtctctaccca

SEQ ID NO: 381486 - DNA, 1418 bp, Homo sapiens
gctcctcactttttccggccgctgccggaggggtccaggccgagtaagcggagcgccgagcccagctgatgcaacctggctggactcgcgtgacagttcccggcacgcggcggcgacggtgacccaggaaggggctctggtgccgggctgagcgggggaagcaggggtagcggagccatgggggacgctcccagccctgaagagaaactgcaccttatcacccggaacctgcaggaggttctgggggaagagaagctgaaggagatactgaaggagcgggaacttaaaatttactggggaacggcaaccacgggcaaaccacatgtggcttactttgtgcccatgtcaaagattgcagacttcttaaaggcagggtgtgaggtaacaattctgtttgcggacctccacgcatacctggataacatgaaagccccatgggaacttctagaactccgagtcagttactatgagaatgtgatcaaagcaatgctggagagcattggtgtgcccttggagaagctcaagttcatcaaaggcactgattaccagctcagcaaagagtacacactagatgtgtacagactctcctccgtggtcacacagcacgattccaagaaggctggagctgaggtggtaaagcaggtggagcaccctttgctgagtggcctcttataccccggactgcaggctttggatgaagagtatttaaaagtagatgcccaatttggaggcattgatcagagaaagattttcacctttgcagagaagtacctccctgcacttggctattcaaaacgggtccatctgatgaatcctatggttccaggattaacaggcagcaaaatgagctcttcagaagaggagtccaagattgatctccttgatcggaaggaggatgtgaagaaaaaactgaagaaggccttctgtgagccaggaaatgtggagaacaatggggttctgtccttcatcaagcatgtcctttttccccttaagtccgagtttgtgatcctacgagatgagaaatggggtggaaacaaaacctacacagcttacgtggacctggaaaaggactttgctgctgaggttgtacatcctggagacctgaagaattctgttgaagtcgcactgaacaagttgctggatccaatccgggaaaagtttaatacccctgccctgaaaaaactggccagcgctgcctacccagatccctcaaagcagactgccccagggctcctggaatttcccttgatccagctaggctgggacactccctaaatcagctgcgtgttgttagcatcaggcagaatgaatggcagagagtgattctgtcttcatagagggtggggtacttctccataaggcatctcagtcaaatccccatcactgtcataaattcaaataaaatgtctgaacaaggg

SEQ ID NO: 381487 - DNA, 2862 bp, Homo sapiens
gctagattttcttttatactttggtttagaaaggggaggaggagcctagctgaagcaatcttacagaagtaaaacaggcaaaaaagttagaaagacaaatggttacgggaaaacaaacagttccgggcgcaggggctttaaatccatcacaaggtgatagacgcggaggctttgggtaccatcaaccagacacaaatgctggggcttagggtaatatcaactgggcaaattcctgggaactgcggctatagctttccacaatatcttatcagttatttgcgttctttgatgtgctgggagtcagcttgcacaagttaagtccttgaggaaggggggtgggtaagaggctgcaaggggctacaagtgaaggagccaaaatggagtttgtctggctctctcagctaagggagagtcaattcagattaaaacaaggtagggtatcacatctgcactgagaacatggctggacctccttgatggctctgagcctggatctccactgacacatgctgttgttttccttgtcacatggtaaaggatgagcaaggtgaggcactgacattaaactaactcttctgcttccacaataggaggttctgggggaagagaagctgaaggagatactgaaggagcgggaacttaaaatttactggggaacggcaaccacgggcaaaccacatgtggcttactttgtgcccatgtcaaagattgcagacttcttaaaggcagggtgtgaggtaacaattctgtttgcggacctccacgcatacctggataacatgaaagccccatgggaacttctagaactccgagtcagttactatgagaatgtgatcaaagcaatgctggagagcattggtgtgcccttggagaagctcaagttcatcaaaggcactgattaccagctcagcaaagagtacacactagatgtgtacagactctcctccgtggtcacacagcacgattccaagaaggctggagctgaggtggtaaagcaggtggagcaccctttgctgagtggcctcttataccccggactgcaggctttggatgaagagtatttaaaagtagatgcccaatttggaggcattgatcagagaaagattttcacctttgcagagaagtacctccctgcacttggctattcaaaacgggtccatctgatgaatcctatggttccaggattaacaggcagcaaaatgagctcttcagaagaggagtccaagattgatctccttgatcggaaggaggatgtgaagaaaaaactgaagaaggccttctgtgagccaggaaatgtggagaacaatggggttctgtccttcatcaagcatgtcctttttccccttaagtccgagtttgtgatcctacgagatgagaaatggggtggaaacaaaacctacacagcttacgtggacctggaaaaggactttgctgctgaggttgtacatcctggagacctgaagaattctgttgaagtcgcactgaacaagttgctggatccaatccgggaaaagtttaatacccctgccctgaaaaaactggccagcgctgcctacccagatccctcaaagcagaagccaatggccaaaggccctgccaagaattcagaaccagaggaggtcatcccatcccggctggatatccgtgtggggaaaatcatcactgtggagaagcacccagatgcagacagcctgtatgtagagaagattgacgtgggggaagctgaaccacggactgtggtgagcggcctggtacagttcgtgcccaaggaggaactgcaggacaggctggtagtggtgctgtgcaacctgaaaccccagaagatgagaggagtcgagtcccaaggcatgcttctgtgtgcttctatagaagggataaaccgccaggttgaacctctggaccctccggcaggctctgctcctggtgagcacgtgtttgtgaagggctatgaaaagggccaaccagatgaggagctcaagcccaagaagaaagtcttcgagaagttgcaggctgacttcaaaatttctgaggagtgcatcgcacagtggaagcaaaccaacttcatgaccaagctgggctccatttcctgtaaatcgctgaaaggggggaacattagctagccagcccagcatcttccccccttcttccaccactgagtcatctgctgtctcttcagtctgctccatccatcacccatttacccatctctcaggacacggaagcagcgggtttggactctttattcggtgcagaactcggcaaggggcagcttaccctccccagaacccaggatcatcctgtctggctgcagtgagagaccaacccctaacaagggctgggccacagcagggagtccagccctaccttcttcccttggcagctggagaaatctggtttcaatataactcatttaaaaatttatgccacagtccttataattggaaaaatactggtgcccaggttttcttggagttatccaagcagctgcgcccctagctgggatctggtacctggactaggctaattacagcttctccccaacaggaaactgtgggatttgaaaaggaaagggaagggaaaacagagaacctagtggtctaccaagtggttggcaactttcccaatgtctgcttactctgaggcttggcactgggggccagggcctgccccagggctcctggaatttcccttgatccagctaggctgggacactccctaaatcagctgcgtgttgttagcatcaggcagaatgaatggcagagagtgattctgtcttcatagagggtggggtacttctccataaggcatctcagtcaaatccccatcactgtcataaattcaaataaaatgtctgaacaaggg

SEQ ID NO: 381488 - DNA, 2300 bp, Homo sapiens
  misc_feature (11)..(11): n is a, c, g, or t
aaaaaaaaagnagggaaaagggaaaaagcgaaaacttaaggctaggtagcgaggcccgggtggttaaggaaggggctctggtgccgggctgagcgggggaagcaggggtagcggagccatgggggacgctcccagccctgaagagaaactgcaccttatcacccggaacctgcaggtaacaattctgtttgcggacctccacgcatacctggataacatgaaagccccatgggaacttctagaactccgagtcagttactatgagaatgtgatcaaagcaatgctggagagcattggtgtgcccttggagaagctcaagttcatcaaaggcactgattaccagctcagcaaagagtacacactagatgtgtacagactctcctccgtggtcacacagcacgattccaagaaggctggagctgaggtggtaaagcaggtggagcaccctttgctgagtggcctcttataccccggactgcaggctttggatgaagagtatttaaaagtagatgcccaatttggaggcattgatcagagaaagattttcacctttgcagagaagtacctccctgcacttggctattcaaaacgggtccatctgatgaatcctatggttccaggattaacaggcagcaaaatgagctcttcagaagaggagtccaagattgatctccttgatcggaaggaggatgtgaagaaaaaactgaagaaggccttctgtgagccaggaaatgtggagaacaatggggttctgtccttcatcaagcatgtcctttttccccttaagtccgagtttgtgatcctacgagatgagaaatggggtggaaacaaaacctacacagcttacgtggacctggaaaaggactttgctgctgaggttgtacatcctggagacctgaagaattctgttgaagtcgcactgaacaagttgctggatccaatccgggaaaagtttaatacccctgccctgaaaaaactggccagcgctgcctacccagatccctcaaagcagaagccaatggccaaaggccctgccaagaattcagaaccagaggaggtcatcccatcccggctggatatccgtgtggggaaaatcatcactgtggagaagcacccagatgcagacagcctgtatgtagagaagattgacgtgggggaagctgaaccacggactgtggtgagcggcctggtacagttcgtgcccaaggaggaactgcaggacaggctggtagtggtgctgtgcaacctgaaaccccagaagatgagaggagtcgagtcccaaggcatgcttctgtgtgcttctatagaagggataaaccgccaggttgaacctctggaccctccggcaggctctgctcctggtgagcacgtgtttgtgaagggctatgaaaagggccaaccagatgaggagctcaagcccaagaagaaagtcttcgagaagttgcaggctgacttcaaaatttctgaggagtgcatcgcacagtggaagcaaaccaacttcatgaccaagctgggctccatttcctgtaaatcgctgaaaggggggaacattagctagccagcccagcatcttccccccttcttccaccactgagtcatctgctgtctcttcagtctgctccatccatcacccatttacccatctctcaggacacggaagcagcgggtttggactctttattcggtgcagaactcggcaaggggcagcttaccctccccagaacccaggatcatcctgtctggctgcagtgagagaccaacccctaacaagggctgggccacagcagggagtccagccctaccttcttcccttggcagctggagaaatctggtttcaatataactcatttaaaaatttatgccacagtccttataattggaaaaatactggtgcccaggttttcttggagttatccaagcagctgcgcccctagctgggatctggtacctggactaggctaattacagcttctccccaacaggaaactgtgggatttgaaaaggaaagggaagggaaaacagagaacctagtggtctaccaagtggttggcaactttcccaatgtctgcttactctgaggcttggcactgggggccagggcctgccccagggctcctggaatttcccttgatccagctaggctgggacactccctaaatcagctgcgtgttgttagcatcaggcagaatgaatggcagagagtgattctgtcttcatagagggtggggtacttctccataaggcatctcagtcaaatccccatcactgtcataaattcaaataaaatgtctgaacaaggg

SEQ ID NO: 381489 - DNA, 2409 bp, Homo sapiens
aaaaaaaaaaaaaaaaaaaaaaaaaagagtaagcggagcgccgagcccagctgatgcaacctggctggactcgcgtgacagttcccggcacgcggcggcgacggtgacccaggaaggggctctggtgccgggctgagcgggggaagcaggggtagcggagccatgggggacgctcccagccctgaagagaaactgcaccttatcacccggaacctgcaggaggttctgggggaagagaagctgaaggagatactgaaggagcgggaacttaaaatttactggggaacggcaaccacgggcaaaccacatgtggcttactttgtgcccatgtcaaagattgcagacttcttaaaggcagggtgtgaggtaacaattctgtttgcggacctccacgcatacctggataacatgaaagccccatgggaacttctagaactccgagtcagttactatgagaatgtgatcaaagcaatgctggagagcattggtgtgcccttggagaagctcaagttcatcaaaggcactgattaccagctcagcaaagagtacacactagatgtgtacagactctcctccgtggtcacacagcacgattccaagaaggctggagctgaggtggtaaagcaggtggagcaccctttgctgagtggcctcttataccccggactgagtacctccctgcacttggctattcaaaacgggtccatctgatgaatcctatggttccaggattaacaggcagcaaaatgagctcttcagaagaggagtccaagattgatctccttgatcggaaggaggatgtgaagaaaaaactgaagaaggccttctgtgagccaggaaatgtggagaacaatggggttctgtccttcatcaagcatgtcctttttccccttaagtccgagtttgtgatcctacgagatgagaaatggggtggaaacaaaacctacacagcttacgtggacctggaaaaggactttgctgctgaggttgtacatcctggagacctgaagaattctgttgaagtcgcactgaacaagttgctggatccaatccgggaaaagtttaatacccctgccctgaaaaaactggccagcgctgcctacccagatccctcaaagcagaagccaatggccaaaggccctgccaagaattcagaaccagaggaggtcatcccatcccggctggatatccgtgtggggaaaatcatcactgtggagaagcacccagatgcagacagcctgtatgtagagaagattgacgtgggggaagctgaaccacggactgtggtgagcggcctggtacagttcgtgcccaaggaggaactgcaggacaggctggtagtggtgctgtgcaacctgaaaccccagaagatgagaggagtcgagtcccaaggcatgcttctgtgtgcttctatagaagggataaaccgccaggttgaacctctggaccctccggcaggctctgctcctggtgagcacgtgtttgtgaagggctatgaaaagggccaaccagatgaggagctcaagcccaagaagaaagtcttcgagaagttgcaggctgacttcaaaatttctgaggagtgcatcgcacagtggaagcaaaccaacttcatgaccaagctgggctccatttcctgtaaatcgctgaaaggggggaacattagctagccagcccagcatcttccccccttcttccaccactgagtcatctgctgtctcttcagtctgctccatccatcacccatttacccatctctcaggacacggaagcagcgggtttggactctttattcggtgcagaactcggcaaggggcagcttaccctccccagaacccaggatcatcctgtctggctgcagtgagagaccaacccctaacaagggctgggccacagcagggagtccagccctaccttcttcccttggcagctggagaaatctggtttcaatataactcatttaaaaatttatgccacagtccttataattggaaaaatactggtgcccaggttttcttggagttatccaagcagctgcgcccctagctgggatctggtacctggactaggctaattacagcttctccccaacaggaaactgtgggatttgaaaaggaaagggaagggaaaacagagaacctagtggtctaccaagtggttggcaactttcccaatgtctgcttactctgaggcttggcactgggggccagggcctgccccagggctcctggaatttcccttgatccagctaggctgggacactccctaaatcagctgcgtgttgttagcatcaggcagaatgaatggcagagagtgattctgtcttcatagagggtggggtacttctccataaggcatctcagtcaaatccccatcactgtcataaattcaaataaaatgtctgaacaaggg

SEQ ID NO: 381490 - DNA, 2238 bp, Homo sapiens
ctgatttctcagacccatatagaagaaataaagtagatgtttaggctgggcatggtggctctcgcctgtaatcccagcactttgggaggccaaggtgggtggccaaggtgagctcaggattttaaggccagcctgggcaacatggcaaaacgttgtctctactaaaaatacaaaaaattagccgggcgtggtggtgcatgtctgtaatcccaactactcgggaggctgaggcaggagactcacttgaacctgagaggcagaggtggcagtgagccgagatcacgccacagcactccagcctgggcgacagagcgagactctgtctcaaaaaaataaagtagatgtttatgttcatgtgtttctttccacaggctttggatgaagagtatttaaaagtagatgcccaatttggaggcattgatcagagaaagattttcacctttgcagagaagatgagaacactgaggatagaagataagaagtgtccaatatcacacaagtacctccctgcacttggctattcaaaacgggtccatctgatgaatcctatggttccaggattaacaggcagcaaaatgagctcttcagaagaggagtccaagattgatctccttgatcggaaggaggatgtgaagaaaaaactgaagaaggccttctgtgagccaggaaatgtggagaacaatggggttctgtccttcatcaagcatgtcctttttccccttaagtccgagtttgtgatcctacgagatgagaaatggggtggaaacaaaacctacacagcttacgtggacctggaaaaggactttgctgctgaggttgtacatcctggagacctgaagaattctgttgaagtcgcactgaacaagttgctggatccaatccgggaaaagtttaatacccctgccctgaaaaaactggccagcgctgcctacccagatccctcaaagcagaagccaatggccaaaggccctgccaagaattcagaaccagaggaggtcatcccatcccggctggatatccgtgtggggaaaatcatcactgtggagaagcacccagatgcagacagcctgtatgtagagaagattgacgtgggggaagctgaaccacggactgtggtgagcggcctggtacagttcgtgcccaaggaggaactgcaggacaggctggtagtggtgctgtgcaacctgaaaccccagaagatgagaggagtcgagtcccaaggcatgcttctgtgtgcttctatagaagggataaaccgccaggttgaacctctggaccctccggcaggctctgctcctggtgagcacgtgtttgtgaagggctatgaaaagggccaaccagatgaggagctcaagcccaagaagaaagtcttcgagaagttgcaggctgacttcaaaatttctgaggagtgcatcgcacagtggaagcaaaccaacttcatgaccaagctgggctccatttcctgtaaatcgctgaaaggggggaacattagctagccagcccagcatcttccccccttcttccaccactgagtcatctgctgtctcttcagtctgctccatccatcacccatttacccatctctcaggacacggaagcagcgggtttggactctttattcggtgcagaactcggcaaggggcagcttaccctccccagaacccaggatcatcctgtctggctgcagtgagagaccaacccctaacaagggctgggccacagcagggagtccagccctaccttcttcccttggcagctggagaaatctggtttcaatataactcatttaaaaatttatgccacagtccttataattggaaaaatactggtgcccaggttttcttggagttatccaagcagctgcgcccctagctgggatctggtacctggactaggctaattacagcttctccccaacaggaaactgtgggatttgaaaaggaaagggaagggaaaacagagaacctagtggtctaccaagtggttggcaactttcccaatgtctgcttactctgaggcttggcactgggggccagggcctgccccagggctcctggaatttcccttgatccagctaggctgggacactccctaaatcagctgcgtgttgttagcatcaggcagaatgaatggcagagagtgattctgtcttcatagagggtggggtacttctccataaggcatctcagtcaaatccccatcactgtcataaattcaaataaaatgtctgaacaaggg

SEQ ID NO: 381491 - DNA, 1357 bp, Homo sapiens
cagacgttaggctaggtacgaggccgggtgttaatcggccgaggctgctacccagatccctcaaagcagaagccaatggccaaaggccctgccaagaattcagaaccagaggaggtcatcccatcccggctggatatccgtgtggggaaaatcatcactgtggagaagcacccagatgcagacagcctgtatgtagagaagattgacgtgggggaagctgaaccacggactgtggtgagcggcctggtacagttcgtgcccaaggaggaactgcaggacaggctggtagtggtgctgtgcaacctgaaaccccagaagatgagaggagtcgagtcccaaggcatgcttctgtgtgcttctatagaagggataaaccgccaggttgaacctctggaccctccggcaggctctgctcctggtgagcacgtgtttgtgaagggctatgaaaagggccaaccagatgaggagctcaagcccaagaagaaagtcttcgagaagttgcaggctgacttcaaaatttctgaggagtgcatcgcacagtggaagcaaaccaacttcatgaccaagctgggctccatttcctgtaaatcgctgaaaggggggaacattagctagccagcccagcatcttccccccttcttccaccactgagtcatctgctgtctcttcagtctgctccatccatcacccatttacccatctctcaggacacggaagcagcgggtttggactctttattcggtgcagaactcggcaaggggcagcttaccctccccagaacccaggatcatcctgtctggctgcagtgagagaccaacccctaacaagggctgggccacagcagggagtccagccctaccttcttcccttggcagctggagaaatctggtttcaatataactcatttaaaaatttatgccacagtccttataattggaaaaatactggtgcccaggttttcttggagttatccaagcagctgcgcccctagctgggatctggtacctggactaggctaattacagcttctccccaacaggaaactgtgggatttgaaaaggaaagggaagggaaaacagagaacctagtggtctaccaagtggttggcaactttcccaatgtctgcttactctgaggcttggcactgggggccagggcctgccccagggctcctggaatttcccttgatccagctaggctgggacactccctaaatcagctgcgtgttgttagcatcaggcagaatgaatggcagagagtgattctgtcttcatagagggtggggtacttctccataaggcatctcagtcaaatccccatcactgtcataaattcaaataaaatgtctgaacaaggg

SEQ ID NO: 381492 - DNA, 1212 bp, Homo sapiens
tcgagtcggaccactcggagaagcacccagatgcagacagcctgtatgtagagaagattgacgtgggggaagctgaaccacggactgtggtgagcggcctggtacagttcgtgcccaaggaggaactgcaggacaggctggtagtggtgctgtgcaacctgaaaccccagaagatgagaggagtcgagtcccaaggcatgcttctgtgtgcttctatagaagggataaaccgccaggttgaacctctggaccctccggcaggctctgctcctggtgagcacgtgtttgtgaagggctatgaaaagggccaaccagatgaggagctcaagcccaagaagaaagtcttcgagaagttgcaggctgacttcaaaatttctgaggagtgcatcgcacagtggaagcaaaccaacttcatgaccaagctgggctccatttcctgtaaatcgctgaaaggggggaacattagctagccagcccagcatcttccccccttcttccaccactgagtcatctgctgtctcttcagtctgctccatccatcacccatttacccatctctcaggacacggaagcagcgggtttggactctttattcggtgcagaactcggcaaggggcagcttaccctccccagaacccaggatcatcctgtctggctgcagtgagagaccaacccctaacaagggctgggccacagcagggagtccagccctaccttcttcccttggcagctggagaaatctggtttcaatataactcatttaaaaatttatgccacagtccttataattggaaaaatactggtgcccaggttttcttggagttatccaagcagctgcgcccctagctgggatctggtacctggactaggctaattacagcttctccccaacaggaaactgtgggatttgaaaaggaaagggaagggaaaacagagaacctagtggtctaccaagtggttggcaactttcccaatgtctgcttactctgaggcttggcactgggggccagggcctgccccagggctcctggaatttcccttgatccagctaggctgggacactccctaaatcagctgcgtgttgttagcatcaggcagaatgaatggcagagagtgattctgtcttcatagagggtggggtacttctccataaggcatctcagtcaaatccccatcactgtcataaattcaaataaaatgtctgaacaaggg

SEQ ID NO: 381493 - DNA, 1625 bp, Homo sapiens
aaaaaaaaaaaaaaaaaaaaaaaaaagagtaagcggagcgccgagcccagctgatgcaacctggctggactcgcgtgacagttcccggcacgcggcggcgacggtgacccaggaaggggctctggtgccgggctgagcgggggaagcaggggtagcggagccatgggggacgctcccagccctgaagagaaactgcaccttatcacccggaacctgcaggaggttctgggggaagagaagctgaaggagatactgaaggagcgggaacttaaaatttactggggaacggcaaccacgggcaaaccacatgtggcttactttgtgcccatgtcaaagattgcagacttcttaaaggcagggtgtgaggtaacaattctgtttgcggacctccacgcatacctggataacatgaaagccccatgggaacttctagaactccgagtcagttactatgagaatgtgatcaaagcaatgctggagagcattggtgtgcccttggagaagctcaagttcatcaaaggcactgattaccagctcagcaaagagtacacactagatgtgtacagactctcctccgtggtcacacagcacgattccaagaaggctggagctgaggtggtaaagcaggtggagcaccctttgctgagtggcctcttataccccggactgcaggttagaagttcaagccgatgtccaaaaggaaattttccccaaagacacagccagtcttggtgcaattagtgacaacgcaagcactcgtgctatggccggttccataatcagttcctacaacccacaggacagagaatgcaacaatatggaaatccaagtggacattgaagccaaaccaagccactatcagctggtgagtggaagcagcacggaggactcgctccatgttcatgctcagatggcagagaatgaagaagaaggtagtggtggcggaggcagtgaagaggatcccccctgcagacaccaaagctgtgaacagaaagactgcctggccagcaaaccttgggacatcagcctggcccagcctgaaagcatccgcagtgacctagagagttctgatgcacagtcagacgatgtgccagacatcacctcagatgagtgtggctccccccgctcccatactgcagcctgcccctcgacccccagagcccaaggtgcaccgagcccaagtgcccatatgaacctctctgccctagccgagggacaaactgtcttgaagccagaaggtggagaagccagagtatgaagtggaatgaatgctcctgttctgagaagcacacttgtaactgcatcttttggaatttttttttttttttttccaaggggtagagatttatgtattttatttcacagattctctggtcacaggtttttgcccagggaaattctgagaaattcacaatttcttaccagataaaacatgaaaagtttgccgttagttcccctcccctcccctccctctttttagttttaatttattggttaaactgatggcagcaatccatgaggtgtgtcaaagagtgtacatatgtatgtgtgtatattgaatgctaaacatattactgaaagacacattttaataaagatttctgtcataattcaaaaaaaaaaaa

SEQ ID NO: 381494 - DNA, 1618 bp, Homo sapiens
aactataggctagtacgagctgggtgttaatcggcagaggcagctgatgcaacctggctggactcgcgtgacagttcccggcacgcggcggcgacggtgacccaggaaggggctctggtgccgggctgagcgggggaagcaggggtagcggagccatgggggacgctcccagccctgaagagaaactgcaccttatcacccggaacctgcaggaggttctgggggaagagaagctgaaggagatactgaaggagcgggaacttaaaatttactggggaacggcaaccacgggcaaaccacatgtggcttactttgtgcccatgtcaaagattgcagacttcttaaaggcagggtgtgaggtaacaattctgtttgcggacctccacgcatacctggataacatgaaagccccatgggaacttctagaactccgagtcagttactatgagaatgtgatcaaagcaatgctggagagcattggtgtgcccttggagaagctcaagttcatcaaaggcactgattaccagctcagcaaagagtacacactagatgtgtacagactctcctccgtggtcacacagcacgattccaagaaggctggagctgaggtggtaaagcaggtggagcaccctttgctgagtggcctcttataccccggactgcaggttagaagttcaagccgatgtccaaaaggaaattttccccaaagacacagccagtcttggtgcaattagtgacaacgcaagcactcgtgctatggccggttccataatcagttcctacaacccacaggacagagaatgcaacaatatggaaatccaagtggacattgaagccaaaccaagccactatcagctggtgagtggaagcagcacggaggactcgctccatgttcatgctcagatggcagagaatgaagaagaaggtagtggtggcggaggcagtgaagaggatcccccctgcagacaccaaagctgtgaacagaaagactgcctggccagcaaaccttgggacatcagcctggcccagcctgaaagcatccgcagtgacctagagagttctgatgcacagtcagacgatgtgccagacatcacctcagatgagtgtggctccccccgctcccatactgcagcctgcccctcgacccccagagcccaaggtgcaccgagcccaagtgcccatatgaacctctctgccctagccgagggacaaactgtcttgaagccagaaggtggagaagccagagtatgaagtggaatgaatgctcctgttctgagaagcacacttgtaactgcatcttttggaatttttttttttttttttccaaggggtagagatttatgtattttatttcacagattctctggtcacaggtttttgcccagggaaattctgagaaattcacaatttcttaccagataaaacatgaaaagtttgccgttagttcccctcccctcccctccctctttttagttttaatttattggttaaactgatggcagcaatccatgaggtgtgtcaaagagtgtacatatgtatgtgtgtatattgaatgctaaacatattactgaaagacacattttaataaagatttctgtcataattcaaaaaaaaaaaa

SEQ ID NO: 381495 - DNA, 1893 bp, Homo sapiens
aaaaaaaaaaaaaaaaaaaaaaaaaagagtaagcggagcgccgagcccagctgatgcaacctggctggactcgcgtgacagttcccggcacgcggcggcgacggtgacccaggaaggggctctggtgccgggctgagcgggggaagcaggggtagcggagccatgggggacgctcccagccctgaagagaaactgcaccttatcacccggaacctgcaggaggttctgggggaagagaagctgaaggagatactgaaggagcgggaacttaaaatttactggggaacggcaaccacgggcaaaccacatgtggcttactttgtgcccatgtcaaagattgcagacttcttaaaggcagggtgtgaggtaacaattctgtttgcggacctccacgcatacctggataacatgaaagccccatgggaacttctagaactccgagtcagttactatgagaatgtgatcaaagcaatgctggagagcattggtgtgcccttggagaagctcaagttcatcaaaggcactgattaccagctcagcaaagagtacacactagatgtgtacagactctcctccgtggtcacacagcacgattccaagaaggctggagctgaggtggtaaagcaggtggagcaccctttgctgagtggcctcttataccccggactgcaggctttggatgaagagtatttaaaagtagctgccccagggctcctggaatttcccttgatccagctaggctgggacactccctaaatcagctgcgtgttgttagcatcaggcagaatgaatggcagagagtgattctgtcttcatagagggtggggtacttctccataaggcatctcagtcaaatccccatcactgtcataaattcaaataaaatgtctgaacaagggtgtctggatgtgagctggaccatctcaggagagaacacaagtgtgaggcagctgctggcccctcacctagtctggggttcctttaccctgtaatggggggtggggggtagaagatggacaagacaccttaacagtccctttggcagtactaggcagaagaggcccatacttgggtccaatgtgtgcagcaggcaaaacattttcccttctaaatgtgggcccagaccactgccctgtcccccccacattaagaagcagtagccacagccaagtttcaatcatttaattaacatctttaaatgaaacacagttttcttcatgtgtctcactcaggcttcagggcagagggaatggatttttagacatatcaaagactcaaaaatttaaagaaatatatatatgtatatatatacttctaacattttatggaaattaaaaatcagaggcttttggtctctccatttactctaggtcaagctcatttaccccagaggacaaagaagggctgcctcttctagaccctcccttctcctttgtcctctgtcccacccagcagggaaacaagctcagaagatcctaacaggatagagttccagtaatgttggaggagggagagggaaagagaagtcaggttctctcccacctccagccattcccaggttgctgccagggcctggtttcatgcagctttgacccagtcctggatcctagggggtggggtagatcaggagctctgagcagaacagtgctcactgattatcctctttccccaactcagtgggcaggtgcagcgtacacccagcagcactctccactgcccacaggcaagggaagaatattgattgattagctacaaggagaagacagtagtgactagtggaaaacaccctggagagggccagaggaacctggctctcaccacatcccctctgttcccagccttggtgagggggcggggaggtcatgtcaacctctctccttggtggtgaagcta

SEQ ID NO: 381496 - DNA, 1571 bp, Homo sapiens
aaaaaaaaaaaaaaaaaaaaaaaaaagagtaagcggagcgccgagcccagctgatgcaacctggctggactcgcgtgacagttcccggcacgcggcggcgacggtgacccaggaaggggctctggtgccgggctgagcgggggaagcaggggtagcggagccatgggggacgctcccagccctgaagagaaactgcaccttatcacccggaacctgcaggaggttctgggggaagagaagctgaaggagatactgaaggagcgggaacttaaaatttactggggaacggcaaccacgggcaaaccacatgtggcttactttgtgcccatgtcaaagattgcagacttcttaaaggcagggtgtgaggtaacaattctgtttgcggacctccacgcatacctggataacatgaaagccccatgggaacttctagaactccgagtcagttactatgagaatgtgatcaaagcaatgctggagagcattggtgtgcccttggagaagctcaagttcatcaaaggcactgattaccagctcagcaaagagtacacactagatgtgtacagactctcctccgtggtcacacagcacgattccaagaaggctggagctgaggtggtaaagcaggtggagcaccctttgctgagtggcctcttataccccggactgcaggttagaagttcaagccgatgtccaaaaggaaattttccccaaagacacagccagtcttggtgcaattagtgacaacgcaagcactcgtgctatggccggttccataatcagttcctacaacccacaggacagagaatgcaacaatatggaaatccaagtggacattgaagccaaaccaagccactatcagctggtgagtggaagcagcacggaggactcgctccatgttcatgctcagatggcagagaatgaagaagaaggtagtggtggcggaggcagtgaagaggatcccccctgcagacaccaaagctgtgaacagaaagactgcctggccagcaaaccttgggacatcagcctggcccagcctgaaagcatccgcagtgacctagagagttctgatgcacagtcagacgatgtgccagacatcacctcagatgagtgtggctccccccgctcccatactgcagcctgcccctcgacccccagagcccaaggtgcaccgagcccaagtgcccatatgaacctctctgccctagccgagggacaaactgtcttgaagccagaaggtggagaagccagagtatgaagtggaatgaatgctcctgttctgagaagcacacttgtaactgcatcttttggaatttttttttttttttttccaaggggtagagatttatgtattttatttcacagattctctggtcacaggtttttgcccagggaaattctgagaaattcacaatttcttaccagataaaacatgattggttaaactgatggcagcaatccatgaggtgtgtcaaagagtgtacatatgtatgtgtgtatattgaatgctaaacatattactgaaagacacattttaataaagatttctgtcataattcaaaaaaaaaaaa

SEQ ID NO: 381497 - DNA, 1915 bp, Homo sapiens
gactgagttctgctaccactgcaagcagatatggcatccaaatcagacatgcgatatggcccgtcaacagagggcccagactttacgagttcggaccaaacacacttcaggtctcagttatgggcaagaatctggaccagcagatgacatcaagccatgcccacgatgcagtgcatacattatcaagatgaatgatggaagctgtaatcacatgacctgtgcagtgtgtggctgtgaattctgttggctttgtatgaaagagatctcagacttgcattacctcagcccctctggctgtacattctggggcaagaagccatggagccgtaagaagaaaattctttggcagctgggcacgttgattggtgctccagtggggatttctctcattgctggcattgccattcctgccatggtcattggcattcctgtttatgttggaaggaagattcacagcaggtatgagggaaggaaaacctccaaacacaagaggaatttggctatcactggaggagtgactttgtcggtcattgcatccccagttattgctgcagttagtgttggtattggtgtccccattatgctggcatatgtttatggggttgtgcccatttctctttgtcgtggaggcggctgtggagttagcacagccaacggaaaaggagtgaaaattgaatttgatgaagatgatggtccaatcacagtggcagatgcctggagagccctcaagaatcccagcattggggaaagcagcattgaaggcctgactagtgtattgagcactagtggaagccctacagatggacttagtgttatgcaaggtccttacagcgaaacggccagctttgcagccctctcagggggcacgctgagtggcggcattctctccagtggcaagggaaaatatagcaggttagaagttcaagccgatgtccaaaaggaaattttccccaaagacacagccagtcttggtgcaattagtgacaacgcaagcactcgtgctatggccggttccataatcagttcctacaacccacaggacaggtttagcatgatccatgcatgactcagcaaagtggattttgtctccacagagaatgcaacaatatggaaatccaagtggacattgaagccaaaccaagccactatcagctggtgagtggaagcagcacggaggactcgctccatgttcatgctcagatggcagagaatgaagaagaaggtagtggtggcggaggcagtgaagaggatcccccctgcagacaccaaagctgtgaacagaaagactgcctggccagcaaaccttgggacatcagcctggcccagcctgaaagcatccgcagtgacctagagagttctgatgcacagtcagacgatgtgccagacatcacctcagatgagtgtggctccccccgctcccatactgcagcctgcccctcgacccccagagcccaaggtgcaccgagcccaagtgcccatatgaacctctctgccctagccgagggacaaactgtcttgaagccagaaggtggagaagccagagtatgaagtggaatgaatgctcctgttctgagaagcacacttgtaactgcatcttttggaatttttttttttttttttccaaggggtagagatttatgtattttatttcacagattctctggtcacaggtttttgcccagggaaattctgagaaattcacaatttcttaccagataaaacatgaaaagtttgccgttagttcccctcccctcccctccctctttttagttttaatttattggttaaactgatggcagcaatccatgaggtgtgtcaaagagtgtacatatgtatgtgtgtatattgaatgctaaacatattactgaaagacacattttaataaagatttctgtcataattcaaaaaaaaaaaa

SEQ ID NO: 381498 - DNA, 1372 bp, Homo sapiens
cgtgtgtgtgcatctgagcacacgtgtgcatgtatagttaaatcagcaaaaaggatctaattactcttctccatctcatttatttttatttttgtttttttagagacagggtcttgctctgtcaaccaggctggagtgcagtgacacaatcataactcactgcagccttgaactcctgggttcaagtgatcttcccatctcagcctcccgagtagctgggactacaggcacgtgcctccatgcccagctaattttttttattttagaaacagggtctgactttgttgccctggctggtctcaaactcctggactcaggcagtcctcacacctcgacctcccaaagcgctggggttataggcatgagccaccacgtccagcctccatctcatttgagtgttagattaaaatgttatttttgttaaaagtgagctctagttaactgttcacctatctttttgaaattcctaatcctgaacccatgaactgcttttaccaacaggtttagcatgatccatgcatgactcagcaaagtggattttgtctccacagagaatgcaacaatatggaaatccaagtggacattgaagccaaaccaagccactatcagctggtgagtggaagcagcacggaggactcgctccatgttcatgctcagatggcagagaatgaagaagaaggtagtggtggcggaggcagtgaagaggatcccccctgcagacaccaaagctgtgaacagaaagactgcctggccagcaaaccttgggacatcagcctggcccagcctgaaagcatccgcagtgacctagagagttctgatgcacagtcagacgatgtgccagacatcacctcagatgagtgtggctccccccgctcccatactgcagcctgcccctcgacccccagagcccaaggtgcaccgagcccaagtgcccatatgaacctctctgccctagccgagggacaaactgtcttgaagccagaaggtggagaagccagagtatgaagtggaatgaatgctcctgttctgagaagcacacttgtaactgcatcttttggaatttttttttttttttttccaaggggtagagatttatgtattttatttcacagattctctggtcacaggtttttgcccagggaaattctgagaaattcacaatttcttaccagataaaacatgaaaagtttgccgttagttcccctcccctcccctccctctttttagttttaatttattggttaaactgatggcagcaatccatgaggtgtgtcaaagagtgtacatatgtatgtgtgtatattgaatgctaaacatattactgaaagacacattttaataaagatttctgtcataattcaaaaaaaaaaaa

SEQ ID NO: 381499 - DNA, 608 bp, Homo sapiens
aaaaaaaaaaaaaaaaaaaaaaaaaagagtaagcggagcgccgagcccagctgatgcaacctggctggactcgcgtgacagttcccggcacgcggcggcgacggtgacccaggaaggggctctggtgccgggctgagcgggggaagcaggggtagcggagccatgggggacgctcccagccctgaagagaaactgcaccttatcacccggaacctgcaggaggttctgggggaagagaagctgaaggagatactgaaggagcgggaacttaaaatttactggggaacggcaaccacgggcaaaccacatgtggcttactttgtgcccatgtcaaagattgcagacttcttaaaggcagggtgtgaggtaacaattctgtttgcggacctccacgcatacctggataacatgaaagccccatgggaacttctagaactccgagtcagttactatgagaatgtgatcaaagcaatgctggagagcattggtgtgcccttggagaagctcaagttcatcaaaggcactgattaccagctcagcaaagagtacacactagatgtgtacagactctccagcctgggtgacagacagtgcaagactccatctcc

SEQ ID NO: 381500 - DNA, 702 bp, Homo sapiens
  misc_feature (17)..(17): n is a, c, g, or t
  misc_feature (21)..(21): n is a, c, g, or t
  misc_feature (329)..(330): n is a, c, g, or t
  misc_feature (339)..(340): n is a, c, g, or t
  misc_feature (342)..(342): n is a, c, g, or t
  misc_feature (344)..(345): n is a, c, g, or t
  misc_feature (350)..(350): n is a, c, g, or t
  misc_feature (355)..(355): n is a, c, g, or t
  misc_feature (357)..(357): n is a, c, g, or t
  misc_feature (362)..(362): n is a, c, g, or t
  misc_feature (403)..(403): n is a, c, g, or t
  misc_feature (405)..(405): n is a, c, g, or t
  misc_feature (409)..(410): n is a, c, g, or t
  misc_feature (418)..(418): n is a, c, g, or t
  misc_feature (479)..(479): n is a, c, g, or t
  misc_feature (500)..(500): n is a, c, g, or t
  misc_feature (516)..(516): n is a, c, g, or t
  misc_feature (530)..(530): n is a, c, g, or t
  misc_feature (539)..(539): n is a, c, g, or t
  misc_feature (558)..(558): n is a, c, g, or t
  misc_feature (603)..(603): n is a, c, g, or t
  misc_feature (614)..(614): n is a, c, g, or t
  misc_feature (616)..(616): n is a, c, g, or t
  misc_feature (625)..(625): n is a, c, g, or t
  misc_feature (694)..(694): n is a, c, g, or t
gggccgagtaagcggangtcngagcccagctgatgcaacctggctggactcgcgtgacagttcccggcacgcggcggcgacggtgacccaggaaggggctctggtgccgggctgagcgggggaagcaggggtagcggagccatgggggacgctcccagccctgaagagaaactgcaccttatcacccggaacctgcagagtacacactagatgtgtacagactctcctccgtggtcacacagcacgattccaagaaggctggagctgaggtggtaaagcaggtggagcaccctttgctgagtggcctcttataccccggactgcccccnntccccctcnncncnnttctnacacncncaccnccccccttgtgggagggcattggatcagaagaaagatttcncncccnnctgccagnagaaggatgaagaaacacctggagggataggaaggataaagaaagtttggtcccaaatatncaccacaataacctcccctgncaacttggggctattncaaaaacgggggtnccattctgnatggaatccctatgggttnccagggatttaaacagggcaggcaaaaaatgtagcctctttcagnaaggagggagntnccaaggatntgaatctccctttggatcgggaaaggagggatgttgaaagaaaaaaaactgtaaagaagggcctttctngtggagcc

SEQ ID NO: 381501 - DNA, 416 bp, Homo sapiens
ggccaagactcagtaaattctatgtggaatgcatgaatggaaatacctaaaggaggcaaagctactactgctccctccccgctagtctaataattgagggagagaacagatgaaaatcaggtatgtcatgtctgaaaggttgccaacccagtattaaagaagttacaactcagtgtttagactctggggattctacactaaatcttacctaatctcagtgtcttaacgtggtgggatcagcagctgacctgccacagggaagaattctacctcatggggttcttctcattcccagagccaatggccaaaggccctgccaagaattcagaaccagaggaggtcatcccatcccggctggatatccgtgtggggaaaatcatcactgtggagaaggtactcatttttcaccacatctc

SEQ ID NO: 381502 - DNA, 890 bp, Homo sapiens
  misc_feature (842)..(842): n is a, c, g, or t
  misc_feature (871)..(871): n is a, c, g, or t
  misc_feature (877)..(877): n is a, c, g, or t
gctcctcactttttccggccgctgccggaggggtccaggccgagtaagcggagcgccgagcccagctgatgcaacctggctggactcgcgtgacagttcccggcacgcggcggcgacggtgacccaggaaggggctctggtgccgggctgagcgggggaagcaggggtagcggagccatgggggacgctcccagccctgaagagaaactgcaccttatcacccggaacctgcaggaggttctgggggaagagaagctgaaggagatactgaaggagcgggaacttaaaatttactggggaacggcaaccacgggcaaaccacatgtggcttactttgtgcccatgtcaaagattgcagacttcttaaaggcagggtgtgaggtaacaattctgtttgcggacctccacgcatacctggataacatgaaagccccatgggaacttctagaactccgagtcagttactatgagaatgtgatcaaagcaatgctggagagcattggtgtgcccttggagaagctcaagttcatcaaaggcactgattaccagctcagcaaagagtacacactagatgtgtacagactctcctccgtggtcacacagcacgattccaagaaggctggagctgaggtggtaaagcaggtggagcaccctttgctgagtggcctcttataccccggactgcaggctttggatgaagagtatttaaaagtagatgcccaatttggaggcattgatcagagaaagattttcacctttgcagagaagtacctccctgcacttggctattcaaaacgggtccatctgatgaatctatggtccaggattacagcacaaataantttagagagatcagatgttctgtcgaggngttganaaactacaagctt

SEQ ID NO: 381503 - DNA, 467 bp, Homo sapiens
agcgagagcagggtgcccatcagctgccccgagtgcagcgagcgactcaacccgcacgacatccgcttgctgctcgccgacccgccgcttatgcacaagtacgaggagttcatgctgcgccgctacctagcctcggaccccgactgccgctggtgcccggccccggactgcgggtgatgctggcattgccattcctgccatggtcattggcattcctgtttatgttggaaggagggaaattctgagaaattcacaatttcttaccagataaaacatgaaaagtttgccgttagttcccctcccctcccctccctctttttagttttaatttattggttaaactgatggcagcaatccatgaggtgtgtcaaagagtgtacatatgtatgtgtgtatattgaatgctaaacatattactgaaagacacattttaataaagatttctgtcataattcaaaaaaaaaaaa

SEQ ID NO: 381504 - DNA, 2506 bp, Homo sapiens
gctcctcactttttccggccgctgccggaggggtccaggccgagtaagcggagcgccgagcccagctgatgcaacctggctggactcgcgtgacagttcccggcacgcggcggcgacggtgacccaggaaggggctctggtgccgggctgagcgggggaagcaggggtagcggagccatgggggacgctcccagccctgaagagaaactgcaccttatcacccggaacctgcaggaggttctgggggaagagaagctgaaggagatactgaaggagcgggaacttaaaatttactggggaacggcaaccacgggcaaaccacatgtggcttactttgtgcccatgtcaaagattgcagacttcttaaaggcagggtgtgaggtaacaattctgtttgcggacctccacgcatacctggataacatgaaagccccatgggaacttctagaactccgagtcagttactatgagaatgtgatcaaagcaatgctggagagcattggtgtgcccttggagaagctcaagttcatcaaaggcactgattaccagctcagcaaagagtacacactagatgtgtacagactctcctccgtggtcacacagcacgattccaagaaggctggagctgaggtggtaaagcaggtggagcaccctttgctgagtggcctcttataccccggactgcaggctttggatgaagagtatttaaaagtagatgcccaatttggaggcattgatcagagaaagattttcacctttgcagagaagtacctccctgcacttggctattcaaaacgggtccatctgatgaatcctatggttccaggattaacaggcagcaaaatgagctcttcagaagaggagtccaagattgatctccttgatcggaaggaggatgtgaagaaaaaactgaagaaggccttctgtgagccaggaaatgtggagaacaatggggttctgtccttcatcaagcatgtcctttttccccttaagtccgagtttgtgatcctacgagatgagaaatggggtggaaacaaaacctacacagcttacgtggacctggaaaaggactttgctgctgaggttgtacatcctggagacctgaagaattctgttgaagtcgcactgaacaagttgctggatccaatccgggaaaagtttaatacccctgccctgaaaaaactggccagcgctgcctacccagatccctcaaagcagaagccaatggccaaaggccctgccaagaattcagaaccagaggaggtcatcccatcccggctggatatccgtgtggggaaaatcatcactgtggagaagcacccagatgcagacagcctgtatgtagagaagattgacgtgggggaagctgaaccacggactgtggtgagcggcctggtacagttcgtgcccaaggaggaactgcaggacaggctggtagtggtgctgtgcaacctgaaaccccagaagatgagaggagtcgagtcccaaggcatgcttctgtgtgcttctatagaagggataaaccgccaggttgaacctctggaccctccggcaggctctgctcctggtgagcacgtgtttgtgaagggctatgaaaagggccaaccagatgaggagctcaagcccaagaagaaagtcttcgagaagttgcaggctgacttcaaaatttctgaggagtgcatcgcacagtggaagcaaaccaacttcatgaccaagctgggctccatttcctgtaaatcgctgaaaggggggaacattagctagccagcccagcatcttccccccttcttccaccactgagtcatctgctgtctcttcagtctgctccatccatcacccatttacccatctctcaggacacggaagcagcgggtttggactctttattcggtgcagaactcggcaaggggcagcttaccctccccagaacccaggatcatcctgtctggctgcagtgagagaccaacccctaacaagggctgggccacagcagggagtccagccctaccttcttcccttggcagctggagaaatctggtttcaatataactcatttaaaaatttatgccacagtccttataattggaaaaatactggtgcccaggttttcttggagttatccaagcagctgcgcccctagctgggatctggtacctggactaggctaattacagcttctccccaacaggaaactgtgggatttgaaaaggaaagggaagggaaaacagagaacctagtggtctaccaagtggttggcaactttcccaatgtctgcttactctgaggcttggcactgggggccagggcctgccccagggctcctggaatttcccttgatccagctaggctgggacactccctaaatcagctgcgtgttgttagcatcaggcagaatgaatggcagagagtgattctgtcttcatagagggtggggtacttctccataaggcatctcagtcaaatccccatcactgtcataaattcaaataaaatgtctgaacaaggg

SEQ ID NO: 381505 - DNA, 2065 bp, Homo sapiens
gctcctcactttttccggccgctgccggaggggtccaggccgagtaagcggagcgccgagcccagctgatgcaacctggctggactcgcgtgacagttcccggcacgcggcggcgacggtgacccaggaaggggctctggtgccgggctgagcgggggaagcaggggtagcggagccatgggggacgctcccagccctgaagagaaactgcaccttatcacccggaacctgcaggaggttctgggggaagagaagctgaaggagatactgaaggagcgggaacttaaaatttactggggaacggcaaccacgggcaaaccacatgtggcttactttgtgcccatgtcaaagattgcagacttcttaaaggcagggtgtgaggtaacaattctgtttgcggacctccacgcatacctggataacatgaaagccccatgggaacttctagaactccgagtcagttactatgagaatgtgatcaaagcaatgctggagagcattggtgtgcccttggagaagctcaagttcatcaaaggcactgattaccagctcagcaaagagtacacactagatgtgtacagactctcctccgtggtcacacagcacgattccaagaaggctggagctgaggtggtaaagcaggtggagcaccctttgctgagtggcctcttataccccggactgcaggctttggatgaagagtatttaaaagtagatgcccaatttggaggcattgatcagagaaagattttcacctttgcagagaagtacctccctgcacttggctattcaaaacgggtccatctgatgaatcctatggttccaggattaacaggcagcaaaatgagctcttcagaagaggagtccaagattgatctccttgatcggaaggaggatgtgaagaaaaaactgaagaaggccttctgtgagccaggaaatgtggagaacaatggggttctgtccttcatcaagcatgtcctttttccccttaagtccgagtttgtgatcctacgagatgagaaatggggtggaaacaaaacctacacagcttacgtggacctggaaaaggactttgctgctgaggttgtacatcctggagacctgaagaattctgttgaagtcgcactgaacaagttgctggatccaatccgggaaaagtttaatacccctgccctgaaaaaactggccagcgctgcctacccagatccctcaaagcagaagccaatggccaaaggccctgccaagaattcagaaccagaggaggtcatcccatcccggctggatatccgtgtggggaaaatcatcactgtggagaagcacccagatgcagacagcctgtatgtagagaagattgacgtgggggaagctgaaccacggactgtggtgagcggcctggtacagttcgtgcccaaggaggaactgcaggacaggctggtagtggtgctgtgcaacctgaaaccccagaagatgagaggagtcgagtcccaaggcatgcttctgtgtgcttctatagaagggataaaccgccaggttgaacctctggaccctccggcaggctctgctcctggtgagcacgtgtttgtgaagggctatgaaaagggccaaccagatgaggagctcaagcccaagaagaaagtcttcgagaagttgcaggctgacttcaaaatttctgaggagtgcatcgcacagtggaagcaaaccaacttcatgaccaagctgggctccatttcctgtaaatcgctgaaaggggggaacattagctagccagcccagcatcttccccccttcttccaccactgagtcatctgctgtctcttcagtctgctccatccatcacccatttacccatctctcaggacacggaagcagcgggtttggactctttattcggtgcagaactcggcaaggggcagcttaccctccccagaacccaggatcatcctgtctggctgcagtgagagaccaacccctaacaagggctgggccacagcagggagtccagccctaccttcttcccttggcagctggagaaatctggtttcaatataactcatttaaaaattta

SEQ ID NO: 381506 - DNA, 2370 bp, Homo sapiens
gctcctcactttttccggccgctgccggaggggtccaggccgagtaagcggagcgccgagcccagctgatgcaacctggctggactcgcgtgacagttcccggcacgcggcggcgacggtgacccaggaaggggctctggtgccgggctgagcgggggaagcaggggtagcggagccatgggggacgctcccagccctgaagagaaactgcaccttatcacccggaacctgcaggaggttctgggggaagagaagctgaaggagatactgaaggagcgggaacttaaaatttactggggaacggcaaccacgggcaaaccacatgtggcttactttgtgcccatgtcaaagattgcagacttcttaaaggcagggtgtgaggtaacaattctgtttgcggacctccacgcatacctggataacatgaaagccccatgggaacttctagaactccgagtcagttactatgagaatgtgatcaaagcaatgctggagagcattggtgtgcccttggagaagctcaagttcatcaaaggcactgattaccagctcagcaaagagtacacactagatgtgtacagactctcctccgtggtcacacagcacgattccaagaaggctggagctgaggtggtaaagcaggtggagcaccctttgctgagtggcctcttataccccggactgcaggctttggatgaagagtatttaaaagtagatgcccaatttggaggcattgatcagagaaagattttcacctttgcagagaagtacctccctgcacttggctattcaaaacgggtccatctgatgaatcctatggttccaggattaacaggcagcaaaatgagctcttcagaagaggagtccaagattgatctccttgatcggaaggaggatgtgaagaaaaaactgaagaaggccttctgtgagccaggaaatgtggagaacaatggggttctgtccttcatcaagcatgtcctttttccccttaagtccgagtttgtgatcctacgagatgagaaatggggtggaaacaaaacctacacagcttacgtggacctggaaaaggactttgctgctgaggttgtacatcctggagacctgaagaattctgttgaagtcgcactgaacaagttgctggatccaatccgggaaaagtttaatacccctgccctgaaaaaactggccagcgctgcctacccagatccctcaaagcagaagccaatggccaaaggccctgccaagaattcagaaccagaggaggtcatcccatcccggctggatatccgtgtggggaaaatcatcactgtggagaagcacccagatgcagacagcctgtatgtagagaagattgacgtgggggaagctgaaccacggactgtggtgagcggcctggtacagttcgtgcccaaggaggaactgcaggacaggctggtagtggtgctgtgcaacctgaaaccccagaagatgagaggagtcgagtcccaaggcatgcttctgtgtgcttctatagaagggataaaccgccaggttgaacctctggaccctccggcaggctctgctcctggtgagcacgtgtttgtgaagggctatgaaaagggccaaccagatgaggagctcaagcccaagaagaaagtcttcgagaagttgcaggctgacttcaaaatttctgaggagtgcatcgcacagtggaagcaaaccaacttcatgaccaagctgggctccatttcctgtaaatcgctgaaaggggggaacattagctagccagcccagcatcttccccccttcttccaccactgagtcatctgctgtctcttcagtctgctccatccatcacccatttacccatctctcaggacacggaagcagcgggtttggactctttattcggtgcagaactcggcaaggggcagcttaccctccccagaacccaggatcatcctgtctggctgcagtgagagaccaacccctaacaagggctgggccacagcagggagtccagccctaccttcttcccttggcagctggagaaatctggtttcaatataactcatttaaaaatttatgccacagtccttataattggaaaaatactggtgcccaggttttcttggagttatccaagcagtgggccctagctggatctggtactggactagctaataaagtctcgcacaggaacggggattggaacggaggaggcacacccagacttggctacacggtggactccagtgtaccgggtgaggggcagcgtgccgactggatccgacagggggacccaaacggggcagagaagagagctctaaggggcaggaccgctatatgaaaaagcctcccgctttcttgagtgaaactatatacaaaagt

SEQ ID NO: 381507 - DNA, 2136 bp, Homo sapiens
gctcctcactttttccggccgctgccggaggggtccaggccgagtaagcggagcgccgagcccagctgatgcaacctggctggactcgcgtgacagttcccggcacgcggcggcgacggtgacccaggaaggggctctggtgccgggctgagcgggggaagcaggggtagcggagccatgggggacgctcccagccctgaagagaaactgcaccttatcacccggaacctgcaggaggttctgggggaagagaagctgaaggagatactgaaggagcgggaacttaaaatttactggggaacggcaaccacgggcaaaccacatgtggcttactttgtgcccatgtcaaagattgcagacttcttaaaggcagggtgtgaggtaacaattctgtttgcggacctccacgcatacctggataacatgaaagccccatgggaacttctagaactccgagtcagttactatgagaatgtgatcaaagcaatgctggagagcattggtgtgcccttggagaagctcaagttcatcaaaggcactgattaccagctcagcaaagagtacacactagatgtgtacagactctcctccgtggtcacacagcacgattccaagaaggctggagctgaggtggtaaagcaggtggagcaccctttgctgagtggcctcttataccccggactgcaggctttggatgaagagtatttaaaagtagatgcccaatttggaggcattgatcagagaaagattttcacctttgcagagaagtacctccctgcacttggctattcaaaacgggtccatctgatgaatcctatggttccaggattaacaggcagcaaaatgagctcttcagaagaggagtccaagattgatctccttgatcggaaggaggatgtgaagaaaaaactgaagaaggccttctgtgagccaggaaatgtggagaacaatggggttctgtccttcatcaagcatgtcctttttccccttaagtccgagtttgtgatcctacgagatgagaaatggggtggaaacaaaacctacacagcttacgtggacctggaaaaggactttgctgctgaggttgtacatcctggagacctgaagaattctgttgaagtcgcactgaacaagttgctggatccaatccgggaaaagtttaatacccctgccctgaaaaaactggccagcgctgcctacccagatccctcaaagcagaagccaatggccaaaggccctgccaagaattcagaaccagaggaggtcatcccatcccggctggatatccgtgtggggaaaatcatcactgtggagaagcacccagatgcagacagcctgtatgtagagaagattgacgtgggggaagctgaaccacggactgtggtgagcggcctggtacagttcgtgcccaaggaggaactgcaggacaggctggtagtggtgctgtgcaacctgaaaccccagaagatgagaggagtcgagtcccaaggcatgcttctgtgtgcttctatagaagggataaaccgccaggttgaacctctggaccctccggcaggctctgctcctggtgagcacgtgtttgtgaagggctatgaaaagggccaaccagatgaggagctcaagcccaagaagaaagtcttcgagaagttgcaggctgacttcaaaatttctgaggagtgcatcgcacagtggaagcaaaccaacttcatgaccaagctgggctccatttcctgtaaatcgctgaaaggggggaacattagctagccagcccagcatcttccccccttcttccaccactgagtcatctgctgtctcttcagtctgctccatccatcacccatttacccatctctcaggacacggaagcagcgggtttggactctttattcggtgcagaactcggcaaggggcagcttaccctccccagaacccaggatcatcctgtctggctgcagtgagagaccaacccctaacaagggctgggccacagcagggagtccagccctaccttcttcccttggcagctggagaaatctggtttcaatataactcatttaaaaatttatgccacagtccttataattggaaaaatactggtgcccaggagggtctggtcctggggtaccggggctcgga

SEQ ID NO: 381508 - DNA, 2339 bp, Homo sapiens
gctcctcactttttccggccgctgccggaggggtccaggccgagtaagcggagcgccgagcccagctgatgcaacctggctggactcgcgtgacagttcccggcacgcggcggcgacggtgacccaggaaggggctctggtgccgggctgagcgggggaagcaggggtagcggagccatgggggacgctcccagccctgaagagaaactgcaccttatcacccggaacctgcaggaggttctgggggaagagaagctgaaggagatactgaaggagcgggaacttaaaatttactggggaacggcaaccacgggcaaaccacatgtggcttactttgtgcccatgtcaaagattgcagacttcttaaaggcagggtgtgaggtaacaattctgtttgcggacctccacgcatacctggataacatgaaagccccatgggaacttctagaactccgagtcagttactatgagaatgtgatcaaagcaatgctggagagcattggtgtgcccttggagaagctcaagttcatcaaaggcactgattaccagctcagcaaagagtacacactagatgtgtacagactctcctccgtggtcacacagcacgattccaagaaggctggagctgaggtggtaaagcaggtggagcaccctttgctgagtggcctcttataccccggactgcaggctttggatgaagagtatttaaaagtagatgcccaatttggaggcattgatcagagaaagattttcacctttgcagagaagtacctccctgcacttggctattcaaaacgggtccatctgatgaatcctatggttccaggattaacaggcagcaaaatgagctcttcagaagaggagtccaagattgatctccttgatcggaaggaggatgtgaagaaaaaactgaagaaggccttctgtgagccaggaaatgtggagaacaatggggttctgtccttcatcaagcatgtcctttttccccttaagtccgagtttgtgatcctacgagatgagaaatggggtggaaacaaaacctacacagcttacgtggacctggaaaaggactttgctgctgaggttgtacatcctggagacctgaagaattctgttgaagtcgcactgaacaagttgctggatccaatccgggaaaagtttaatacccctgccctgaaaaaactggccagcgctgcctacccagatccctcaaagcagaagccaatggccaaaggccctgccaagaattcagaaccagaggaggtcatcccatcccggctggatatccgtgtggggaaaatcatcactgtggagaagcacccagatgcagacagcctgtatgtagagaagattgacgtgggggaagctgaaccacggactgtggtgagcggcctggtacagttcgtgcccaaggaggaactgcaggacaggctggtagtggtgctgtgcaacctgaaaccccagaagatgagaggagtcgagtcccaaggcatgcttctgtgtgcttctatagaagggataaaccgccaggttgaacctctggaccctccggcaggctctgctcctggtgagcacgtgtttgtgaagggctatgaaaagggccaaccagatgaggagctcaagcccaagaagaaagtcttcgagaagttgcagtctgctccatccatcacccatttacccatctctcaggacacggaagcagcgggtttggactctttattcggtgcagaactcggcaaggggcagcttaccctccccagaacccaggatcatcctgtctggctgcagtgagagaccaacccctaacaagggctgggccacagcagggagtccagccctaccttcttcccttggcagctggagaaatctggtttcaatataactcatttaaaaatttatgccacagtccttataattggaaaaatactggtgcccaggttttcttggagttatccaagcagctgcgcccctagctgggatctggtacctggactaggctaattacagcttctccccaacaggaaactgtgggatttgaaaaggaaagggaagggaaaacagagaacctagtggtctaccaagtggttggcaactttcccaatgtctgcttactctgaggcttggcactgggggccagggcctgccccagggctcctggaatttcccttgatccagctaggctgggacactccctaaatcagctgcgtgttgttagcatcaggcagaatgaatggcagagagtgattctgtcttcatagagggtggggtacttctccataaggcatctcagtcaaatccccatcactgtcataaattcaaataaaatgtctgaacaaggg

SEQ ID NO: 381509 - DNA, 2050 bp, Homo sapiens
gctcctcactttttccggccgctgccggaggggtccaggccgagtaagcggagcgccgagcccagctgatgcaacctggctggactcgcgtgacagttcccggcacgcggcggcgacggtgacccaggaaggggctctggtgccgggctgagcgggggaagcaggggtagcggagccatgggggacgctcccagccctgaagagaaactgcaccttatcacccggaacctgcaggaggttctgggggaagagaagctgaaggagatactgaaggagcgggaacttaaaatttactggggaacggcaaccacgggcaaaccacatgtggcttactttgtgcccatgtcaaagattgcagacttcttaaaggcagggtgtgaggtaacaattctgtttgcggacctccacgcatacctggataacatgaaagccccatgggaacttctagaactccgagtcagttactatgagaatgtgatcaaagcaatgctggagagcattggtgtgcccttggagaagctcaagttcatcaaaggcactgattaccagctcagcaaagagtacacactagatgtgtacagactctcctccgtggtcacacagcacgattccaagaaggctggagctgaggtggtaaagcaggtggagcaccctttgctgagtggcctcttataccccggactgcaggctttggatgaagagtatttaaaagtagatgcccaatttggaggcattgatcagagaaagattttcacctttgcagagaagtacctccctgcacttggctattcaaaacgggtccatctgatgaatcctatggttccaggattaacaggcagcaaaatgagctcttcagaagaggagtccaagattgatctccttgatcggaaggaggatgtgaagaaaaaactgaagaaggccttctgtgagccaggaaatgtggagaacaatggggttctgtccttcatcaagcatgtcctttttccccttaagtccgagtttgtgatcctacgagatgagaaatggggtggaaacaaaacctacacagcttacgtggacctggaaaaggactttgctgctgaggttgtacatcctggagacctgaagaattctgttgaagtcgcactgaacaagttgctggatccaatccgggaaaagtttaatacccctgccctgaaaaaactggccagcgctgcctacccagatccctcaaagcagaagccaatggccaaaggccctgccaagaattcagaaccagaggaggtcatcccatcccggctggatatccgtgtggggaaaatcatcactgtggagaagcacccagatgcagacagcctgtatgtagagaagattgacgtgggggaagctgaaccacggactgtggtgagcggcctggtacagttcgtgcccaaggaggaactgcaggacaggctggtagtggtgctgtgcaacctgaaaccccagaacccagaacccaggatcatcctgtctggctgcagtgagagaccaacccctaacaagggctgggccacagcagggagtccagccctaccttcttcccttggcagctggagaaatctggtttcaatataactcatttaaaaatttatgccacagtccttataattggaaaaatactggtgcccaggttttcttggagttatccaagcagctgcgcccctagctgggatctggtacctggactaggctaattacagcttctccccaacaggaaactgtgggatttgaaaaggaaagggaagggaaaacagagaacctagtggtctaccaagtggttggcaactttcccaatgtctgcttactctgaggcttggcactgggggccagggcctgccccagggctcctggaatttcccttgatccagctaggctgggacactccctaaatcagctgcgtgttgttagcatcaggcagaatgaatggcagagagtgattctgtcttcatagagggtggggtacttctccataaggcatctcagtcaaatccccatcactgtcataaattcaaataaaatgtctgaacaaggg

SEQ ID NO: 381510 - DNA, 1861 bp, Homo sapiens
gctcctcactttttccggccgctgccggaggggtccaggccgagtaagcggagcgccgagcccagctgatgcaacctggctggactcgcgtgacagttcccggcacgcggcggcgacggtgacccaggaaggggctctggtgccgggctgagcgggggaagcaggggtagcggagccatgggggacgctcccagccctgaagagaaactgcaccttatcacccggaacctgcaggaggttctgggggaagagaagctgaaggagatactgaaggagcgggaacttaaaatttactggggaacggcaaccacgggcaaaccacatgtggcttactttgtgcccatgtcaaagattgcagacttcttaaaggcagggtgtgaggtaacaattctgtttgcggacctccacgcatacctggataacatgaaagccccatgggaacttctagaactccgagtcagttactatgagaatgtgatcaaagcaatgctggagagcattggtgtgcccttggagaagctcaagttcatcaaaggcactgattaccagctcagcaaagagtacacactagatgtgtacagactctcctccgtggtcacacagcacgattccaagaaggctggagctgaggtggtaaagcaggtggagcaccctttgctgagtggcctcttataccccggactgcaggctttggatgaagagtatttaaaagtagatgcccaatttggaggcattgatcagagaaagattttcacctttgcagagaagtacctccctgcacttggctattcaaaacgggtccatctgatgaatcctatggttccaggattaacaggcagcaaaatgagctcttcagaagaggagtccaagattgatctccttgatcggaaggaggatgtgaagaaaaaactgaagaaggccttctgtgagccaggaaatgtggagaacaatggggttctgtccttcatcaagcatgtcctttttccccttaagtccgagtttgtgatcctacgagatgagaaatggggtggaaacaaaacctacacagcttacgtggacctggaaaaggactttgctgctgaggttgtacatcctggagacctgaagaattctgttgaagtcgcactgaacaagttgctggatccaatccgggaaaagtttaatacccctgccctgaaaaaactggccagcgctgcctacccagatccctcaaagcagaagccaatggccaaaggccctgccaagaattcagaaccagaggaggtcatcccatcccggctggatatccgtgtggggaaaatcatcactgtggagaagcacccagatgcagacagcctgtatgtagagaagattgacgtgggggaagctgaaccacggactgtggtgagcggcctggtacagttcgtgcccaaggaggaactgcaggacaggctggtagtggtgctgtgcaacctgaaaccccagaagatgagaggagtcgagtcccaaggcatgcttctgtgtgcttctatagaagggataaaccgccaggttgaacctctggaccctccggcaggctctgctcctggtgagcacgtgtttgtgaagggctatgaaaagggccaaccagatgaggagctcaagcccaagaagaaagtcttcgagaagttgcaggctgacttcaaaatttctgaggagtgcatcgcacagtggaagcaaaccaacttcatgaccaagctgggctccatttcctgtaaatcgctgaaaggggggaacattagctagccagcccagcatcttccccccttcttccaccactgagtcatctgctgtctcttcagtctgcttaaccccacgccactggcgcggctagactaatgcc

SEQ ID NO: 381511 - DNA, 2364 bp, Homo sapiens
aaactatagggctaggtacgaggccgggtggttgcatgggggacgctcccagccctgaagagaaactgcaccttatcacccggaacctgcaggaggttctgggggaagagaagctgaaggagatactgaaggagcgggaacttaaaatttactggggaacggcaaccacgggcaaaccacatgtggcttactttgtgcccatgtcaaagattgcagacttcttaaaggcagggtgtgaggtaacaattctgtttgcggacctccacgcatacctggataacatgaaagccccatgggaacttctagaactccgagtcagttactatgagaatgtgatcaaagcaatgctggagagcattggtgtgcccttggagaagctcaagttcatcaaaggcactgattaccagctcagcaaagagtacacactagatgtgtacagactctcctccgtggtcacacagcacgattccaagaaggctggagctgaggtggtaaagcaggtggagcaccctttgctgagtggcctcttataccccggactgcaggctttggatgaagagtatttaaaagtagatgcccaatttggaggcattgatcagagaaagattttcacctttgcagagaagtacctccctgcacttggctattcaaaacgggtccatctgatgaatcctatggttccaggattaacaggcagcaaaatgagctcttcagaagaggagtccaagattgatctccttgatcggaaggaggatgtgaagaaaaaactgaagaaggccttctgtgagccaggaaatgtggagaacaatggggttctgtccttcatcaagcatgtcctttttccccttaagtccgagtttgtgatcctacgagatgagaaatggggtggaaacaaaacctacacagcttacgtggacctggaaaaggactttgctgctgaggttgtacatcctggagacctgaagaattctgttgaagtcgcactgaacaagttgctggatccaatccgggaaaagtttaatacccctgccctgaaaaaactggccagcgctgcctacccagatccctcaaagcagaagccaatggccaaaggccctgccaagaattcagaaccagaggaggtcatcccatcccggctggatatccgtgtggggaaaatcatcactgtggagaagcacccagatgcagacagcctgtatgtagagaagattgacgtgggggaagctgaaccacggactgtggtgagcggcctggtacagttcgtgcccaaggaggaactgcaggacaggctggtagtggtgctgtgcaacctgaaaccccagaagatgagaggagtcgagtcccaaggcatgcttctgtgtgcttctatagaagggataaaccgccaggttgaacctctggaccctccggcaggctctgctcctggtgagcacgtgtttgtgaagggctatgaaaagggccaaccagatgaggagctcaagcccaagaagaaagtcttcgagaagttgcaggctgacttcaaaatttctgaggagtgcatcgcacagtggaagcaaaccaacttcatgaccaagctgggctccatttcctgtaaatcgctgaaaggggggaacattagctagccagcccagcatcttccccccttcttccaccactgagtcatctgctgtctcttcagtctgctccatccatcacccatttacccatctctcaggacacggaagcagcgggtttggactctttattcggtgcagaactcggcaaggggcagcttaccctccccagaacccaggatcatcctgtctggctgcagtgagagaccaacccctaacaagggctgggccacagcagggagtccagccctaccttcttcccttggcagctggagaaatctggtttcaatataactcatttaaaaatttatgccacagtccttataattggaaaaatactggtgcccaggttttcttggagttatccaagcagctgcgcccctagctgggatctggtacctggactaggctaattacagcttctccccaacaggaaactgtgggatttgaaaaggaaagggaagggaaaacagagaacctagtggtctaccaagtggttggcaactttcccaatgtctgcttactctgaggcttggcactgggggccagggcctgccccagggctcctggaatttcccttgatccagctaggctgggacactccctaaatcagctgcgtgttgttagcatcaggcagaatgaatggcagagagtgattctgtcttcatagagggtggggtacttctccataaggcatctcagtcaaatccccatcactgtcataaattcaaataaaatgtctgaacaaggg

SEQ ID NO: 381512 - DNA, 2390 bp, Homo sapiens
ccggggtctttacgttgtatttagctggtccgttcggttttacaattttacaagcggagccatgggggacgctcccagccctgaagagaaactgcaccttatcacccggaacctgcaggaggttctgggggaagagaagctgaaggagatactgaaggagcgggaacttaaaatttactggggaacggcaaccacgggcaaaccacatgtggcttactttgtgcccatgtcaaagattgcagacttcttaaaggcagggtgtgaggtaacaattctgtttgcggacctccacgcatacctggataacatgaaagccccatgggaacttctagaactccgagtcagttactatgagaatgtgatcaaagcaatgctggagagcattggtgtgcccttggagaagctcaagttcatcaaaggcactgattaccagctcagcaaagagtacacactagatgtgtacagactctcctccgtggtcacacagcacgattccaagaaggctggagctgaggtggtaaagcaggtggagcaccctttgctgagtggcctcttataccccggactgcaggctttggatgaagagtatttaaaagtagatgcccaatttggaggcattgatcagagaaagattttcacctttgcagagaagtacctccctgcacttggctattcaaaacgggtccatctgatgaatcctatggttccaggattaacaggcagcaaaatgagctcttcagaagaggagtccaagattgatctccttgatcggaaggaggatgtgaagaaaaaactgaagaaggccttctgtgagccaggaaatgtggagaacaatggggttctgtccttcatcaagcatgtcctttttccccttaagtccgagtttgtgatcctacgagatgagaaatggggtggaaacaaaacctacacagcttacgtggacctggaaaaggactttgctgctgaggttgtacatcctggagacctgaagaattctgttgaagtcgcactgaacaagttgctggatccaatccgggaaaagtttaatacccctgccctgaaaaaactggccagcgctgcctacccagatccctcaaagcagaagccaatggccaaaggccctgccaagaattcagaaccagaggaggtcatcccatcccggctggatatccgtgtggggaaaatcatcactgtggagaagcacccagatgcagacagcctgtatgtagagaagattgacgtgggggaagctgaaccacggactgtggtgagcggcctggtacagttcgtgcccaaggaggaactgcaggacaggctggtagtggtgctgtgcaacctgaaaccccagaagatgagaggagtcgagtcccaaggcatgcttctgtgtgcttctatagaagggataaaccgccaggttgaacctctggaccctccggcaggctctgctcctggtgagcacgtgtttgtgaagggctatgaaaagggccaaccagatgaggagctcaagcccaagaagaaagtcttcgagaagttgcaggctgacttcaaaatttctgaggagtgcatcgcacagtggaagcaaaccaacttcatgaccaagctgggctccatttcctgtaaatcgctgaaaggggggaacattagctagccagcccagcatcttccccccttcttccaccactgagtcatctgctgtctcttcagtctgctccatccatcacccatttacccatctctcaggacacggaagcagcgggtttggactctttattcggtgcagaactcggcaaggggcagcttaccctccccagaacccaggatcatcctgtctggctgcagtgagagaccaacccctaacaagggctgggccacagcagggagtccagccctaccttcttcccttggcagctggagaaatctggtttcaatataactcatttaaaaatttatgccacagtccttataattggaaaaatactggtgcccaggttttcttggagttatccaagcagctgcgcccctagctgggatctggtacctggactaggctaattacagcttctccccaacaggaaactgtgggatttgaaaaggaaagggaagggaaaacagagaacctagtggtctaccaagtggttggcaactttcccaatgtctgcttactctgaggcttggcactgggggccagggcctgccccagggctcctggaatttcccttgatccagctaggctgggacactccctaaatcagctgcgtgttgttagcatcaggcagaatgaatggcagagagtgattctgtcttcatagagggtggggtacttctccataaggcatctcagtcaaatccccatcactgtcataaattcaaataaaatgtctgaacaaggg

SEQ ID NO: 381513 - DNA, 1885 bp, Homo sapiens
gctcctcactttttccggccgctgccggaggggtccaggccgagtaagcggagcgccgagcccagctgatgcaacctggctggactcgcgtgacagttcccggcacgcggcggcgacggtgacccaggaaggggctctggtgccgggctgagcgggggaagcaggggtagcggagccatgggggacgctcccagccctgaagagaaactgcaccttatcacccggaacctgcaggaggttctgggggaagagaagctgaaggagatactgaaggagcgggaacttaaaatttactggggaacggcaaccacgggcaaaccacatgtggcttactttgtgcccatgtcaaagattgcagacttcttaaaggcagggtgtgaggtaacaattctgtttgcggacctccacgcatacctggataacatgaaagccccatgggaacttctagaactccgagtcagttactatgagaatgtgatcaaagcaatgctggagagcattggtgtgcccttggagaagctcaagttcatcaaaggcactgattaccagctcagcaaagagtacacactagatgtgtacagactctcctccgtggtcacacagcacgattccaagaaggctggagctgaggtggtaaagcaggtggagcaccctttgctgagtggcctcttataccccggactgcaggctttggatgaagagtatttaaaagtagatgcccaatttggaggcattgatcagagaaagattttcacctttgcagagaagtacctccctgcacttggctattcaaaacgggtccatctgatgaatcctatggttccaggattaacaggcagcaaaatgagctcttcagaagaggagtccaagattgatctccttgatcggaaggaggatgtgaagaaaaaactgaagaaggccttctgtgagccaggaaatgtggagaacaatggggttctgtccttcatcaagcatgtcctttttccccttaagtccgagtttgtgatcctacgagatgagaaatggggtggaaacaaaacctacacagcttacgtggacctggaaaaggactttgctgctgaggttgtacatcctggagacctgaagaattctgttgaagtcgcactgaacaagttgctggatccaatccgggaaaagtttaatacccctgccctgaaaaaactggccagcgctgcctacccagatccctcaaagcagactcaggcttcagggcagagggaatggatttttagacatatcaaagactcaaaaatttaaagaaatatatatatgtatatatatacttctaacattttatggaaattaaaaatcagaggcttttggtctctccatttactctaggtcaagctcatttaccccagaggacaaagaagggctgcctcttctagaccctcccttctcctttgtcctctgtcccacccagcagggaaacaagctcagaagatcctaacaggatagagttccagtaatgttggaggagggagagggaaagagaagtcaggttctctcccacctccagccattcccaggttgctgccagggcctggtttcatgcagctttgacccagtcctggatcctagggggtggggtagatcaggagctctgagcagaacagtgctcactgattatcctctttccccaactcagtgggcaggtgcagcgtacacccagcagcactctccactgcccacaggcaagggaagaatattgattgattagctacaaggagaagacagtagtgactagtggaaaacaccctggagagggccagaggaacctggctctcaccacatcccctctgttcccagccttggtgagggggcggggaggtcatgtcaacctctctccttggtggtgaagcta

SEQ ID NO: 381514 - DNA, 2273 bp, Homo sapiens
  misc_feature (13)..(13): n is a, c, g, or t
ctgtcagtacccncgattatgtacgaggctgggtggcgcaggaaggggctctggtgccgggctgagcgggggaagcaggggtagcggagccatgggggacgctcccagccctgaagagaaactgcaccttatcacccggaacctgcaggtaacaattctgtttgcggacctccacgcatacctggataacatgaaagccccatgggaacttctagaactccgagtcagttactatgagaatgtgatcaaagcaatgctggagagcattggtgtgcccttggagaagctcaagttcatcaaaggcactgattaccagctcagcaaagagtacacactagatgtgtacagactctcctccgtggtcacacagcacgattccaagaaggctggagctgaggtggtaaagcaggtggagcaccctttgctgagtggcctcttataccccggactgcaggctttggatgaagagtatttaaaagtagatgcccaatttggaggcattgatcagagaaagattttcacctttgcagagaagtacctccctgcacttggctattcaaaacgggtccatctgatgaatcctatggttccaggattaacaggcagcaaaatgagctcttcagaagaggagtccaagattgatctccttgatcggaaggaggatgtgaagaaaaaactgaagaaggccttctgtgagccaggaaatgtggagaacaatggggttctgtccttcatcaagcatgtcctttttccccttaagtccgagtttgtgatcctacgagatgagaaatggggtggaaacaaaacctacacagcttacgtggacctggaaaaggactttgctgctgaggttgtacatcctggagacctgaagaattctgttgaagtcgcactgaacaagttgctggatccaatccgggaaaagtttaatacccctgccctgaaaaaactggccagcgctgcctacccagatccctcaaagcagaagccaatggccaaaggccctgccaagaattcagaaccagaggaggtcatcccatcccggctggatatccgtgtggggaaaatcatcactgtggagaagcacccagatgcagacagcctgtatgtagagaagattgacgtgggggaagctgaaccacggactgtggtgagcggcctggtacagttcgtgcccaaggaggaactgcaggacaggctggtagtggtgctgtgcaacctgaaaccccagaagatgagaggagtcgagtcccaaggcatgcttctgtgtgcttctatagaagggataaaccgccaggttgaacctctggaccctccggcaggctctgctcctggtgagcacgtgtttgtgaagggctatgaaaagggccaaccagatgaggagctcaagcccaagaagaaagtcttcgagaagttgcaggctgacttcaaaatttctgaggagtgcatcgcacagtggaagcaaaccaacttcatgaccaagctgggctccatttcctgtaaatcgctgaaaggggggaacattagctagccagcccagcatcttccccccttcttccaccactgagtcatctgctgtctcttcagtctgctccatccatcacccatttacccatctctcaggacacggaagcagcgggtttggactctttattcggtgcagaactcggcaaggggcagcttaccctccccagaacccaggatcatcctgtctggctgcagtgagagaccaacccctaacaagggctgggccacagcagggagtccagccctaccttcttcccttggcagctggagaaatctggtttcaatataactcatttaaaaatttatgccacagtccttataattggaaaaatactggtgcccaggttttcttggagttatccaagcagctgcgcccctagctgggatctggtacctggactaggctaattacagcttctccccaacaggaaactgtgggatttgaaaaggaaagggaagggaaaacagagaacctagtggtctaccaagtggttggcaactttcccaatgtctgcttactctgaggcttggcactgggggccagggcctgccccagggctcctggaatttcccttgatccagctaggctgggacactccctaaatcagctgcgtgttgttagcatcaggcagaatgaatggcagagagtgattctgtcttcatagagggtggggtacttctccataaggcatctcagtcaaatccccatcactgtcataaattcaaataaaatgtctgaacaaggg

SEQ ID NO: 381515 - DNA, 2145 bp, Homo sapiens
  misc_feature (17)..(17): n is a, c, g, or t
  misc_feature (21)..(21): n is a, c, g, or t
gggccgagtaagcggangtcngagcccagctgatgcaacctggctggactcgcgtgacagttcccggcacgcggcggcgacggtgacccaggaaggggctctggtgccgggctgagcgggggaagcaggggtagcggagccatgggggacgctcccagccctgaagagaaactgcaccttatcacccggaacctgcagagtacacactagatgtgtacagactctcctccgtggtcacacagcacgattccaagaaggctggagctgaggtggtaaagcaggtggagcaccctttgctgagtggcctcttataccccggactgcaggctttggatgaagagtatttaaaagtagatgcccaatttggaggcattgatcagagaaagattttcacctttgcagagaagtacctccctgcacttggctattcaaaacgggtccatctgatgaatcctatggttccaggattaacaggcagcaaaatgagctcttcagaagaggagtccaagattgatctccttgatcggaaggaggatgtgaagaaaaaactgaagaaggccttctgtgagccaggaaatgtggagaacaatggggttctgtccttcatcaagcatgtcctttttccccttaagtccgagtttgtgatcctacgagatgagaaatggggtggaaacaaaacctacacagcttacgtggacctggaaaaggactttgctgctgaggttgtacatcctggagacctgaagaattctgttgaagtcgcactgaacaagttgctggatccaatccgggaaaagtttaatacccctgccctgaaaaaactggccagcgctgcctacccagatccctcaaagcagaagccaatggccaaaggccctgccaagaattcagaaccagaggaggtcatcccatcccggctggatatccgtgtggggaaaatcatcactgtggagaagcacccagatgcagacagcctgtatgtagagaagattgacgtgggggaagctgaaccacggactgtggtgagcggcctggtacagttcgtgcccaaggaggaactgcaggacaggctggtagtggtgctgtgcaacctgaaaccccagaagatgagaggagtcgagtcccaaggcatgcttctgtgtgcttctatagaagggataaaccgccaggttgaacctctggaccctccggcaggctctgctcctggtgagcacgtgtttgtgaagggctatgaaaagggccaaccagatgaggagctcaagcccaagaagaaagtcttcgagaagttgcaggctgacttcaaaatttctgaggagtgcatcgcacagtggaagcaaaccaacttcatgaccaagctgggctccatttcctgtaaatcgctgaaaggggggaacattagctagccagcccagcatcttccccccttcttccaccactgagtcatctgctgtctcttcagtctgctccatccatcacccatttacccatctctcaggacacggaagcagcgggtttggactctttattcggtgcagaactcggcaaggggcagcttaccctccccagaacccaggatcatcctgtctggctgcagtgagagaccaacccctaacaagggctgggccacagcagggagtccagccctaccttcttcccttggcagctggagaaatctggtttcaatataactcatttaaaaatttatgccacagtccttataattggaaaaatactggtgcccaggttttcttggagttatccaagcagctgcgcccctagctgggatctggtacctggactaggctaattacagcttctccccaacaggaaactgtgggatttgaaaaggaaagggaagggaaaacagagaacctagtggtctaccaagtggttggcaactttcccaatgtctgcttactctgaggcttggcactgggggccagggcctgccccagggctcctggaatttcccttgatccagctaggctgggacactccctaaatcagctgcgtgttgttagcatcaggcagaatgaatggcagagagtgattctgtcttcatagagggtggggtacttctccataaggcatctcagtcaaatccccatcactgtcataaattcaaataaaatgtctgaacaaggg

SEQ ID NO: 381516 - DNA, 1754 bp, Homo sapiens
gacatgttgaactagaggaatacaacaaaatagatataagccacaagccttcccctgaagcagctgagatgctagctgggtatacaatagtgccactcatccaatttaagaataataccatacaataaagttcagaatatatggcaaaaactacaaatagtcatgcatgtgggctaggaatagtcatgcatgtgagctaggaatgctgtcaatgagtttgttgacatggatccttttccttatagagtttgtgatcctacgagatgagaaatggggtggaaacaaaacctacacagcttacgtggacctggaaaaggactttgctgctgaggttgtacatcctggagacctgaagaattctgttgaagtcgcactgaacaagttgctggatccaatccgggaaaagtttaatacccctgccctgaaaaaactggccagcgctgcctacccagatccctcaaagcagaagccaatggccaaaggccctgccaagaattcagaaccagaggaggtcatcccatcccggctggatatccgtgtggggaaaatcatcactgtggagaagcacccagatgcagacagcctgtatgtagagaagattgacgtgggggaagctgaaccacggactgtggtgagcggcctggtacagttcgtgcccaaggaggaactgcaggacaggctggtagtggtgctgtgcaacctgaaaccccagaagatgagaggagtcgagtcccaaggcatgcttctgtgtgcttctatagaagggataaaccgccaggttgaacctctggaccctccggcaggctctgctcctggtgagcacgtgtttgtgaagggctatgaaaagggccaaccagatgaggagctcaagcccaagaagaaagtcttcgagaagttgcaggctgacttcaaaatttctgaggagtgcatcgcacagtggaagcaaaccaacttcatgaccaagctgggctccatttcctgtaaatcgctgaaaggggggaacattagctagccagcccagcatcttccccccttcttccaccactgagtcatctgctgtctcttcagtctgctccatccatcacccatttacccatctctcaggacacggaagcagcgggtttggactctttattcggtgcagaactcggcaaggggcagcttaccctccccagaacccaggatcatcctgtctggctgcagtgagagaccaacccctaacaagggctgggccacagcagggagtccagccctaccttcttcccttggcagctggagaaatctggtttcaatataactcatttaaaaatttatgccacagtccttataattggaaaaatactggtgcccaggttttcttggagttatccaagcagctgcgcccctagctgggatctggtacctggactaggctaattacagcttctccccaacaggaaactgtgggatttgaaaaggaaagggaagggaaaacagagaacctagtggtctaccaagtggttggcaactttcccaatgtctgcttactctgaggcttggcactgggggccagggcctgccccagggctcctggaatttcccttgatccagctaggctgggacactccctaaatcagctgcgtgttgttagcatcaggcagaatgaatggcagagagtgattctgtcttcatagagggtggggtacttctccataaggcatctcagtcaaatccccatcactgtcataaattcaaataaaatgtctgaacaaggg

SEQ ID NO: 381517 - DNA, 1171 bp, Homo sapiens
actctgaggatccctgttgactacggggaagctgaaccacggactgtggtgagcggcctggtacagttcgtgcccaaggaggaactgcaggacaggctggtagtggtgctgtgcaacctgaaaccccagaagatgagaggagtcgagtcccaaggcatgcttctgtgtgcttctatagaagggataaaccgccaggttgaacctctggaccctccggcaggctctgctcctggtgagcacgtgtttgtgaagggctatgaaaagggccaaccagatgaggagctcaagcccaagaagaaagtcttcgagaagttgcaggctgacttcaaaatttctgaggagtgcatcgcacagtggaagcaaaccaacttcatgaccaagctgggctccatttcctgtaaatcgctgaaaggggggaacattagctagccagcccagcatcttccccccttcttccaccactgagtcatctgctgtctcttcagtctgctccatccatcacccatttacccatctctcaggacacggaagcagcgggtttggactctttattcggtgcagaactcggcaaggggcagcttaccctccccagaacccaggatcatcctgtctggctgcagtgagagaccaacccctaacaagggctgggccacagcagggagtccagccctaccttcttcccttggcagctggagaaatctggtttcaatataactcatttaaaaatttatgccacagtccttataattggaaaaatactggtgcccaggttttcttggagttatccaagcagctgcgcccctagctgggatctggtacctggactaggctaattacagcttctccccaacaggaaactgtgggatttgaaaaggaaagggaagggaaaacagagaacctagtggtctaccaagtggttggcaactttcccaatgtctgcttactctgaggcttggcactgggggccagggcctgccccagggctcctggaatttcccttgatccagctaggctgggacactccctaaatcagctgcgtgttgttagcatcaggcagaatgaatggcagagagtgattctgtcttcatagagggtggggtacttctccataaggcatctcagtcaaatccccatcactgtcataaattcaaataaaatgtctgaacaaggg

SEQ ID NO: 381518 - DNA, 1380 bp, Homo sapiens
gctcctcactttttccggccgctgccggaggggtccaggccgagtaagcggagcgccgagcccagctgatgcaacctggctggactcgcgtgacagttcccggcacgcggcggcgacggtgacccaggaaggggctctggtgccgggctgagcgggggaagcaggggtagcggagccatgggggacgctcccagccctgaagagaaactgcaccttatcacccggaacctgcaggaggttctgggggaagagaagctgaaggagatactgaaggagcgggaacttaaaatttactggggaacggcaaccacgggcaaaccacatgtggcttactttgtgcccatgtcaaagattgcagacttcttaaaggcagggtgtgaggtaacaattctgtttgcggacctccacgcatacctggataacatgaaagccccatgggaacttctagaactccgagtcagttactatgagaatgtgatcaaagcaatgctggagagcattggtgtgcccttggagaagctcaagttcatcaaaggcactgattaccagctcagcaaagagtacacactagatgtgtacagactctcctccgtggtcacacagcacgattccaagaaggctggagctgaggtggtaaagcaggtggagcaccctttgctgagtggcctcttataccccggactgcaggctttggatgaagagtatttaaaagtagatgcccaatttggaggcattgatcagagaaagattttcacctttgcagagaagtacctccctgcacttggctattcaaaacgggtccatctgatgaatcctatggttccaggattaacaggcagcaaaatgagctcttcagaagaggtaagttgccagctgagacttgaatttagaaatcttcagcctcaatggagagattgaggactgaaaagaacagtgacctggctaactagaattctccaatatttgagttagaaggagccttacaccattcaattagtttagtggttcttgagtatcaaaggatccagagcagtcctgatgagatctaatcataacttaatggtttttgctgctgataaaaaaataaaagcaaaagtaatgtctttgttcatacgactgtgatgaaattcagccttattaatgagagcactatggttgcatttcactaattagcattttgattcctagggtaatacttgatatcactaatattatgatatcttttaatatttaagagtccctcttgagctcgtgtacttgagggaaagttcactttggttctgatcattagaacgtggaaatccaaagatgtgaaaggttgagttctgggttcccaaacatggcttaccttcagaatcatctagggaatttaaaaaaaaa

SEQ ID NO: 381519 - DNA, 1675 bp, Homo sapiens
aaaaaaaaaaaaaaaaaaaaaaaaaagagtaagcggagcgccgagcccagctgatgcaacctggctggactcgcgtgacagttcccggcacgcggcggcgacggtgacccaggaaggggctctggtgccgggctgagcgggggaagcaggggtagcggagccatgggggacgctcccagccctgaagagaaactgcaccttatcacccggaacctgcaggaggttctgggggaagagaagctgaaggagatactgaaggagcgggaacttaaaatttactggggaacggcaaccacgggcaaaccacatgtggcttactttgtgcccatgtcaaagattgcagacttcttaaaggcagggtgtgaggtaacaattctgtttgcggacctccacgcatacctggataacatgaaagccccatgggaacttctagaactccgagtcagttactatgagaatgtgatcaaagcaatgctggagagcattggtgtgcccttggagaagctcaagttcatcaaaggcactgattaccagctcagcaaagagtacacactagatgtgtacagactctcctccgtggtcacacagcacgattccaagaaggctggagctgaggtggtaaagcaggtggagcaccctttgctgagtggcctcttataccccggactgcaggttagaagttcaagccgatgtccaaaaggaaattttccccaaagacacagccagtcttggtgcaattagtgacaacgcaagcactcgtgctatggccggttccataatcagttcctacaacccacaggacaggtttagcatgatccatgcatgactcagcaaagtggattttgtctccacagagaatgcaacaatatggaaatccaagtggacattgaagccaaaccaagccactatcagctggtgagtggaagcagcacggaggactcgctccatgttcatgctcagatggcagagaatgaagaagaaggtagtggtggcggaggcagtgaagaggatcccccctgcagacaccaaagctgtgaacagaaagactgcctggccagcaaaccttgggacatcagcctggcccagcctgaaagcatccgcagtgacctagagagttctgatgcacagtcagacgatgtgccagacatcacctcagatgagtgtggctccccccgctcccatactgcagcctgcccctcgacccccagagcccaaggtgcaccgagcccaagtgcccatatgaacctctctgccctagccgagggacaaactgtcttgaagccagaaggtggagaagccagagtatgaagtggaatgaatgctcctgttctgagaagcacacttgtaactgcatcttttggaatttttttttttttttttccaaggggtagagatttatgtattttatttcacagattctctggtcacaggtttttgcccagggaaattctgagaaattcacaatttcttaccagataaaacatgaaaagtttgccgttagttcccctcccctcccctccctctttttagttttaatttattggttaaactgatggcagcaatccatgaggtgtgtcaaagagtgtacatatgtatgtgtgtatattgaatgctaaacatattactgaaagacacattttaataaagatttctgtcataattcaaaaaaaaaaaa

SEQ ID NO: 381520 - DNA, 1865 bp, Homo sapiens
gactgagttctgctaccactgcaagcagatatggcatccaaatcagacatgcgatatggcccgtcaacagagggcccagactttacgagttcggaccaaacacacttcaggtctcagttatgggcaagaatctggaccagcagatgacatcaagccatgcccacgatgcagtgcatacattatcaagatgaatgatggaagctgtaatcacatgacctgtgcagtgtgtggctgtgaattctgttggctttgtatgaaagagatctcagacttgcattacctcagcccctctggctgtacattctggggcaagaagccatggagccgtaagaagaaaattctttggcagctgggcacgttgattggtgctccagtggggatttctctcattgctggcattgccattcctgccatggtcattggcattcctgtttatgttggaaggaagattcacagcaggtatgagggaaggaaaacctccaaacacaagaggaatttggctatcactggaggagtgactttgtcggtcattgcatccccagttattgctgcagttagtgttggtattggtgtccccattatgctggcatatgtttatggggttgtgcccatttctctttgtcgtggaggcggctgtggagttagcacagccaacggaaaaggagtgaaaattgaatttgatgaagatgatggtccaatcacagtggcagatgcctggagagccctcaagaatcccagcattggggaaagcagcattgaaggcctgactagtgtattgagcactagtggaagccctacagatggacttagtgttatgcaaggtccttacagcgaaacggccagctttgcagccctctcagggggcacgctgagtggcggcattctctccagtggcaagggaaaatatagcaggttagaagttcaagccgatgtccaaaaggaaattttccccaaagacacagccagtcttggtgcaattagtgacaacgcaagcactcgtgctatggccggttccataatcagttcctacaacccacaggacagagaatgcaacaatatggaaatccaagtggacattgaagccaaaccaagccactatcagctggtgagtggaagcagcacggaggactcgctccatgttcatgctcagatggcagagaatgaagaagaaggtagtggtggcggaggcagtgaagaggatcccccctgcagacaccaaagctgtgaacagaaagactgcctggccagcaaaccttgggacatcagcctggcccagcctgaaagcatccgcagtgacctagagagttctgatgcacagtcagacgatgtgccagacatcacctcagatgagtgtggctccccccgctcccatactgcagcctgcccctcgacccccagagcccaaggtgcaccgagcccaagtgcccatatgaacctctctgccctagccgagggacaaactgtcttgaagccagaaggtggagaagccagagtatgaagtggaatgaatgctcctgttctgagaagcacacttgtaactgcatcttttggaatttttttttttttttttccaaggggtagagatttatgtattttatttcacagattctctggtcacaggtttttgcccagggaaattctgagaaattcacaatttcttaccagataaaacatgaaaagtttgccgttagttcccctcccctcccctccctctttttagttttaatttattggttaaactgatggcagcaatccatgaggtgtgtcaaagagtgtacatatgtatgtgtgtatattgaatgctaaacatattactgaaagacacattttaataaagatttctgtcataattcaaaaaaaaaaaa

SEQ ID NO: 381521 - DNA, 904 bp, Homo sapiens
  misc_feature (673)..(673): n is a, c, g, or t
  misc_feature (675)..(675): n is a, c, g, or t
aaaaaaaaaaaaaaaaaaaaaaaaaagagtaagcggagcgccgagcccagctgatgcaacctggctggactcgcgtgacagttcccggcacgcggcggcgacggtgacccaggaaggggctctggtgccgggctgagcgggggaagcaggggtagcggagccatgggggacgctcccagccctgaagagaaactgcaccttatcacccggaacctgcaggaggttctgggggaagagaagctgaaggagatactgaaggagcgggaacttaaaatttactggggaacggcaaccacgggcaaaccacatgtggcttactttgtgcccatgtcaaagattgcagacttcttaaaggcagggtgtgaggtaacaattctgtttgcggacctccacgcatacctggataacatgaaagccccatgggaacttctagaactccgagtcagttactatgagaatgtgatcaaagcaatgctggagagcattggtgtgcccttggagaagctcaagttcatcaaaggcactgattaccagctcagcaaagagtacacactagatgtgtacagactctcctccgtggtcacacagcacgattccaagaaggctggagctgaggtggtaaagcaggctttggatgaagagtatttaaagtagatgccaatttggaggcatngntcagagaaagatttcacctttgcagagaaggtgagtgtctgctctcctgtcttttttcacttgcacctcagaggtatgcagctgtgtttattgaactatgatgtgtcagtcccactagtcatagtgtatggtaatattctaccttgttttgcagatgagaacactgaggatagaagaatacgaagttcgtccttataatcacacagctagttactgagcgaggactagt

SEQ ID NO: 381522 - DNA, 1595 bp, Homo sapiens
gactgagttctgctaccactgcaagcagatatggcatccaaatcagacatgcgatatggcccgtcaacagagggcccagactttacgagttcggaccaaacacacttcaggtctcagttatgggcaagaatctggaccagcagatgacatcaagccatgcccacgatgcagtgcatacattatcaagatgaatgatggaagctgtaatcacatgacctgtgcagtgtgtggctgtgaattctgttggctttgtatgaaagagatctcagacttgcattacctcagcccctctggctgtacattctggggcaagaagccatggagccgtaagaagaaaattctttggcagctgggcacgttgattggtgctccagtggggatttctctcattgctggcattgccattcctgccatggtcattggcattcctgtttatgttggaaggaagattcacagcaggtatgagggaaggaaaacctccaaacacaagaggaatttggctatcactggaggagtgactttgtcggtcattgcatccccagttattgctgcagttagtgttcagtggcagatgcctggagagccctcaagaatcccagcattggggaaagcagcattgaaggcctgactagtgtattgagcactagtggaagccctacagatggacttagtgttatgcaaggtccttacagcgaaacggccagctttgcagccctctcagggggcacgctgagtggcggcattctctccagtggcaagggaaaatatagacagagaatgcaacaatatggaaatccaagtggacattgaagccaaaccaagccactatcagctggtgagtggaagcagcacggaggactcgctccatgttcatgctcagatggcagagaatgaagaagaaggtagtggtggcggaggcagtgaagaggatcccccctgcagacaccaaagctgtgaacagaaagactgcctggccagcaaaccttgggacatcagcctggcccagcctgaaagcatccgcagtgacctagagagttctgatgcacagtcagacgatgtgccagacatcacctcagatgagtgtggctccccccgctcccatactgcagcctgcccctcgacccccagagcccaaggtgcaccgagcccaagtgcccatatgaacctctctgccctagccgagggacaaactgtcttgaagccagaaggtggagaagccagagtatgaagtggaatgaatgctcctgttctgagaagcacacttgtaactgcatcttttggaatttttttttttttttttccaaggggtagagatttatgtattttatttcacagattctctggtcacaggtttttgcccagggaaattctgagaaattcacaatttcttaccagataaaacatgaaaagtttgccgttagttcccctcccctcccctccctctttttagttttaatttattggttaaactgatggcagcaatccatgaggtgtgtcaaagagtgtacatatgtatgtgtgtatattgaatgctaaacatattactgaaagacacattttaataaagatttctgtcataattcaaaaaaaaaaaa

SEQ ID NO: 381523 - DNA, 440 bp, Homo sapiens
gttacatgtgaaaatatctatatccaagggctgggatggacccaaccctcacagcatttctcagtgactttgtggggcattaagacaagtagagccacaagagtcaatttgtttttgctattttgatttaagatacatcgaagcaaattggaatgtggttataatggagcaagttaatactataatgataaaatataatcttcttgaggaaaaggacaaagataaatgaaaagatcattggatgagtcatcagaaaaccaggatcctaggcctgaactgtcatagatctgtgattttatgacactggttgcttgggtactctttcttagcctgactttcctcatttatgaaatgaaaagctgaagtagattacttttctttaaatctcttttaacacaaatattcaacgatttcatgggaaccaacatactcttcactaa

SEQ ID NO: 381524 - DNA, 370 bp, Homo sapiens
gatcagtgagaggcccaggcccctgaggagcctgggctaggtcagtagatgcagtcctctgccatcttacctaaagttttcatcccaaggcccccatcctacatcccgacgcagaccccttctctgttcccctcacaccactgcagcccaggggctccagctcgtcctctctgccccgtccacctgaccaccctcctaaccatgcagacttccctcagcaccccatgtgcccttcccaggctgccctgcaccccatgccccttgggccctggtgcatcttcatgcagcaactatgggcccccagctagagcctcagccccttcttctgtccatcccatggtcctgggctctgggggccattctggccact

SEQ ID NO: 381525 - DNA, 316 bp, Homo sapiens
atctagtctgataatctctcctttaattgatgtgtttagatcagggttggcaaactatggctggcaggttaaatctggcctgccacctgtttatgtaaataaaattttattggaacacagccatgcccccatgccaaccagtggtttagaccatttgcacttaatgtaattttgatatagttgaatgaaactgtgccatcttactatttgttttctgttggctggtgttgtttcttttttccttgattatctgcctgtttttggatggattattttttatgattctattttatctttcctgttggtttgtaactta

SEQ ID NO: 381526 - DNA, 574 bp, Homo sapiens
  misc_feature (574)..(574): n is a, c, g, or t
catgcctcatcctcccaagtaggtgggattacaggtgcccaccaccaagccctgcaaatttttttgtatttttagtagagacagtgttttaccatgttggccaggctggtctcgaactcctgacatcaggtgatccacctgcctcggcctcccaaagtgctgggattacaggtgtgagccaccacgccctgcctactctttgttttctttcctccccacccattttcccccgtcctgtcccctccttccagcctgagatgtaggctccaccttaactgtgctcagatacacaagtgagggctttttaacttgattatgccttttaaaaatactatgtatgtaaaatatttattcatctgcaatttggcttccctaacttaacattgcatcatgaaactctttggaacaacagctatctagatagctgactcattcttttggattgctacgtaatctcacttaatacagatgtatcatgattgattgaatcattgccttgttgatgggccttcagattatttccagttttttgccactgcaaacaataaacatccttgtacatactaaaaaaaan

SEQ ID NO: 381527 - DNA, 2105 bp, Homo sapiens
cagttgttgtcaactttttattattacatatagcacatagtgggaatatttggttgaaagtaaattagaaataaaaaagggggaaagtaggaagaaaaatcccctcctccaggtctgaaaatcagacaaaaatccttaaaacttgtagccttgccatgctacaccacatctgccaatacatgaaactgacccattagtgctctgctggatcagcctgcccaggcactgctgcctgctggggctgctgtcatcctctggccgctcctccaaagagggacaatgggttttactcagggctaccactgttgctcctgactggggccaccatggtgcccaggcttcaggcacagggccctgcctccttccccgcaccgccctccaggtggtccacctcgtggctgtcagttcctgttggacctggagctgctccggcttcctgtgtgtggtaggggagcttcagtgtgctatgctcttaagagagcggccctcagagctactgagggaccccagacacacatggtgtgaccagtatggaggaggccaggatgctcttcctctcttaatgcaagctggggcggcggcagccttgttcaggtcttggcaccttgtctcaatggatcaccttgagatggctgccgaccaaaacccttgtcttcctgtcatacggatggccaattacatttattcagtgtacaaactatacataaagctctctagaagctacagaattaccatttcttgtgtatcatcttagaacttttatacagatgagatcatcctttccaaatgtttttgccctgatctgcctctttctaataactatcaagtgtcacacaatagggtccccctaagggtcacagaggcttccagggttttggttcctatcaagaacaatgctgcagtgaacattcttaaacacatctttgagcacatgtgtgtacacatccctatgacaaattccccgagtcagatgggtgagtcaagggaatcaagtgcaatctatttggaacctccctgtggcacctcatgtttattcttgtattggtcttgtcctgttttagttggtcgaggactaattctgagaacttgctaattctgctttctaacttatcatctgtaattgcaatcagcttcttgtatttgtcctcatctgtgttacagaccgagctgagcacagagccctaggacctgtcactgtcactagagacctcccttcagcttccagaaccacttggagggaccaggaagtctgtgactgtgccacgtggcaccatgaagtccccatcctcctggacccaaatgcctggtatgaacttgcctttgctgaggtcccccagacttcagagctgctgcctgcaaggggcctgctgagtctactcccaggcactacgcctaactgtcctccttgaagcgccaccctctatgccatgcgcctagccctcccaagatgggctaggagaggactcctgcttcccccgctcctcctctggctgatccctggggaaaacacacatggacacttagggacaggagcatcagtgctgcccacctgacccccagggagcaggaggcttcagcccgcccccatctgctgctgagggctcaggtagccatttctctcataagccttgacagctggggatgtgcttccagtcttttgctcagctgcaggggttaccagggaagtggaggcaggagaggcaggagggctcaggggcaacaagcagacaatcgggggagtcaggcagacctgggttcaatcccagctccactgctcactaatgtgggaccttaaatgtgtgtctgcccctttctgagcctcaggaccctcagcataaaacggagacagtaagagaatctacctcacagggatgttgagagaattcagccaattcctgcatgggaaacatttcgcataacacccttcgtgggacggctgggggcgaccaggggagggggccataccatgagccaggccagagagggcctatgtcaagacagatcctgctggctcaaacacactgagaagctagggaccccctttcaccagcagctttgcgtggtccatggctggctgtcagtaagttagctattttttttttttt

SEQ ID NO: 381528 - DNA, 400 bp, Homo sapiens
ctcggggaagggctctgggccccacctgaggaacagagcagatgttgcttgcaagtggcttcctgtttcatggagcatttccgcctgtaaaatggcatctgaaaagaccgagctgagcacagagccctaggacctgtcactgtcactagagacctcccttcagcttccagaaccacttggagggaccaggaagtctgtgactgtgccacgtggcaccatgaagtccccatcctcctggacccaaatgcctgttcacagacctcttgaattccatccatggaccctggccaccccttgtgtcacatttccttaagaaaccactgctaatccggtccagactgttgagggaggaagaaactcaaatggtatccaaactcaggacacactgccacatgtgtgc

SEQ ID NO: 381529 - DNA, 558 bp, Homo sapiens
cccattcctaattttataaaccacattcaaacctgttaattcgctgttatcattctcattttgccatttagattttaaaatgaagagcagtgttttgttagaaaaaacaaaatgtttaccataacaagaaagatgtgtagacaagaaagatatttatgtagactctttgtttgttaaattttgaagccaggtgatgcattgttagctttgacaactgacttaaatttttgtataattatttatctttgcattttgctcaggtaaattatcttcccagagtctagaaataaagatatccctgatcctgtttaagagcataaataatactctcaatgtaaattgttttgaaataagatcttaaaaatacaaaatgtagacaattaatattcaggtgcttacttttgagccaatatgtagcagagaaaaactaatttctctgtggcagtatttttatttttggcatttcccaggaattaactgaagactaaaactcatatgtgaagtgtaatgatactaatcaaagagtcagtaaaatttccatttggctaccatgtatgt

SEQ ID NO: 381530 - DNA, 616 bp, Homo sapiens
atcattgctagaagctgactaattatgagaagagaagtgaaggccttgaaatgcctctctctgcacatctggcctcactgtcaaataaagtacttatttctgataagctctttggcttctgtgaagccgcctggccgtgtctggccgtgggcggtgctgataatgaaccgaacagagaacacagacttggcggggaaggtggggacccagtgggtagaaagaatgggctttttagaccatttcaaagtaacaagaaagctttgagagtgcttagtgatgtctgctaccacattcatttcctctgtttccattgaaattgaagttctagatggactgaacctgactaagaaaagggaatgtggacaggaaagctaatgacaaatgcaactggcttatttctggagtgctttgtactctcagagtcttgtgccctgaactttcttcatctggactctaggggcacttaagcaattagcatgccacaagctgggtgctgtggaaagatcatagactttagaaactgtccaagaaactagtgggactccacaccttgtgagttgtgtatccttgtcaagtttaatttaccatgttgagcctcagtttcctcacctaagag

SEQ ID NO: 381531 - DNA, 1209 bp, Homo sapiens
taactccagtcagaaacaactagaagccattaaacaactacaggaagatgctgtcaaccaggaaggcatccttaggaagaggctccaagaaaccagccaacggctggaggatgtggaggagcaggtagggtggctcatggctacattagattcaggggacatctcctcagatgccctgcaaaccatgaaataaaaatggaggaggaacaacaacaacaaacaaaaaaaaaaagcaaagaggaactgcaagttcagtccctagcgactaacagtgagcagaggaagtaaagggggagttgtaagagaggcggtatcaacagcctgctgatgaaagaggcgactctgcagaaagaggcaacttgacatatcaggactttaaccgctgtagaaatagctcaggcataccaagcccatgcaaacacagaattgcagaagttcaggagaggcttatcacttccctgagaagaaaaacacattttcagttttgcctgcatcataagagtgagcactccattgctttctttcctggccacactgctacaatccagcactaactatccatgtccagggtaaggatcgagatcgagaagcccacactgccagtgaaaaagctacgtctttactgcataaattagaggaagcaatttcggaacaacggaaccttcaaactataaatactgaattatcgaacacttgccaggcacttcagcagaagacaaggaaactgaagaagctttttagatgaggaatttcctcactatgattccctgtcctgcgcagatgcaattcaacaacctcttcaagaaaaattgaagcagtgttgccacaaactatatggtggtcaagaagcaagaatacatcagacacccctgaccttgaaacatacgtgctggtacacacctctgctggagacaaggtttctccatgttgcccaggctggtcttgaactcctggactcaagtgatcctcccatctcagccgcccaacatgctgggattacaggtgcccaggccccacaagtggccccagcccaggaacgaatctctcaggctgcatcaggatgaatgatgacccaagtatggaacagagactggtgttgaacgcgtgtgtcctgagagcctgttgcatccaggaatattcctcataccattaccagaacacattcatcgcaaaggtacttacttcagtgactggatacacttcggattg

SEQ ID NO: 381532 - DNA, 2890 bp, Homo sapiens
taactccagtcagaaacaactagaagccattaaacaactacaggaagatgctgtcaaccaggaaggcatccttaggaagaggctccaagaaaccagccaacggctggaggatgtggaggagcaggtagggtggctcatggctacattagattcaggggacatctcctcagatgccctgcaaaccatgaaataaaaatggaggaggaacaacaacaacaaacaaaaaaaaaaagcaaagaggaactgcaagttcagtccctagcgactaacagtgagcagaggaagtaaagggggagttgtaagagaggcggtatcaacagcctgctgatgaaagaggcgactctgcagaaagaggcaacttgacatatcaggactttaaccgctgtagaaatagctcaggcataccaagcccatgcaaacacagaattgcagaagttcaggagaggcttatcacttccctgagaagaaaaacacattttcagttttgcctgcatcataagagtgagcactccattgctttctttcctggccacactgctacaatccagcactaactatccatgtccagggtaaggatcgagatcgagaagcccacactgccagtgaaaaagctacgtctttactgcataaattagaggaagcaatttcggaacaacggaaccttcaaactataaatactgaattatcgaacacttgccaggcacttcagcagaagacaaggaaactgaagaagctttttagatgaggaatttcctcactatgattccctgtcctgcgcagatgcaattcaacaacctcttcaagaaaaattgaagcagtgttgccacaaactatatggtggtcaagaagcaagaatacatcagacacccctgaccttgaaacatacgtgctggtacacacctctgctggatgccttatctctggatagttttacagcagttccaaccctggaatcaacacctttctcaggtgtagccaaccaaatccacactctgtgtgaaaggcccacatatggagaagtaaaggatggtgctttggatgtaaaaagacaacacaagtgcccaggccccacaagtggccccagcccaggaacgaatctctcaggctgcatcaggatgaatgatgacccaagtatggaagagaatggtgttgaacgcgtgtgtcctgagagcctgctgcagtccagggaatattcctcactaccattacccagacacacttcatcgacagacggtactataacttcaagtgatcctggattagaaattctgaatatggcttcttgtgaccttgacagaaactcgctctgtaagaaagaggaggatacaagatcagcttctcccacgatagaggcccaaggcacaagtccagctcatgataatattgcattccaagactctacgagtaaggataaaaccatattaaatctggaagccaaagaggaaccagaaacaatagaagaacataaaaaagaacatgcttcaggagactctgtggtttcccctcttcctgtaaccactgtgaaatcggttaacgttagacaaagtgagaacacttctgctaatgagaaggaggtggaggcagaatttctcagattatctttgggatttaagtgtgactggtttaccttggagaagagagtgaagcttgaagagaggtcccgtgacttggcagaagaaaatttgaagaaagaaatcactaactctttaaaactattagagtctttaacacctctgtgtgaagatgacaaccaggcacaggaaatcattaagaagctggagaagagtataaagtttcttagccagtgtgcagcacgagtggccagtagggctgagatgttgggagccatcaatcaggaaagccgggttagtaaagcagttgaagtgatgattcagcacgtagaaaacttgaagaggatgtatgccaaagagcacgctgaattagaagaactgaaacaggttcttctgcagaatgaaaggtctttcaatcctcttgaagatgatgatgactgccaaattaaaaaacgttcagcttctctaaactccaagccatcttctctacgaagagtgactattgcctctttacccagaaatattggaaatgcaggaatggtggctgggatggaaaataatgatcgattcagtagaaggtcaagcagttggcgtattttggggtcaaagcagagtgaacaccgtccctcattacctcgatttattagcacctattcctgggcagatgctgaagaagaaaaatgtgaactaaaaactaaagatgactcagagccatctggagaagaaacagtagaaaggacaaggaagccaagtctttctgaaaagaaaaataatccatcaaagtgggatgtctcttcagtttatgacacaatagcttcctgggcaacaaatctcaagtcctccatcagaaaggctaataaggccctctggctctctattgcattcattgtactgtttgcagctttgatgagcttcctcacaggccaattattccagaagtctgtggatgccgctcccacacagcaagaggactcatggacgtctctagaacatatcttgtggccatttaccagactccgacacaatgggccaccaccagtgtgacagcaggacatcctaatatatggatcttgatttttaagtttcagtatctgaacttcgtaaattagtaacttttagctgggaaagtatagcatgaaaccagaggttctcagaatgactgtaagatagcttacatttcctctttttgcctttatctccccaactaaaatacaatggggaagaagtctgcctatgatctttgaatgagctttttaaggaagaaatattatatattgtttgttaaagtttattgaaataaagaatcatttaaatcttca

SEQ ID NO: 381533 - DNA, 2711 bp, Homo sapiens
tatattggcagttattgagggtaaagcaatatattgtaacagaatgtataaatatttttgataaaacagtctatattttattaaaaaatgaattataacccattttcagttttgcctgcatcataagagtgagcactccattgctttctttcctggccacactgctacaatccagcactaactatccatgtccagggtaaggatcgagatcgagaagcccacactgccagtgaaaaagctacgtctttactgcataaattagaggaagcaatttcggaacaacggaaccttcaaactataaatactgaattatcgaacacttgccaggcacttcagcagaagacaaggaaactgaagaagctttttagatgaggaatttcctcactatgattccctgtcctgcgcagatgcaattcaacaacctcttcaagaaaaattgaagcagtgttgccacaaactatatggtggtcaagaagcaagaatacatcagacacccctgaccttgaaacatacgtgctggtacacacctctgctggatgccttatctctggatagttttacagcagttccaaccctggaatcaacacctttctcaggtgtagccaaccaaatccacactctgtgtgaaaggcccacatatggagaagtaaaggatggtgctttggatgtaaaaagacaacacaagtgcccaggccccacaagtggccccagcccaggaacgaatctctcaggctgcatcaggatgaatgatgacccaagtatggaagagaatggtgttgaacgcgtgtgtcctgagagcctgctgcagtccagggaatattcctcactaccattacccagacacacttcatcgacagacggtactataacttcaagtgatcctggattagaaattctgaatatggcttcttgtgaccttgacagaaactcgctctgtaagaaagaggaggatacaagatcagcttctcccacgatagaggcccaaggcacaagtccagctcatgataatattgcattccaagactctacgagtaaggataaaaccatattaaatctggaagccaaagaggaaccagaaacaatagaagaacataaaaaagaacatgcttcaggagactctgtggtttcccctcttcctgtaaccactgtgaaatcggttaacgttagacaaagtgagaacacttctgctaatgagaaggaggtggaggcagaatttctcagattatctttgggatttaagtgtgactggtttaccttggagaagagagtgaagcttgaagagaggtcccgtgacttggcagaagaaaatttgaagaaagaaatcactaactctttaaaactattagagtctttaacacctctgtgtgaagatgacaaccaggcacaggaaatcattaagaagctggagaagagtataaagtttcttagccagtgtgcagcacgagtggccagtagggctgagatgttgggagccatcaatcaggaaagccgggttagtaaagcagttgaagtgatgattcagcacgtagaaaacttgaagaggatgtatgccaaagagcacgctgaattagaagaactgaaacaggttcttctgcagaatgaaaggtctttcaatcctcttgaagatgatgatgactgccaaattaaaaaacgttcagcttctctaaactccaagccatcttctctacgaagagtgactattgcctctttacccagaaatattggaaatgcaggaatggtggctgggatggaaaataatgatcgattcagtagaaggtcaagcagttggcgtattttggggtcaaagcagagtgaacaccgtccctcattacctcgatttattagcacctattcctgggcagatgctgaagaagaaaaatgtgaactaaaaactaaagatgactcagagccatctggagaagaaacagtagaaaggacaaggaagccaagtctttctgaaaagaaaaataatccatcaaagtgggatgtctcttcagtttatgacacaatagcttcctgggcaacaaatctcaagtcctccatcagaaaggctaataaggccctctggctctctattgcattcattgtactgtttgcagctttgatgagcttcctcacaggccaattattccagaagtctgtggatgccgctcccacacagcaagaggactcatggacgtctctagaacatatcttgtggccatttaccagactccgacacaatgggccaccaccagtgtgacagcaggacatcctaatatatggatcttgatttttaagtttcagtatctgaacttcgtaaattagtaacttttagctgggaaagtatagcatgaaaccagaggttctcagaatgactgtaagatagcttacatttcctctttttgcctttatctccccaactaaaatacaatggggaagaagtctgcctatgatctttgaatgagctttttaaggaagaaatattatatattgtttgttaaagtttattgaaataaagaatcatttaaatcttcaaaaggagcaaagaagaaaagaagaagaagagaagagaggggaaaaaaaaggaaaaagcagaagaaaaccggaagagaaggaagaaggagaaaagagggagaagggagaggaggaggggagagaaggaagaaggggagaggagaggacggaggaggagagaggagagaaaggagtaaaaaagataacaaaagagg

SEQ ID NO: 381534 - DNA, 2980 bp, Homo sapiens
tatattggcagttattgagggtaaagcaatatattgtaacagaatgtataaatatttttgataaaacagtctatattttattaaaaaatgaattataacccattttcagttttgcctgcatcataagagtgagcactccattgctttctttcctggccacactgctacaatccagcactaactatccatgtccagggtaaggatcgagatcgagaagcccacactgccagtgaaaaagctacgtctttactgcataaattagaggaagcaatttcggaacaacggaaccttcaaactataaatactgaattatcgaacacttgccaggcacttcagcagaagacaaggaaactgaagaagctttttagatgaggaatttcctcactatgattccctgtcctgcgcagatgcaattcaacaacctcttcaagaaaaattgaagcagtgttgccacaaactatatggtggtcaagaagcaagaatacatcagacacccctgaccttgaaacatacgtgctggtacacacctctgctggatgccttatctctggatagttttacagcagttccaaccctggaatcaacacctttctcaggtgtagccaaccaaatccacactctgtgtgaaaggcccacatatggagaagtaaaggatggtgctttggatgtaaaaagacaacacaagtgcccaggccccacaagtggccccagcccaggaacgaatctctcaggctgcatcaggatgaatgatgacccaagtatggaagagaatggtgttgaacgcgtgtgtcctgagagcctgctgcagtccagggaatattcctcactaccattacccagacacacttcatcgacagacggtactataacttcaagtgatcctggattagaaattctgaatatggcttcttgtgaccttgacagaaactcgctctgtaagaaagaggaggatacaagatcagcttctcccacgatagaggcccaaggcacaagtccagctcatgataatattgcattccaagactctacgagtaaggataaaaccatattaaatctggaagccaaagaggaaccagaaacaatagaagaacataaaaaagaacatgcttcaggagactctgtggtttcccctcttcctgtaaccactgtgaaatcggttaacgttagacaaagtgagaacacttctgctaatgagaaggaggtggaggcagaatttctcagattatctttgggatttaagtgtgactggtttaccttggagaagagagtgaagcttgaagagaggtcccgtgacttggcagaagaaaatttgaagaaagaaatcactaactctttaaaactattagagtctttaacacctctgtgtgaagatgacaaccaggcacaggaaatcattaagaagctggagaagagtataaagtttcttagccagtgtgcagcacgagtggccagtagggctgagatgttgggagccatcaatcaggaaagccgggttagtaaagcagttgaagtgatgattcagcacgtagaaaacttgaagaggatgtatgccaaagagcacgctgaattagaagaactgaaacaggttcttctgcagaatgaaaggtctttcaatcctcttgaagatgatgatgactgccaaattaaaaaacgttcagcttctctaaactccaagccatcttctctacgaagagtgactattgcctctttacccagaaatattggaaatgcaggaatggtggctgggatggaaaataatgatcgattcagtagaaggtcaagcagttggcgtattttggggtcaaagcagagtgaacaccgtccctcattacctcgatttattagcacctattcctgggcagatgctgaagaagaaaaatgtgaactaaaaactaaagatgactcagagccatctggagaagaaacagtagaaaggacaaggaagccaagtctttctgaaaagaaaaataatccatcaaagtgggatgtctcttcagtttatgacacaatagcttcctgggcaacaaatctcaagtcctccatcagaaaggctaataaggccctctggctctctattgcattcattgtactgtttgcagctttgatgagcttcctcacaggccaattattccagaagtctgtggatgccgctcccacacagcaagaggactcatggacgtctctagaacatatcttgtggccatttaccagactccgacacaatgggccaccaccagtgtgacagcaggacatcctaatatatggatcttgatttttaagtttcagtatctgaacttcgtaaattagtaacttttagctgggaaagtatagcatgaaaccagaggttctcagaatgactgtaagatagcttacatttcctctttttgcctttatctccccaactaaaatacaatggggaagaagtctgcctatgatctttgaatgagctttttaaggaagaaatattatatattgtttgttaaagtttattgaaataaagaatcatttaaatcttcatagagtgaaagctgaaattcttaacaggccaagtattcaaaggaaaaaaaaatactgtttttaaaataaaacttgagtagaaaatgcagattagaaaatttttaatagttgatttgaaatgtattcattcactcattacattgtgttgcagaaatacctgtctttcaccatgcttggttcttcatacttacaatacagtttgtaagtggaggttaggagtagctgagcaatctggtagagagcagcatgtggcacacagagttgacaaactgacagttggaactcctgactttctccattgcttcctcagaagcaaaatccttcaccatgtgatataaagtagaatgaaactcagtttcttctttaagtgcttcagaaaatgcctcactctcttccttgatcttcagtctttgtgctctgtcaccactaaacattaaaagggcccaattaggattctcagtac

SEQ ID NO: 381535 - DNA, 3083 bp, Homo sapiens
taactccagtcagaaacaactagaagccattaaacaactacaggaagatgctgtcaaccaggaaggcatccttaggaagaggctccaagaaaccagccaacggctggaggatgtggaggagcaggtagggtggctcatggctacattagattcaggggacatctcctcagatgccctgcaaaccatgaaataaaaatggaggaggaacaacaacaacaaacaaaaaaaaaaagcaaagaggaactgcaagttcagtccctagcgactaacagtgagcagaggaagtaaagggggagttgtaagagaggcggtatcaacagcctgctgatgaaagaggcgactctgcagaaagaggcaacttgacatatcaggactttaaccgctgtagaaatagctcaggcataccaagcccatgcaaacacagaattgcagaagttcaggagaggcttatcacttccctgagaagaaaaacacattttcagttttgcctgcatcataagagtgagcactccattgctttctttcctggccacactgctacaatccagcactaactatccatgtccagggtaaggatcgagatcgagaagcccacactgccagtgaaaaagctacgtctttactgcataaattagaggaagcaatttcggaacaacggaaccttcaaactataaatactgaattatcgaacacttgccaggcacttcagcagaagacaaggaaactgaagaagctttttagatgaggaatttcctcactatgattccctgtcctgcgcagatgcaattcaacaacctcttcaagaaaaattgaagcagtgttgccacaaactatatggtggtcaagaagcaagaatacatcagacacccctgaccttgaaacatacgtgctggtacacacctctgctggatgccttatctctggatagttttacagcagttccaaccctggaatcaacacctttctcaggtgtagccaaccaaatccacactctgtgtgaaaggcccacatatggagaagtaaaggatggtgctttggatgtaaaaagacaacacaagtgcccaggccccacaagtggccccagcccaggaacgaatctctcaggctgcatcaggatgaatgatgacccaagtatggaagagaatggtgttgaacgcgtgtgtcctgagagcctgctgcagtccagggaatattcctcactaccattacccagacacacttcatcgacagacggtactataacttcaagtggtaagtggatttggaaataatattaaaatagactgttagtattacagctttcagcctgatgttctgtgacctgctggggtgtgagcaaatgagaagaacataggcaaatactccttttgcatagtatagttaaatacactatatataatattatgtgcatagtattcgcaccatttgtttctcctgttgacagatcctggattagaaattctgaatatggcttcttgtgaccttgacagaaactcgctctgtaagaaagaggaggatacaagatcagcttctcccacgatagaggcccaaggcacaagtccagctcatgataatattgcattccaagactctacgagtaaggataaaaccatattaaatctggaagccaaagaggaaccagaaacaatagaagaacataaaaaagaacatgcttcaggagactctgtggtttcccctcttcctgtaaccactgtgaaatcggttaacgttagacaaagtgagaacacttctgctaatgagaaggaggtggaggcagaatttctcagattatctttgggatttaagtgtgactggtttaccttggagaagagagtgaagcttgaagagaggtcccgtgacttggcagaagaaaatttgaagaaagaaatcactaactctttaaaactattagagtctttaacacctctgtgtgaagatgacaaccaggcacaggaaatcattaagaagctggagaagagtataaagtttcttagccagtgtgcagcacgagtggccagtagggctgagatgttgggagccatcaatcaggaaagccgggttagtaaagcagttgaagtgatgattcagcacgtagaaaacttgaagaggatgtatgccaaagagcacgctgaattagaagaactgaaacaggttcttctgcagaatgaaaggtctttcaatcctcttgaagatgatgatgactgccaaattaaaaaacgttcagcttctctaaactccaagccatcttctctacgaagagtgactattgcctctttacccagaaatattggaaatgcaggaatggtggctgggatggaaaataatgatcgattcagtagaaggtcaagcagttggcgtattttggggtcaaagcagagtgaacaccgtccctcattacctcgatttattagcacctattcctgggcagatgctgaagaagaaaaatgtgaactaaaaactaaagatgactcagagccatctggagaagaaacagtagaaaggacaaggaagccaagtctttctgaaaagaaaaataatccatcaaagtgggatgtctcttcagtttatgacacaatagcttcctgggcaacaaatctcaagtcctccatcagaaaggctaataaggccctctggctctctattgcattcattgtactgtttgcagctttgatgagcttcctcacaggccaattattccagaagtctgtggatgccgctcccacacagcaagaggactcatggacgtctctagaacatatcttgtggccatttaccagactccgacacaatgggccaccaccagtgtgacagcaggacatcctaatatatggatcttgatttttaagtttcagtatctgaacttcgtaaattagtaacttttagctgggaaagtatagcatgaaaccagaggttctcagaatgactgtaagatagcttacatttcctctttttgcctttatctccccaactaaaatacaatggggaagaagtctgcctatgatctttgaatgagctttttaaggaagaaatattatatattgtttgttaaagtttattgaaataaagaatcatttaaatcttca

SEQ ID NO: 381536 - DNA, 2952 bp, Homo sapiens
taactccagtcagaaacaactagaagccattaaacaactacaggaagatgctgtcaaccaggaaggcatccttaggaagaggctccaagaaaccagccaacggctggaggatgtggaggagcaggtagggtggctcatggctacattagattcaggggacatctcctcagatgccctgcaaaccatgaaataaaaatggaggaggaacaacaacaacaaacaaaaaaaaaaagcaaagaggaactgcaagttcagtccctagcgactaacagtgagcagaggaagtaaagggggagttgtaagagaggcggtatcaacagcctgctgatgaaagaggcgactctgcagaaagaggcaacttgacatatcaggactttaaccgctgtagaaatagctcaggcataccaagcccatgcaaacacagaattgcagaagttcaggagaggcttatcacttccctgagaagaaaaacacattttcagttttgcctgcatcataagagtgagcactccattgctttctttcctggccacactgctacaatccagcactaactatccatgtccagggtaaggatcgagatcgagaagcccacactgccagtgaaaaagctacgtctttactgcataaattagaggaagcaatttcggaacaacggaaccttcaaactataaatactgaattatcgaacacttgccaggcacttcagcagaagacaaggaaactgaagacaacaattgagtcacttcaaaaggagttcattgaaggggaacaccatggcttgctgtttcagagctttttagatgaggaatttcctcactatgattccctgtcctgcgcagatgcaattcaacaacctcttcaagaaaaattgaagcagtgttgccacaaactatatggtggtcaagaagcaagaatacatcagacacccctgaccttgaaacatacgtgctggtacacacctctgctggatgccttatctctggatagttttacagcagttccaaccctggaatcaacacctttctcaggtgtagccaaccaaatccacactctgtgtgaaaggcccacatatggagaagtaaaggatggtgctttggatgtaaaaagacaacacaagtgcccaggccccacaagtggccccagcccaggaacgaatctctcaggctgcatcaggatgaatgatgacccaagtatggaagagaatggtgttgaacgcgtgtgtcctgagagcctgctgcagtccagggaatattcctcactaccattacccagacacacttcatcgacagacggtactataacttcaagtgatcctggattagaaattctgaatatggcttcttgtgaccttgacagaaactcgctctgtaagaaagaggaggatacaagatcagcttctcccacgatagaggcccaaggcacaagtccagctcatgataatattgcattccaagactctacgagtaaggataaaaccatattaaatctggaagccaaagaggaaccagaaacaatagaagaacataaaaaagaacatgcttcaggagactctgtggtttcccctcttcctgtaaccactgtgaaatcggttaacgttagacaaagtgagaacacttctgctaatgagaaggaggtggaggcagaatttctcagattatctttgggatttaagtgtgactggtttaccttggagaagagagtgaagcttgaagagaggtcccgtgacttggcagaagaaaatttgaagaaagaaatcactaactctttaaaactattagagtctttaacacctctgtgtgaagatgacaaccaggcacaggaaatcattaagaagctggagaagagtataaagtttcttagccagtgtgcagcacgagtggccagtagggctgagatgttgggagccatcaatcaggaaagccgggttagtaaagcagttgaagtgatgattcagcacgtagaaaacttgaagaggatgtatgccaaagagcacgctgaattagaagaactgaaacaggttcttctgcagaatgaaaggtctttcaatcctcttgaagatgatgatgactgccaaattaaaaaacgttcagcttctctaaactccaagccatcttctctacgaagagtgactattgcctctttacccagaaatattggaaatgcaggaatggtggctgggatggaaaataatgatcgattcagtagaaggtcaagcagttggcgtattttggggtcaaagcagagtgaacaccgtccctcattacctcgatttattagcacctattcctgggcagatgctgaagaagaaaaatgtgaactaaaaactaaagatgactcagagccatctggagaagaaacagtagaaaggacaaggaagccaagtctttctgaaaagaaaaataatccatcaaagtgggatgtctcttcagtttatgacacaatagcttcctgggcaacaaatctcaagtcctccatcagaaaggctaataaggccctctggctctctattgcattcattgtactgtttgcagctttgatgagcttcctcacaggccaattattccagaagtctgtggatgccgctcccacacagcaagaggactcatggacgtctctagaacatatcttgtggccatttaccagactccgacacaatgggccaccaccagtgtgacagcaggacatcctaatatatggatcttgatttttaagtttcagtatctgaacttcgtaaattagtaacttttagctgggaaagtatagcatgaaaccagaggttctcagaatgactgtaagatagcttacatttcctctttttgcctttatctccccaactaaaatacaatggggaagaagtctgcctatgatctttgaatgagctttttaaggaagaaatattatatattgtttgttaaagtttattgaaataaagaatcatttaaatcttca

SEQ ID NO: 381537 - DNA, 2788 bp, Homo sapiens
taactccagtcagaaacaactagaagccattaaacaactacaggaagatgctgtcaaccaggaaggcatccttaggaagaggctccaagaaaccagccaacggctggaggatgtggaggagcaggtagggtggctcatggctacattagattcaggggacatctcctcagatgccctgcaaaccatgaaataaaaatggaggaggaacaacaacaacaaacaaaaaaaaaaagcaaagaggaactgcaagttcagtccctagcgactaacagtgagcagaggaagtaaagggggagttgtaagagaggcggtatcaacagcctgctgatgaaagaggcgactctgcagaaagaggcaacttgacatatcaggactttaaccgctgtagaaatagctcaggcataccaagcccatgcaaacacagaattgcagaagttcaggagaggcttatcacttccctgagaagaaaaacacattttcagttttgcctgcatcataagagtgagcactccattgctttctttcctggccacactgctacaatccagcactaactatccatgtccagggtaaggatcgagatcgagaagcccacactgccagtgaaaaagctacgtctttactgcataaattagaggaagcaatttcggaacaacggaaccttcaaactataaatactgaattatcgaacacttgccaggcacttcagcagaagacaaggaaactgaagaagctttttagatgaggaatttcctcactatgattccctgtcctgcgcagatgcaattcaacaacctcttcaagaaaaattgaagcagtgttgccacaaactatatggtggtcaagaagcaagaatacatcagacacccctgaccttgaaacatacgtgctggtacacacctctgctggatgccttatctctggatagttttacagcagttccaaccctggaatcaacacctttctcaggtgtagccaaccaaatccacactctgtgtgaaaggcccacatatggagaagtaaaggatggtgctttggatgtaaaaagacaacacaagtgcccaggccccacaagtggccccagcccaggaacgaatctctcaggctgcatcaggatgaatgatgacccaagtatggaagagaatggtgttgaacgcgtgtgtcctgagagcctgctgcagtccagggaatattcctcactaccattacccagacacacttcatcgacagacggtactataacttcaagtgatcctggattagaaattctgaatatggcttcttgtgaccttgacagaaactcgctctgtaagaaagaggaggatacaagatcagcttctcccacgatagaggcccaaggcacaagtccagctcatgataatattgcattccaagactctacgagtaaggataaaaccatattaaatctggaagccaaagaggaaccagaaacaatagaagaacataaaaaagaacatgcttcaggagactctgtggtttcccctcttcctgtaaccactgtgaaatcggttaacgttagacaaagtgagaacacttctgctaatgagaaggaggtggaggcagaatttctcagattatctttgggatttaagtgtgactggtttaccttggagaagagagtgaagcttgaagagaggtcccgtgacttggcagaagaaaatttgaagaaagaaatcactaactctttaaaactattagagtctttaacacctctgtgtgaagatgacaaccaggcacaggaaatcattaagaagctggagaagagtataaagtttcttagccagtgtgcagcacgagtggccagtagggctgagatgttgggagccatcaatcaggaaagccgggttagtaaagcagttgaagtgatgattcagcacgtagaaaacttgaagaggatgtatgccaaagagcacgctgaattagaagaactgaaacaggttcttctgcagaatgaaaggtctttcaatcctcttgaagatgatgatgactgccaaattaaaaaacgttcagcttctctaaactccaagccatcttctctacgaagagtgactattgcctctttacccagaaatattggaaatgcaggaatggtggctgggatggaaaataatgatcgattcagtagaaggtcaagcagttgaactaaagatgactcagagccatctggagaagaaacagtagaaaggacaaggaagccaagtctttctgaaaagaaaaataatccatcaaagtgggatgtctcttcagtttatgacacaatagcttcctgggcaacaaatctcaagtcctccatcagaaaggctaataaggccctctggctctctattgcattcattgtactgtttgcagctttgatgagcttcctcacaggccaattattccagaagtctgtggatgccgctcccacacagcaagaggactcatggacgtctctagaacatatcttgtggccatttaccagactccgacacaatgggccaccaccagtgtgacagcaggacatcctaatatatggatcttgatttttaagtttcagtatctgaacttcgtaaattagtaacttttagctgggaaagtatagcatgaaaccagaggttctcagaatgactgtaagatagcttacatttcctctttttgcctttatctccccaactaaaatacaatggggaagaagtctgcctatgatctttgaatgagctttttaaggaagaaatattatatattgtttgttaaagtttattgaaataaagaatcatttaaatcttca

SEQ ID NO: 381538 - DNA, 2742 bp, Homo sapiens
taactccagtcagaaacaactagaagccattaaacaactacaggaagatgctgtcaaccaggaaggcatccttaggaagaggctccaagaaaccagccaacggctggaggatgtggaggagcaggtagggtggctcatggctacattagattcaggggacatctcctcagatgccctgcaaaccatgaaataaaaatggaggaggaacaacaacaacaaacaaaaaaaaaaagcaaagaggaactgcaagttcagtccctagcgactaacagtgagcagaggaagtaaagggggagttgtaagagaggcggtatcaacagcctgctgatgaaagaggcgactctgcagaaagaggcaacttgacatatcaggactttaaccgctgtagaaatagctcaggcataccaagcccatgcaaacacagaattgcagaagttcaggagaggcttatcacttccctgagaagaaaaacacattttcagttttgcctgcatcataagagtgagcactccattgctttctttcctggccacactgctacaatccagcactaactatccatgtccagggtaaggatcgagatcgagaagcccacactgccagtgaaaaagctacgtctttactgcataaattagaggaagcaatttcggaacaacggaaccttcaaactataaatactgaattatcgaacacttgccaggcacttcagcagaagacaaggaaactgaagaagctttttagatgaggaatttcctcactatgattccctgtcctgcgcagatgcaattcaacaacctcttcaagaaaaattgaagcagtgttgccacaaactatatggtggtcaagaagcaagaatacatcagacacccctgaccttgaaacatacgtgctggtacacacctctgctgggtgcccaggccccacaagtggccccagcccaggaacgaatctctcaggctgcatcaggatgaatgatgacccaagtatggaagagaatggtgttgaacgcgtgtgtcctgagagcctgctgcagtccagggaatattcctcactaccattacccagacacacttcatcgacagacggtactataacttcaagtgatcctggattagaaattctgaatatggcttcttgtgaccttgacagaaactcgctctgtaagaaagaggaggatacaagatcagcttctcccacgatagaggcccaaggcacaagtccagctcatgataatattgcattccaagactctacgagtaaggataaaaccatattaaatctggaagccaaagaggaaccagaaacaatagaagaacataaaaaagaacatgcttcaggagactctgtggtttcccctcttcctgtaaccactgtgaaatcggttaacgttagacaaagtgagaacacttctgctaatgagaaggaggtggaggcagaatttctcagattatctttgggatttaagtgtgactggtttaccttggagaagagagtgaagcttgaagagaggtcccgtgacttggcagaagaaaatttgaagaaagaaatcactaactctttaaaactattagagtctttaacacctctgtgtgaagatgacaaccaggcacaggaaatcattaagaagctggagaagagtataaagtttcttagccagtgtgcagcacgagtggccagtagggctgagatgttgggagccatcaatcaggaaagccgggttagtaaagcagttgaagtgatgattcagcacgtagaaaacttgaagaggatgtatgccaaagagcacgctgaattagaagaactgaaacaggttcttctgcagaatgaaaggtctttcaatcctcttgaagatgatgatgactgccaaattaaaaaacgttcagcttctctaaactccaagccatcttctctacgaagagtgactattgcctctttacccagaaatattggaaatgcaggaatggtggctgggatggaaaataatgatcgattcagtagaaggtcaagcagttggcgtattttggggtcaaagcagagtgaacaccgtccctcattacctcgatttattagcacctattcctgggcagatgctgaagaagaaaaatgtgaactaaaaactaaagatgactcagagccatctggagaagaaacagtagaaaggacaaggaagccaagtctttctgaaaagaaaaataatccatcaaagtgggatgtctcttcagtttatgacacaatagcttcctgggcaacaaatctcaagtcctccatcagaaaggctaataaggccctctggctctctattgcattcattgtactgtttgcagctttgatgagcttcctcacaggccaattattccagaagtctgtggatgccgctcccacacagcaagaggactcatggacgtctctagaacatatcttgtggccatttaccagactccgacacaatgggccaccaccagtgtgacagcaggacatcctaatatatggatcttgatttttaagtttcagtatctgaacttcgtaaattagtaacttttagctgggaaagtatagcatgaaaccagaggttctcagaatgactgtaagatagcttacatttcctctttttgcctttatctccccaactaaaatacaatggggaagaagtctgcctatgatctttgaatgagctttttaaggaagaaatattatatattgtttgttaaagtttattgaaataaagaatcatttaaatcttca

SEQ ID NO: 381539 - DNA, 2809 bp, Homo sapiens
taactccagtcagaaacaactagaagccattaaacaactacaggaagatgctgtcaaccaggaaggcatccttaggaagaggctccaagaaaccagccaacggctggaggatgtggaggagcaggtagggtggctcatggctacattagattcaggggacatctcctcagatgccctgcaaaccatgaaataaaaatggaggaggaacaacaacaacaaacaaaaaaaaaaagcaaagaggaactgcaagttcagtccctagcgactaacagtgagcagaggaagtaaagggggagttgtaagagaggcggtatcaacagcctgctgatgaaagaggcgactctgcagaaagaggcaacttgacatatcaggactttaaccgctgtagaaatagctcaggcataccaagcccatgcaaacacagaattgcagaagttcaggagaggcttatcacttccctgagaagaaaaacacattttcagttttgcctgcatcataagagtgagcactccattgctttctttcctggccacactgctacaatccagcactaactatccatgtccagggtaaggatcgagatcgagaagcccacactgccagtgaaaaagctacgtctttactgcataaattagaggaagcaatttcggaacaacggaaccttcaaactataaatactgaattatcgaacacttgccaggcacttcagcagaagacaaggaaactgaagaaagcagtgttgccacaaactatatggtggtcaagaagcaagaatacatcagacacccctgaccttgaaacatacgtgctggtacacacctctgctggatgccttatctctggatagttttacagcagttccaaccctggaatcaacacctttctcaggtgtagccaaccaaatccacactctgtgtgaaaggcccacatatggagaagtaaaggatggtgctttggatgtaaaaagacaacacaagtgcccaggccccacaagtggccccagcccaggaacgaatctctcaggctgcatcaggatgaatgatgacccaagtatggaagagaatggtgttgaacgcgtgtgtcctgagagcctgctgcagtccagggaatattcctcactaccattacccagacacacttcatcgacagacggtactataacttcaagtgatcctggattagaaattctgaatatggcttcttgtgaccttgacagaaactcgctctgtaagaaagaggaggatacaagatcagcttctcccacgatagaggcccaaggcacaagtccagctcatgataatattgcattccaagactctacgagtaaggataaaaccatattaaatctggaagccaaagaggaaccagaaacaatagaagaacataaaaaagaacatgcttcaggagactctgtggtttcccctcttcctgtaaccactgtgaaatcggttaacgttagacaaagtgagaacacttctgctaatgagaaggaggtggaggcagaatttctcagattatctttgggatttaagtgtgactggtttaccttggagaagagagtgaagcttgaagagaggtcccgtgacttggcagaagaaaatttgaagaaagaaatcactaactctttaaaactattagagtctttaacacctctgtgtgaagatgacaaccaggcacaggaaatcattaagaagctggagaagagtataaagtttcttagccagtgtgcagcacgagtggccagtagggctgagatgttgggagccatcaatcaggaaagccgggttagtaaagcagttgaagtgatgattcagcacgtagaaaacttgaagaggatgtatgccaaagagcacgctgaattagaagaactgaaacaggttcttctgcagaatgaaaggtctttcaatcctcttgaagatgatgatgactgccaaattaaaaaacgttcagcttctctaaactccaagccatcttctctacgaagagtgactattgcctctttacccagaaatattggaaatgcaggaatggtggctgggatggaaaataatgatcgattcagtagaaggtcaagcagttggcgtattttggggtcaaagcagagtgaacaccgtccctcattacctcgatttattagcacctattcctgggcagatgctgaagaagaaaaatgtgaactaaaaactaaagatgactcagagccatctggagaagaaacagtagaaaggacaaggaagccaagtctttctgaaaagaaaaataatccatcaaagtgggatgtctcttcagtttatgacacaatagcttcctgggcaacaaatctcaagtcctccatcagaaaggctaataaggccctctggctctctattgcattcattgtactgtttgcagctttgatgagcttcctcacaggccaattattccagaagtctgtggatgccgctcccacacagcaagaggactcatggacgtctctagaacatatcttgtggccatttaccagactccgacacaatgggccaccaccagtgtgacagcaggacatcctaatatatggatcttgatttttaagtttcagtatctgaacttcgtaaattagtaacttttagctgggaaagtatagcatgaaaccagaggttctcagaatgactgtaagatagcttacatttcctctttttgcctttatctccccaactaaaatacaatggggaagaagtctgcctatgatctttgaatgagctttttaaggaagaaatattatatattgtttgttaaagtttattgaaataaagaatcatttaaatcttca

SEQ ID NO: 381540 - DNA, 1792 bp, Homo sapiens
taactccagtcagaaacaactagaagccattaaacaactacaggaagatgctgtcaaccaggaaggcatccttaggaagaggctccaagaaaccagccaacggctggaggatgtggaggagcaggtagggtggctcatggctacattagattcaggggacatctcctcagatgccctgcaaaccatgaaataaaaatggaggaggaacaacaacaacaaacaaaaaaaaaaagcaaagaggaactgcaagttcagtccctagcgactaacagtgagcagaggaagtaaagggggagttgtaagagaggcggtatcaacagcctgctgatgaaagaggcgactctgcagaaagaggcaacttgacatatcaggactttaaccgctgtagaaatagctcaggcataccaagcccatgcaaacacagaattgcagaagttcaggagaggcttatcacttccctgagaagaaaaacacattttcagttttgcctgcatcataagagtgagcactccattgctttctttcctggccacactgctacaatccagcactaactatccatgtccagggtaaggatcgagatcgagaagcccacactgccagtgaaaaagctacgtctttactgcataaattagaggaagcaatttcggaacaacggaaccttcaaactataaatactgaattatcgaacacttgccaggcacttcagcagaagacaaggaaactgaagaagctttttagatgaggaatttcctcactatgattccctgtcctgcgcagatgcaattcaacaacctcttcaagaaaaattgaagcagtgttgccacaaactatatggtggtcaagaagcaagaatacatcagacacccctgaccttgaaacatacgtgctggtacacacctctgctggatgccttatctctggatagttttacagcagttccaaccctggaatcaacacctttctcaggtgtagccaaccaaatccacactctgtgtgaaaggcccacatatggagaagtaaaggatggtgctttggatgtaaaaagacaacacaagtgcccaggccccacaagtggccccagcccaggaacgaatctctcaggctgcatcaggatgaatgatgacccaagtatggaagagaatggtgttgaacgcgtgtgtcctgagagcctgctgcagtccagggaatattcctcactaccattacccagacacacttcatcgacagacggtactataacttcaagtgatcctggattagaaattctgaatatggcttcttgtgaccttgacagaaactcgctctgtaagaaagaggaggatacaagatcagcttctcccacgatagaggcccaaggcacaagtccagctcatgataatattgcattccaagactctacgagtaaggataaaaccatattaaatctggaagccaaagaggaaccagaaacaatagaagaacatatcttgtggccatttaccagactccgacacaatgggccaccaccagtgtgacagcaggacatcctaatatatggatcttgatttttaagtttcagtatctgaacttcgtaaattagtaacttttagctgggaaagtatagcatgaaaccagaggttctcagaatgactgtaagatagcttacatttcctctttttgcctttatctccccaactaaaatacaatggggaagaagtctgcctatgatctttgaatgagctttttaaggaagaaatattatatattgtttgttaaagtttattgaaataaagaatcatttaaatcttca

SEQ ID NO: 381541 - DNA, 1686 bp, Homo sapiens
taactccagtcagaaacaactagaagccattaaacaactacaggaagatgctgtcaaccaggaaggcatccttaggaagaggctccaagaaaccagccaacggctggaggatgtggaggagcaggtagggtggctcatggctacattagattcaggggacatctcctcagatgccctgcaaaccatgaaataaaaatggaggaggaacaacaacaacaaacaaaaaaaaaaagcaaagaggaactgcaagttcagtccctagcgactaacagtgagcagaggaagtaaagggggagttgtaagagaggcggtatcaacagcctgctgatgaaagaggcgactctgcagaaagaggcaacttgacatatcaggactttaaccgctgtagaaatagctcaggcataccaagcccatgcaaacacagaattgcagaagttcaggagaggcttatcacttccctgagaagaaaaacacattttcagttttgcctgcatcataagagtgagcactccattgctttctttcctggccacactgctacaatccagcactaactatccatgtccagggtaaggatcgagatcgagaagcccacactgccagtgaaaaagctacgtctttactgcataaattagaggaagcaatttcggaacaacggaaccttcaaactataaatactgaattatcgaacacttgccaggcacttcagcagaagacaaggaaactgaagaagctttttagatgaggaatttcctcactatgattccctgtcctgcgcagatgcaattcaacaacctcttcaagaaaaattgaagcagtgttgccacaaactatatggtggtcaagaagcaagaatacatcagacacccctgaccttgaaacatacgtgctggtacacacctctgctggatgccttatctctggatagttttacagcagttccaaccctggaatcaacacctttctcaggtgtagccaaccaaatccacactctgtgtgaaaggcccacatatggagaagtaaaggatggtgctttggatgtaaaaagacaacacaagtgcccaggccccacaagtggccccagcccaggaacgaatctctcaggctgcatcaggatgaatgatgacccaagtatggaagagaatggtgttgaacgcgtgtgtcctgagagcctgctgcagtccagggaatattcctcactaccattacccagacacacttcatcgacagacggtactataacttcaagtggtaagtggatttggaaataatattaaaatagactgttagtattacagctttcagcctgatgttctgtgacctgctggggtgtgagcaaatgagaagaacataggcaaatactccttttgcatagtatagttaaatacactatatataatattatgtgcatagtattcgcaccatttgtttctcctgttgacagatcctggattagaaattctgaatatggcttcttgtgaccttgacagaaactcgctctgtaagaaagaggaggatacaagatcagcttctcccacgatagaggcccaaggcacaagtccagctcatgataatattgcattccaagactctacgagtaaggataaaaccatattaaatctggtaaggaaatacgtatgttcacaacaaaggtggtggtatcttacaatggtagaactatccctc

SEQ ID NO: 381542 - DNA, 1969 bp, Homo sapiens
taactccagtcagaaacaactagaagccattaaacaactacaggaagatgctgtcaaccaggaaggcatccttaggaagaggctccaagaaaccagccaacggctggaggatgtggaggagcaggtagggtggctcatggctacattagattcaggggacatctcctcagatgccctgcaaaccatgaaataaaaatggaggaggaacaacaacaacaaacaaaaaaaaaaagcaaagaggaactgcaagttcagtccctagcgactaacagtgagcagaggaagtaaagggggagttgtaagagaggcggtatcaacagcctgctgatgaaagaggcgactctgcagaaagaggcaacttgacatatcaggactttaaccgctgtagaaatagctcaggcataccaagcccatgcaaacacagaattgcagaagttcaggagaggcttatcacttccctgagaagaaaaacacattttcagttttgcctgcatcataagagtgagcactccattgctttctttcctggccacactgctacaatccagcactaactatccatgtccagggtaaggatcgagatcgagaagcccacactgccagtgaaaaagctacgtctttactgcataaattagaggaagcaatttcggaacaacggaaccttcaaactataaatactgaattatcgaacacttgccaggcacttcagcagaagacaaggaaactgaagagtgagtagcaaatattcatttatgacccagtttttgtccaccctcaggcggggcataggactacagacatttttctagattacagctaggatattattcctgagtttatgacaatgaaatggtttgagaaggcaatattgtggggctttcagagaggtttgctgagtggctaggtgcatgcatgggtttaaccattaacttccctttttgcctttttattataagctggttttgtctgtggctgtttttttcttttaaaattaattaaaacttctcaaaatttctaaaagtaaacaaggagaaaaatctagtatgcatggtatatttgaacttgcaagttgttatatattatactctgattttattagctagtttttttcctctcatatggtagaaaaggccttgctcgtctattttctttggaaattttagggggttgggcaaaataattatgaattcagtgtatatcaaaatatcaaatgtgtgaaaattcttttaaagttttaatgcattctctacatacatctacatacatattttgcattttaaaaattggaatatttgtcatttttctgtattacccaaaagtatataaacagttaccagagatttatgtgagaagacagttgtcacattacagatgtcagattagctataaaattgtttcattctagaaacctaatatggtaaaaataaaccttacttatttagccatttatcagacaattgcttttgttcagccagtttcttgttctagcagtataaatattctttttatagaaagttacttggtttgagaaataaacattgtttatttgttaattgttatataattataaataattatatatttaatatataagcttaaggtaggctagagatgaaaaatttcagacttgtgtttgttttggatttattgtaccctttctactattatctgagaaagctatttaggagtttaagaaatagtctagttttaaaatagcaatggtttgccggacacagtggctcacccctgtaatcccagcattttgggaggccgaggtgggcagattgcttgagcccaggagtttgagaccagcctggacaacatggtgaaaccctgtctctacaaaaattacaaacaaataaataaataaaacattaaaatagcagtggttattcaacatattattgtcataatttttaaacctttattgaatttgccagttttcaatattctgattcactctgttaag

SEQ ID NO: 381543 - DNA, 1902 bp, Homo sapiens
taactccagtcagaaacaactagaagccattaaacaactacaggaagatgctgtcaaccaggaaggcatccttaggaagaggctccaagaaaccagccaacggctggaggatgtggaggagcaggtagggtggctcatggctacattagattcaggggacatctcctcagatgccctgcaaaccatgaaataaaaatggaggaggaacaacaacaacaaacaaaaaaaaaaagcaaagaggaactgcaagttcagtccctagcgactaacagtgagcagaggaagtaaagggggagttgtaagagaggcggtatcaacagcctgctgatgaaagaggcgactctgcagaaagaggcaacttgacatatcaggactttaaccgctgtagaaatagctcaggcataccaagcccatgcaaacacagaattgcagaagttcaggagaggcttatcacttccctgagaagaaaaacacattttcagttttgcctgcatcataagagtgagcactccattgctttctttcctggccacactgctacaatccagcactaactatccatgtccagggtaaggatcgagatcgagaagcccacactgccagtgaaaaagctacgtctttactgcataaattagaggaagcaatttcggaacaacggaaccttcaaactataaatactgaattatcgaacacttgccaggcacttcagcagaagacaaggaaactgaagaagctttttagatgaggaatttcctcactatgattccctgtcctgcgcagatgcaattcaacaacctcttcaagaaaaattgaagcagtgttgccacaaactatatggtggtcaagaagcaagaatacatcagacacccctgaccttgaaacatacgtgctggtacacacctctgctggagacaaggtttctccatgttgcccaggctggtcttgaactcctggactcaagtgatcctcccatctcagccgcccaacatgctgggattacaggtgtgagccactgtgccaggtgacaaagtctattttaaaggatacaaatgaacagccagatgaagagatacatcggaaaggtttggaaatgtctcgagcacaggagggtctgtctttgtggagttggggtgtgccatcttcccagcacatggctatgttttagttcaccaaatcagaagctttccaagtgctgtcctttcaggtttttatggaggctttactaggcacgattgattaaatcattggccattggtgatcacctcagccccctcccctcccaggagcttggcagggtggagttgaaagttccaacgctcaaaccacagattggttcccctggcaaccagcccctcatcctgaggctatccagaagcccaccaagagataccgcgttagaacagaagatgctcgtaatactcaggaaatttcaagagattcaggagcttcgcgtcaaacactcctatcactcgggaaattacaaggtcttagacactccgtatcaggaaccaggatcagagaccaaatattagagtaaagattcccctagcacctctgtctacaaggattttaggaggtctgtctcaggaactgggggcattgatcacaatatcaacgacatcctcctaagttaacttagacaggttttgatcctatttctgtttctttcacactcaaggttaacaagcctttgggaacctatacctgtccctgccctcatcctccttcggtgctcatttgcacctgcctttttaagtatacagactcatcttccttaggaaacattaaaaaatgtcagtgcattttgtgagggcctaatctacctcaataaaatttcccttctgtattgagggtgaggaaggatggctttgaattgcaaatgcttcattttcatttttgact

SEQ ID NO: 381544 - DNA, 1821 bp, Homo sapiens
taactccagtcagaaacaactagaagccattaaacaactacaggaagatgctgtcaaccaggaaggcatccttaggaagaggctccaagaaaccagccaacggctggaggatgtggaggagcaggtagggtggctcatggctacattagattcaggggacatctcctcagatgccctgcaaaccatgaaataaaaatggaggaggaacaacaacaacaaacaaaaaaaaaaagcaaagaggaactgcaagttcagtccctagcgactaacagtgagcagaggaagtaaagggggagttgtaagagaggcggtatcaacagcctgctgatgaaagaggcgactctgcagaaagaggcaacttgacatatcaggactttaaccgctgtagaaatagctcaggcataccaagcccatgcaaacacagaattgcagaagttcaggagaggcttatcacttccctgagaagaaaaacacattttcagttttgcctgcatcataagagtgagcactccattgctttctttcctggccacactgctacaatccagcactaactatccatgtccagggtaaggatcgagatcgagaagcccacactgccagtgaaaaagctacgtctttactgcataaattagaggaagcaatttcggaacaacggaaccttcaaactataaatactgaattatcgaacacttgccaggcacttcagcagaagacaaggaaactgaagaaagcagtgttgccacaaactatatggtggtcaagaagcaagaatacatcagacacccctgaccttgaaacatacgtgctggtacacacctctgctggagacaaggtttctccatgttgcccaggctggtcttgaactcctggactcaagtgatcctcccatctcagccgcccaacatgctgggattacaggtgtgagccactgtgccaggtgacaaagtctattttaaaggatacaaatgaacagccagatgaagagatacatcggaaaggtttggaaatgtctcgagcacaggagggtctgtctttgtggagttggggtgtgccatcttcccagcacatggctatgttttagttcaccaaatcagaagctttccaagtgctgtcctttcaggtttttatggaggctttactaggcacgattgattaaatcattggccattggtgatcacctcagccccctcccctcccaggagcttggcagggtggagttgaaagttccaacgctcaaaccacagattggttcccctggcaaccagcccctcatcctgaggctatccagaagcccaccaagagataccgcgttagaacagaagatgctcgtaatactcaggaaatttcaagagattcaggagcttcgcgtcaaacactcctatcactcgggaaattacaaggtcttagacactccgtatcaggaaccaggatcagagaccaaatattagagtaaagattcccctagcacctctgtctacaaggattttaggaggtctgtctcaggaactgggggcattgatcacaatatcaacgacatcctcctaagttaacttagacaggttttgatcctatttctgtttctttcacactcaaggttaacaagcctttgggaacctatacctgtccctgccctcatcctccttcggtgctcatttgcacctgcctttttaagtatacagactcatcttccttaggaaacattaaaaaatgtcagtgcattttgtgagggcctaatctacctcaataaaatttcccttctgtattgagggtgaggaaggatggctttgaattgcaaatgcttcattttcatttttgact

SEQ ID NO: 381545 - DNA, 312 bp, Homo sapiens
gagttagatatttatcgactttccctaaaacagaacaaatatttgtgagcctcttgagttacagtaagattcagcaatattttatgaataattatagcatattatccttagtttcaaatattaaaaacaacatttatttacagaactaaagatgactcagagccatctggagaagaaacagtagaaaggacaaggaagccaagtctttctgaaaagaaaaataatccatcaaagtgggatgtctcttcagtgtaagttatctacttgataaattctaccattttagtggaatgggaaagggtgaggcagggc

SEQ ID NO: 381546 - DNA, 511 bp, Homo sapiens
tcacttcatgttttggcacaagctctcatatgctcggtgtctgtttggcttggctgtgactcagtgcaggtgaaccctgtgcatgtcagcattatgttgctggggggagaaagaaatgcctcagtataaaacagtattaaactgaaacatctgaccacatccggttttctctcctcttcctcaccctcacattattttgacaacaggcagaatttctcagattatctttgggatttaagtgtgactggtttaccttggagaagagagtgaagcttgaagagaggtcccgtgacttggcagaagaaaatttgaagaaagaaatcactaactctttaaaactattagaggtgagaatcagaacatttgggatataaacatttggtctagccaggcacagtggctcacacctataatccctgcactttgggaggccaaggcaggaggatcatgggagaccaaggcaggaggatcacttgaggcccggagttcaagatcatcctgggcaacatag

SEQ ID NO: 381547 - DNA, 682 bp, Homo sapiens
ccaacattgagttaggtggaatataaattggtaaaatatttctggaagacaatttggccacaagaggatcctttaagatatgtctgtttaactcagctgtggtcaagtacacggatatgcatgtacaaggatatttattggtgttgcatataatgataaattattgagagttttctaaatgtacattttcctccttctggtagccatcttctctacgaagagtgactattgcctctttacccagaaatattggaaatgcaggaatggtaagacaattcctaagtgttcttagtcaaaggtaaattcattttcatatgacagaaaatataaacgtatattttatcatttcttttaacatttgaacttctactaaaggtggctgggatggaaaataatgatcgattcagtagaaggtcaagcagttggtaagtgtaattttatggttcctctttgggaaccttactattttatacttgggctaacctaaatgagtgctcaaattaagtgatatagtaatgtttgatttgtacaaagtgtaaacagaataattatataaattggtatctaattatgaagttttttatcataaagtaggagatctgtgaatgtgccaagaaaaaaataattaggacatataattttgtatttacttaagcagtaggaaataaattgataatggcta

SEQ ID NO: 381548 - DNA, 2517 bp, Homo sapiens
tatattggcagttattgagggtaaagcaatatattgtaacagaatgtataaatatttttgataaaacagtctatattttattaaaaaatgaattataacccattttcagttttgcctgcatcataagagtgagcactccattgctttctttcctggccacactgctacaatccagcactaactatccatgtccagggtaaggatcgagatcgagaagcccacactgccagtgaaaaagctacgtctttactgcataaattagaggaagcaatttcggaacaacggaaccttcaaactataaatactgaattatcgaacacttgccaggcacttcagcagaagacaaggaaactgaagaagctttttagatgaggaatttcctcactatgattccctgtcctgcgcagatgcaattcaacaacctcttcaagaaaaattgaagcagtgttgccacaaactatatggtggtcaagaagcaagaatacatcagacacccctgaccttgaaacatacgtgctggtacacacctctgctggatgccttatctctggatagttttacagcagttccaaccctggaatcaacacctttctcaggtgtagccaaccaaatccacactctgtgtgaaaggcccacatatggagaagtaaaggatggtgctttggatgtaaaaagacaacacaagtgcccaggccccacaagtggccccagcccaggaacgaatctctcaggctgcatcaggatgaatgatgacccaagtatggaagagaatggtgttgaacgcgtgtgtcctgagagcctgctgcagtccagggaatattcctcactaccattacccagacacacttcatcgacagacggtactataacttcaagtgatcctggattagaaattctgaatatggcttcttgtgaccttgacagaaactcgctctgtaagaaagaggaggatacaagatcagcttctcccacgatagaggcccaaggcacaagtccagctcatgataatattgcattccaagactctacgagtaaggataaaaccatattaaatctggaagccaaagaggaaccagaaacaatagaagaacataaaaaagaacatgcttcaggagactctgtggtttcccctcttcctgtaaccactgtgaaatcggttaacgttagacaaagtgagaacacttctgctaatgagaaggaggtggaggcagaatttctcagattatctttgggatttaagtgtgactggtttaccttggagaagagagtgaagcttgaagagaggtcccgtgacttggcagaagaaaatttgaagaaagaaatcactaactctttaaaactattagagtctttaacacctctgtgtgaagatgacaaccaggcacaggaaatcattaagaagctggagaagagtataaagtttcttagccagtgtgcagcacgagtggccagtagggctgagatgttgggagccatcaatcaggaaagccgggttagtaaagcagttgaagtgatgattcagcacgtagaaaacttgaagaggatgtatgccaaagagcacgctgaattagaagaactgaaacaggttcttctgcagaatgaaaggtctttcaatcctcttgaagatgatgatgactgccaaattaaaaaacgttcagcttctctaaactccaagccatcttctctacgaagagtgactattgcctctttacccagaaatattggaaatgcaggaatggtggctgggatggaaaataatgatcgattcagtagaaggtcaagcagttggcgtattttggggtcaaagcagagtgaacaccgtccctcattacctcgatttattagcacctattcctgggcagatgctgaagaagaaaaatgtgaactaaaaactaaagatgactcagagccatctggagaagaaacagtagaaaggacaaggaagccaagtctttctgaaaagaaaaataatccatcaaagtgggatgtctcttcagtttatgacacaatagcttcctgggcaacaaatctcaagtcctccatcagaaaggctaataaggccctctggctctctattgcattcattgtactgtttgcagctttgatgagcttcctcacaggccaattattccagaagtctgtggatgccgctcccacacagcaagaggactcatggacgtctctagaacatatcttgtggccatttaccagactccgacacaatgggccaccaccagtgtgacagcaggacatcctaatatatggatcttgatttttaagtttcagtatctgaacttcgtaaattagtaacttttagctgggaaagtatagcatgaaaccagaggttctcagaatgactgtaagatagcttacatttcctctttttgcctttatctccccaactaaaatacaatggggaagaagtctgcctatgatctttgaatgagctttttaaggaagaaatattatatattgtttgttaaagtttattgaaataaagaatcatttaaatcttca

SEQ ID NO: 381549 - DNA, 2854 bp, Homo sapiens
taactccagtcagaaacaactagaagccattaaacaactacaggaagatgctgtcaaccaggaaggcatccttaggaagaggctccaagaaaccagccaacggctggaggatgtggaggagcaggtagggtggctcatggctacattagattcaggggacatctcctcagatgccctgcaaaccatgaaataaaaatggaggaggaacaacaacaacaaacaaaaaaaaaaagcaaagaggaactgcaagttcagtccctagcgactaacagtgagcagaggaagtaaagggggagttgtaagagaggcggtatcaacagcctgctgatgaaagaggcgactctgcagaaagaggcaacttgacatatcaggactttaaccgctgtagaaatagctcaggcataccaagcccatgcaaacacagaattgcagaagttcaggagaggcttatcacttccctgagaagaaaaacacattttcagttttgcctgcatcataagagtgagcactccattgctttctttcctggccacactgctacaatccagcactaactatccatgtccagggtaaggatcgagatcgagaagcccacactgccagtgaaaaagctacgtctttactgcataaattagaggaagcaatttcggaacaacggaaccttcaaactataaatactgaattatcgaacacttgccaggcacttcagcagaagacaaggaaactgaagaagctttttagatgaggaatttcctcactatgattccctgtcctgcgcagatgcaattcaacaacctcttcaagaaaaattgaagcagtgttgccacaaactatatggtggtcaagaagcaagaatacatcagacacccctgaccttgaaacatacgtgctggtacacacctctgctggatgccttatctctggatagttttacagcagttccaaccctggaatcaacacctttctcaggtgtagccaaccaaatccacactctgtgtgaaaggcccacatatggagaagtaaaggatggtgctttggatgtaaaaagacaacacaagaatctctcaggctgcatcaggatgaatgatgacccaagtatggaagagaatggtgttgaacgcgtgtgtcctgagagcctgctgcagtccagggaatattcctcactaccattacccagacacacttcatcgacagacggtactataacttcaagtgatcctggattagaaattctgaatatggcttcttgtgaccttgacagaaactcgctctgtaagaaagaggaggatacaagatcagcttctcccacgatagaggcccaaggcacaagtccagctcatgataatattgcattccaagactctacgagtaaggataaaaccatattaaatctggaagccaaagaggaaccagaaacaatagaagaacataaaaaagaacatgcttcaggagactctgtggtttcccctcttcctgtaaccactgtgaaatcggttaacgttagacaaagtgagaacacttctgctaatgagaaggaggtggaggcagaatttctcagattatctttgggatttaagtgtgactggtttaccttggagaagagagtgaagcttgaagagaggtcccgtgacttggcagaagaaaatttgaagaaagaaatcactaactctttaaaactattagagtctttaacacctctgtgtgaagatgacaaccaggcacaggaaatcattaagaagctggagaagagtataaagtttcttagccagtgtgcagcacgagtggccagtagggctgagatgttgggagccatcaatcaggaaagccgggttagtaaagcagttgaagtgatgattcagcacgtagaaaacttgaagaggatgtatgccaaagagcacgctgaattagaagaactgaaacaggttcttctgcagaatgaaaggtctttcaatcctcttgaagatgatgatgactgccaaattaaaaaacgttcagcttctctaaactccaagccatcttctctacgaagagtgactattgcctctttacccagaaatattggaaatgcaggaatggtggctgggatggaaaataatgatcgattcagtagaaggtcaagcagttggcgtattttggggtcaaagcagagtgaacaccgtccctcattacctcgatttattagcacctattcctgggcagatgctgaagaagaaaaatgtgaactaaaaactaaagatgactcagagccatctggagaagaaacagtagaaaggacaaggaagccaagtctttctgaaaagaaaaataatccatcaaagtgggatgtctcttcagtttatgacacaatagcttcctgggcaacaaatctcaagtcctccatcagaaaggctaataaggccctctggctctctattgcattcattgtactgtttgcagctttgatgagcttcctcacaggccaattattccagaagtctgtggatgccgctcccacacagcaagaggactcatggacgtctctagaacatatcttgtggccatttaccagactccgacacaatgggccaccaccagtgtgacagcaggacatcctaatatatggatcttgatttttaagtttcagtatctgaacttcgtaaattagtaacttttagctgggaaagtatagcatgaaaccagaggttctcagaatgactgtaagatagcttacatttcctctttttgcctttatctccccaactaaaatacaatggggaagaagtctgcctatgatctttgaatgagctttttaaggaagaaatattatatattgtttgttaaagtttattgaaataaagaatcatttaaatcttca

SEQ ID NO: 381550 - DNA, 2897 bp, Homo sapiens
taactccagtcagaaacaactagaagccattaaacaactacaggaagatgctgtcaaccaggaaggcatccttaggaagaggctccaagaaaccagccaacggctggaggatgtggaggagcaggtagggtggctcatggctacattagattcaggggacatctcctcagatgccctgcaaaccatgaaataaaaatggaggaggaacaacaacaacaaacaaaaaaaaaaagcaaagaggaactgcaagttcagtccctagcgactaacagtgagcagaggaagtaaagggggagttgtaagagaggcggtatcaacagcctgctgatgaaagaggcgactctgcagaaagaggcaacttgacatatcaggactttaaccgctgtagaaatagctcaggcataccaagcccatgcaaacacagaattgcagaagttcaggagaggcttatcacttccctgagaagaaaaacacattttcagttttgcctgcatcataagagtgagcactccattgctttctttcctggccacactgctacaatccagcactaactatccatgtccagggtaaggatcgagatcgagaagcccacactgccagtgaaaaagctacgtctttactgcataaattagaggaagcaatttcggaacaacggaaccttcaaactataaatactgaattatcgaacacttgccaggcacttcagcagaagacaaggaaactgaagacaacaattgagtcacttcaaaaggagttcattgaaggggaacaccatggcttgctgtttcagagctttttagatgaggaatttcctcactatgattccctgtcctgcgcagatgcaattcaacaacctcttcaagaaaaattgaagcagtgttgccacaaactatatggtggtcaagaagcaagaatacatcagacacccctgaccttgaaacatacgtgctggtacacacctctgctggagacaaggtttctccatgttgcccaggctggtcttgaactcctggactcaagtgatcctcccatctcagccgcccaacatgctgggattacaggtgcccaggccccacaagtggccccagcccaggaacgaatctctcaggctgcatcaggatgaatgatgacccaagtatggaagagaatggtgttgaacgcgtgtgtcctgagagcctgctgcagtccagggaatattcctcactaccattacccagacacacttcatcgacagacggtactataacttcaagtgatcctggattagaaattctgaatatggcttcttgtgaccttgacagaaactcgctctgtaagaaagaggaggatacaagatcagcttctcccacgatagaggcccaaggcacaagtccagctcatgataatattgcattccaagactctacgagtaaggataaaaccatattaaatctggaagccaaagaggaaccagaaacaatagaagaacataaaaaagaacatgcttcaggagactctgtggtttcccctcttcctgtaaccactgtgaaatcggttaacgttagacaaagtgagaacacttctgctaatgagaaggaggtggaggcagaatttctcagattatctttgggatttaagtgtgactggtttaccttggagaagagagtgaagcttgaagagaggtcccgtgacttggcagaagaaaatttgaagaaagaaatcactaactctttaaaactattagagtctttaacacctctgtgtgaagatgacaaccaggcacaggaaatcattaagaagctggagaagagtataaagtttcttagccagtgtgcagcacgagtggccagtagggctgagatgttgggagccatcaatcaggaaagccgggttagtaaagcagttgaagtgatgattcagcacgtagaaaacttgaagaggatgtatgccaaagagcacgctgaattagaagaactgaaacaggttcttctgcagaatgaaaggtctttcaatcctcttgaagatgatgatgactgccaaattaaaaaacgttcagcttctctaaactccaagccatcttctctacgaagagtgactattgcctctttacccagaaatattggaaatgcaggaatggtggctgggatggaaaataatgatcgattcagtagaaggtcaagcagttggcgtattttggggtcaaagcagagtgaacaccgtccctcattacctcgatttattagcacctattcctgggcagatgctgaagaagaaaaatgtgaactaaaaactaaagatgactcagagccatctggagaagaaacagtagaaaggacaaggaagccaagtctttctgaaaagaaaaataatccatcaaagtgggatgtctcttcagtttatgacacaatagcttcctgggcaacaaatctcaagtcctccatcagaaaggctaataaggccctctggctctctattgcattcattgtactgtttgcagctttgatgagcttcctcacaggccaattattccagaagtctgtggatgccgctcccacacagcaagaggactcatggacgtctctagaacatatcttgtggccatttaccagactccgacacaatgggccaccaccagtgtgacagcaggacatcctaatatatggatcttgatttttaagtttcagtatctgaacttcgtaaattagtaacttttagctgggaaagtatagcatgaaaccagaggttctcagaatgactgtaagatagcttacatttcctctttttgcctttatctccccaactaaaatacaatggggaagaagtctgcctatgatctttgaatgagctttttaaggaagaaatattatatattgtttgttaaagtttattgaaataaagaatcatttaaatcttca

SEQ ID NO: 381551 - DNA, 1610 bp, Homo sapiens
ggaaactggtccctggtaccaaaaaggttggggactgctgttatagagtgtttttgtcagagtaggcttaggagaggacaggaagtaggaaaatgactggttatgaagtatttccactctatgtacagtggtaaaatcttatgattttaggaagccaaagaggaaccagaaacaatagaagaacataaaaaagaacatgcttcaggagactctgtggtttcccctcttcctgtaaccactgtgaaatcggttaacgttagacaaagtgagaacacttctgctaatgagaaggaggtggaggcagaatttctcagattatctttgggatttaagtgtgactggtttaccttggagaagagagtgaagcttgaagagaggtcccgtgacttggcagaagaaaatttgaagaaagaaatcactaactctttaaaactattagagtctttaacacctctgtgtgaagatgacaaccaggcacaggaaatcattaagaagctggagaagagtataaagtttcttagccagtgtgcagcacgagtggccagtagggctgagatgttgggagccatcaatcaggaaagccgggttagtaaagcagttgaagtgatgattcagcacgtagaaaacttgaagaggatgtatgccaaagagcacgctgaattagaagaactgaaacaggttcttctgcagaatgaaaggtctttcaatcctcttgaagatgatgatgactgccaaattaaaaaacgttcagcttctctaaactccaagccatcttctctacgaagagtgactattgcctctttacccagaaatattggaaatgcaggaatggtggctgggatggaaaataatgatcgattcagtagaaggtcaagcagttggcgtattttggggtcaaagcagagtgaacaccgtccctcattacctcgatttattagcacctattcctgggcagatgctgaagaagaaaaatgtgaactaaaaactaaagatgactcagagccatctggagaagaaacagtagaaaggacaaggaagccaagtctttctgaaaagaaaaataatccatcaaagtgggatgtctcttcagtttatgacacaatagcttcctgggcaacaaatctcaagtcctccatcagaaaggctaataaggccctctggctctctattgcattcattgtactgtttgcagctttgatgagcttcctcacaggccaattattccagaagtctgtggatgccgctcccacacagcaagaggactcatggacgtctctagaacatatcttgtggccatttaccagactccgacacaatgggccaccaccagtgtgacagcaggacatcctaatatatggatcttgatttttaagtttcagtatctgaacttcgtaaattagtaacttttagctgggaaagtatagcatgaaaccagaggttctcagaatgactgtaagatagcttacatttcctctttttgcctttatctccccaactaaaatacaatggggaagaagtctgcctatgatctttgaatgagctttttaaggaagaaatattatatattgtttgttaaagtttattgaaataaagaatcatttaaatcttca

SEQ ID NO: 381552 - DNA, 2113 bp, Homo sapiens
taactccagtcagaaacaactagaagccattaaacaactacaggaagatgctgtcaaccaggaaggcatccttaggaagaggctccaagaaaccagccaacggctggaggatgtggaggagcaggtagggtggctcatggctacattagattcaggggacatctcctcagatgccctgcaaaccatgaaataaaaatggaggaggaacaacaacaacaaacaaaaaaaaaaagcaaagaggaactgcaagttcagtccctagcgactaacagtgagcagaggaagtaaagggggagttgtaagagaggcggtatcaacagcctgctgatgaaagaggcgactctgcagaaagaggcaacttgacatatcaggactttaaccgctgtagaaatagctcaggcataccaagcccatgcaaacacagaattgcagaagttcaggagaggcttatcacttccctgagaagaaaaacacattttcagttttgcctgcatcataagagtgagcactccattgctttctttcctggccacactgctacaatccagcactaactatccatgtccagggtaaggatcgagatcgagaagcccacactgccagtgaaaaagctacgtctttactgcataaattagaggaagcaatttcggaacaacggaaccttcaaactataaatactgaattatcgaacacttgccaggcacttcagcagaagacaaggaaactgaagaagctttttagatgaggaatttcctcactatgattccctgtcctgcgcagatgcaattcaacaacctcttcaagaaaaattgaagcagtgttgccacaaactatatggtggtcaagaagcaagaatacatcagacacccctgaccttgaaacatacgtgctggtacacacctctgctggatgccttatctctggatagttttacagcagttccaaccctggaatcaacacctttctcaggtgtagccaaccaaatccacactctgtgtgaaaggcccacatatggagaagtaaaggatggtgctttggatgtaaaaagacaacacaagtgcccaggccccacaagtggccccagcccaggaacgaatctctcaggctgcatcaggatgaatgatgacccaagtatggaagagaatggtgttgaacgcgtgtgtcctgagagcctgctgcagtccagggaatattcctcactaccattacccagacacacttcatcgacagacggtactataacttcaagtgatcctggattagaaattctgaatatggcttcttgtgaccttgacagaaactcgctctgtaagaaagaggaggatacaagatcagcttctcccacgatagaggcccaaggcacaagtccagctcatgataatattgcattccaagactctacgagtaaggataaaaccatattaaatctggaagccaaagaggaaccagaaacaatagaagaacataaaaaagaacatgcttcaggagactctgtggtttcccctcttcctgtaaccactgtgaaatcggttaacgttagacaaagtgagaacacttctgctaatgagaaggaggtggaggcagaatttctcagattatctttgggatttaagtgtgactggtttaccttggagaagagagtgaagcttgaagagaggtcccgtgacttggcagaagaaaatttgaagaaagaaatcactaactctttaaaactattagagtctttaacacctctgtgtgaagatgacaaccaggcacaggaaatcattaagaagctggagaagagtataaagtttcttagccagtgtgcagcacgagtggccagtagggctgagatgttgggagccatcaatcaggaaagccgggttagtaaagcagttgaagtgatgattcagcacgtagaaaacttgaagaggatgtatgccaaagagcacgctgaattagaagaactgaaacaggttcttctgcagaatgaaaggtctttcaatcctcttgaagatgatgatgactgccaaattaaaaaacgttcagcttctctaaactccaaggtaattactaattcacttaacaaatgtctagcaaatactataagacggttttaaaatgttatttg

SEQ ID NO: 381553 - DNA, 2565 bp, Homo sapiens
acgcggggcgcgcggctccgtcggctaccgcgggcgggcgcaggcgacgggcacggcgggcgagcgggcggtatggcggcggcggggcccgcggcggggccgacggggcccgagcccatgccgagctacgcgcagctagtgcagcgcggctggggcagcgcgctggcggcggcgcggggctgcacggactgcggctgggggctggcgcgtcgcggcctggctgagcacgcgcacctggcgccgcccgagctgctgctgctggcgctcggcgcgctgggctggaccgcgctgcgctccgcggccactgcgcgcctctttcggcccctggcgaagcggtgctgcctccagcccagagatgccgccaagatgcccgagagcgcttggaagtttctcttctacctgggcagctggagctacagtgcctacctgctgtttggcaccgactaccccttcttccatgacccaccatctgtcttctacgactggacgccgggcatggcagtgccacgggacattgcagccgcctacctgctccagggaagcttctatggccactccatctacgctacgctatacatggacacctggcgcaaggactcggtggtcatgctgctccaccacgtggtcactctcatcctcatcgtctcctcctacgccttccggtaccacaatgtgggcatccttgtgctcttcctgcacgatatcagtgacgtgcagcttgagttcaccaagctcaacatttacttcaagtcccgcggcggctcctaccatcggctgcatgccttggcagcagacttgggctgcctcagcttcggcttcagctggttctggttccgcctctactggttcccgctcaaggtcctgtatgccaccagtcactgcagtctgcgcacggtgcctgacatccccttctacttcttcttcaatgcgctcctgctgctgctcacccttatgaacctctactggttcctgtacatcgtggcgtttgcagccaaggtgttgacaggccaggtgcacgagctgaaggacctgcgggagtatgacacagccgaggcccagagcctgaagcccagcaaagccgagaagccactgaggaacggcctggtgaaggacaagcgcttctgaacccctcggccccgcccccgtggacccggccccaccccgaataccccggccacgctccccgtccttggccgcccctccaccccctccaactctgctcctctagggccgccgccacctcccctgggaccccgccccctcatcctgcctccatttcccggccacgccccccaggacccctgcccctccggggacaccggccccgccctcagcccactggtcccgggccgccgcggaccctgcgcactctctggtcatcgcctgggaggaagatgccaccgccgcagcaaggtccctgcggccaccacctcctcctcctcctggccctgctgctgccctcgctgcccctgacccgcgcccccgtgcccccaggcccagccgccgccctgctccaggctctaggactgcgcgatgagccccagggtgcccccaggctccggccggttcccccggtcatgtggcgcctgtttcgacgccgggacccccaggagaccaggtctggctcgcggcggacgtccccaggggtcaccctgcaaccgtgccacgtggaggagctgggggtcgccggaaacatcgtgcgccacatcccggaccgcggtgcgcccacccgggcctcggagcctgtctcggccgcggggcattgccctgagtggacagtcgtcttcgacctgtcggctgtggaacccgctgagcgcccgagccgggcccgcctggagctgcgtttcgcggcggcggcggcggcagccccggagggcggctgggagctgagcgtggcgcaagcgggccagggcgcgggcgcggaccccgggccggtgctgctccgccagttggtgcccgccctggggccgccagtgcgcgcggagctgctgggcgccgcttgggctcgcaacgcctcatggccgcgcagcctccgcctggcgctggcgctacgcccccgggcccctgccgcctgcgcgcgcctggccgaggcctcgctgctgctggtgaccctcgacccgcgcctgtgccaccccctggcccggccgcggcgcgacgccgaacccgtgttgggcggcggccccgggggcgcttgtcgcgcgcggcggctgtacgtgagcttccgcgaggtgggctggcaccgctgggtcatcgcgccgcgcggcttcctggccaactactgccagggtcagtgcgcgctgcccgtcgcgctgtcggggtccggggggccgccggcgctcaaccacgctgtgctgcgcgcgctcatgcacgcggccgccccgggagccgccgacctgccctgctgcgtgcccgcgcgcctgtcgcccatctccgtgctcttctttgacaacagcgacaacgtggtgctgcggcagtatgaggacatggtggtggacgagtgcggctgccgctaacccggggcgggcagggacgcgggcccaacaataaatgccgcgtggtctgctc

SEQ ID NO: 381554 - DNA, 2404 bp, Homo sapiens
acgcggggcgcgcggctccgtcggctaccgcgggcgggcgcaggcgacgggcacggcgggcgagcgggcggtatggcggcggcggggcccgcggcggggccgacggggcccgagcccatgccgagctacgcgcagctagtgcagcgcggctggggcagcgcgctggcggcggcgcggggctgcacggactgcggctgggggctggcgcgtcgcggcctggctgagcacgcgcacctggcgccgcccgagctgctgctgctggcgctcggcgcgctgggctggaccgcgctgcgctccgcggccactgcgcgcctctttcgggtcagtgtggccgggggccgggacgaggggaccccggactgggggaagccgggaccggggacctggggccgccggcgcgttcctttcttccagcgctggctgctgcggatgaaggggtcgccggaacgtgggtgggggcctcgggctggagaggcccaggacgttggagccccaggataagcccctggcgaagcggtgctgcctccagcccagagatgccgccaagatgcccgagagcgcttggaagtttctcttctacctgggcagctggagctacagtgcctacctgctgtttggcaccgactaccccttcttccatgacccaccatctgtcttctacgactggacgccgggcatggcagtgccacgggacattgcagccgcctacctgctccagggaagcttctatggccactccatctacgctacgctatacatggacacctggcgcaaggactcggtggtcatgctgctccaccacgtggtcactctcatcctcatcgtctcctcctacgccttccggtaccacaatgtgggcatccttgtgctcttcctgcacgatatcagtgacgtgcagcttgagttcaccaagctcaacatttacttcaagtcccgcggcggctcctaccatcggctgcatgccttggcagcagacttgggctgcctcagcttcggcttcagctggttctggttccgcctctactggttcccgctcaaggtcctgtatgccaccagtcactgcagtctgcgcacggtgcctgacatccccttctacttcttcttcaatgcgctcctgctgctgctcacccttatgaacctctactggttcctgtacatcgtggcgtttgcagccaaggtgttgacaggccaggtgcacgagctgaaggacctgcgggagtatgacacagccgaggcccagagcctgaagcccagcaaagccgagtgagtgtggaggggcccgcaccccgcgttccctcctttagtgtcacccgtccaagcgtgttcgtgggcaggcccccaagacccagcagcagatgaggccgacgcggatgctgccccccaagcctactccaaaacagagactgcaataaaggcgtggacgatgtggccagtaccctgaaggacaggacagtgaggaaggggagggagaggctggggaggggcaggcagggcgacaggcagggtctcagcggtagggacactgagggccaggcctagtggctggtgtggcgggagtggcgagccagggccctgtgggtggtgaggagtagttgctggccagcctggatgacgacctctgacccatgtcgccactggagctggtggcagtggggctggggaggaaggaacgccaagggccacagagagaacccaggctccatctgggccgagacatcctggcctctgagtttgacaggggagcccactgcccggccaaacaggagctggggctgggagctcagactcagtccagcccaggtgggagtcctggggaaggagatagcccacgagcctcaccagccctgggtgacagccagatggtgtccgaagccccaggcctggggcaggcagggggtgtctgggccagggatgaacggaggccaaactgggtaacaagcagagtcgggtgtgcagtgtctcataggcaacgtgaggagtgtttgagcaggagccggggcaggaggttgtggaaggccctggaaggtgccgaccagccaggccctctgatttggccggtgggggccatcggtgacgtgggaacgatggtttcagggaagcagtggctcagagctccgtgacgttttttggaacgggaggtgcgagatgcagacatttaacacatccggggctgtagccaggcagaggagcgtcagaccccccaccctgtttggaagggagaacccatcagattcgccttgggtgtagatgaaacagaaataaaagaatcaaagacgaaaaaaaaaaaaaaaactggggcattatgtcggggggaaaagggttttacatgggcctggttaagtgtttcggaaccatttttgtaaaagggaaattgggggccaaggggggataatggaaagagtac

SEQ ID NO: 381555 - DNA, 2096 bp, Homo sapiens
acgcggggcgcgcggctccgtcggctaccgcgggcgggcgcaggcgacgggcacggcgggcgagcgggcggtatggcggcggcggggcccgcggcggggccgacggggcccgagcccatgccgagctacgcgcagctagtgcagcgcggctggggcagcgcgctggcggcggcgcggggctgcacggactgcggctgggggctggcgcgtcgcggcctggctgagcacgcgcacctggcgccgcccgagctgctgctgctggcgctcggcgcgctgggctggaccgcgctgcgctccgcggccactgcgcgcctctttcggcccctggcgaagcggtgctgcctccagcccagagatgccgccaagatgcccgagagcgcttggaagtttctcttctacctgggcagctggagctacagtgcctacctgctgtttggcaccgactaccccttcttccatgacccaccatctgtcttctacgactggacgccgggcatggcagtgccacgggacattgcagccgcctacctgctccagggaagcttctatggccactccatctacgctacgctatacatggacacctggcgcaaggactcggtggtcatgctgctccaccacgtggtcactctcatcctcatcgtctcctcctacgccttccggtaccacaatgtgggcatccttgtgctcttcctgcacgatatcagtgacgtgcagcttgagttcaccaagctcaacatttacttcaagtcccgcggcggctcctaccatcggctgcatgccttggcagcagacttgggctgcctcagcttcggcttcagctggttctggttccgcctctactggttcccgctcaaggtcctgtatgccaccagtcactgcagtctgcgcacggtgcctgacatccccttctacttcttcttcaatgcgctcctgctgctgctcacccttatgaacctctactggttcctgtacatcgtggcgtttgcagccaaggtgttgacaggccaggtgcacgagctgaaggacctgcgggagtatgacacagccgaggcccagagcctgaagcccagcaaagccgagtgagtgtggaggggcccgcaccccgcgttccctcctttagtgtcacccgtccaagcgtgttcgtgggcaggcccccaagacccagcagcagatgaggccgacgcggatgctgccccccaagcctactccaaaacagagactgcaataaaggcgtggacgatgtggccagtaccctgaaggacaggacagtgaggaaggggagggagaggctggggaggggcaggcagggcgacaggcagggtctcagcggtagggacactgagggccaggcctagtggctggtgtggcgggagtggcgagccagggccctgtgggtggtgaggagtagttgctggccagcctggatgacgacctctgacccatgtcgccactggagctggtggcagtggggctggggaggaaggaacgccaagggccacagagagaacccaggctccatctgggccgagacatcctggcctctgagtttgacaggggagcccactgcccggccaaacaggagctggggctgggagctcagactcagtccagcccaggtgggagtcctggggaaggagatagcccacgagcctcaccagccctgggtgacagccagatggtgtccgaagccccaggcctggggcaggcagggggtgtctgggccagggatgaacggaggccaaactgggtaacaagcagagtcgggtgtgcagtgtctcataggcaacgtgaggagtgtttgagcaggagccggggcaggaggttgtggaaggccctggaaggtgccgaccagccaggccctctgatttggccggtgggggccatcggtgacgtgggaacgatggtttcagggaagcagtggctcagagctccgtgacgttttttggaacgggaggtgcgagatgcagacatttaacacatccggggctgtagccaggcagaggagcgtcagaccccccaccctgtttggaagggagaacccatcagattcgccttgggtgtagatgaaacagaaataaaagaatcaaagacga

SEQ ID NO: 381556 - DNA, 1965 bp, Homo sapiens
gctcggaacccccgggcagggctcggggaaggacagagcagagacatccagagcgtggcgtcacctggctgggccggatccccagcttcagtcctggggattcctattggtccgtcatgcacttatccggtcttgggcacgggaagaccaatggtatcctctggttgaagcccctgggcccttgcagaaggcgctgtatttctccctttaactcagccctgggggtcttgggttcggctgccattggggcgcacaattgcagccgcctacctgctccagggaagcttctatggccactccatctacgctacgctatacatggacacctggcgcaaggactcggtggtcatgctgctccaccacgtggtcactctcatcctcatcgtctcctcctacgccttccggtaccacaatgtgggcatccttgtgctcttcctgcacgatatcagtgacgtgcagcttgagttcaccaagctcaacatttacttcaagtcccgcggcggctcctaccatcggctgcatgccttggcagcagacttgggctgcctcagcttcggcttcagctggttctggttccgcctctactggttcccgctcaaggtcctgtatgccaccagtcactgcagtctgcgcacggtgcctgacatccccttctacttcttcttcaatgcgctcctgctgctgctcacccttatgaacctctactggttcctgtacatcgtggcgtttgcagccaaggtgttgacaggccaggtgcacgagctgaaggacctgcgggagtatgacacagccgaggcccagagcctgaagcccagcaaagccgagtgagtgtggaggggcccgcaccccgcgttccctcctttagtgtcacccgtccaagcgtgttcgtgggcaggcccccaagacccagcagcagatgaggccgacgcggatgctgccccccaagcctactccaaaacagagactgcaataaaggcgtggacgatgtggccagtaccctgaaggacaggacagtgaggaaggggagggagaggctggggaggggcaggcagggcgacaggcagggtctcagcggtagggacactgagggccaggcctagtggctggtgtggcgggagtggcgagccagggccctgtgggtggtgaggagtagttgctggccagcctggatgacgacctctgacccatgtcgccactggagctggtggcagtggggctggggaggaaggaacgccaagggccacagagagaacccaggctccatctgggccgagacatcctggcctctgagtttgacaggggagcccactgcccggccaaacaggagctggggctgggagctcagactcagtccagcccaggtgggagtcctggggaaggagatagcccacgagcctcaccagccctgggtgacagccagatggtgtccgaagccccaggcctggggcaggcagggggtgtctgggccagggatgaacggaggccaaactgggtaacaagcagagtcgggtgtgcagtgtctcataggcaacgtgaggagtgtttgagcaggagccggggcaggaggttgtggaaggccctggaaggtgccgaccagccaggccctctgatttggccggtgggggccatcggtgacgtgggaacgatggtttcagggaagcagtggctcagagctccgtgacgttttttggaacgggaggtgcgagatgcagacatttaacacatccggggctgtagccaggcagaggagcgtcagaccccccaccctgtttggaagggagaacccatcagattcgccttgggtgtagatgaaacagaaataaaagaatcaaagacgaaaaaaaaaaaaaaaactggggcattatgtcggggggaaaagggttttacatgggcctggttaagtgtttcggaaccatttttgtaaaagggaaattgggggccaaggggggataatggaaagagtac

SEQ ID NO: 381557 - DNA, 1265 bp, Homo sapiens
acgcggggcgcgcggctccgtcggctaccgcgggcgggcgcaggcgacgggcacggcgggcgagcgggcggtatggcggcggcggggcccgcggcggggccgacggggcccgagcccatgccgagctacgcgcagctagtgcagcgcggctggggcagcgcgctggcggcggcgcggggctgcacggactgcggctgggggctggcgcgtcgcggcctggctgagcacgcgcacctggcgccgcccgagctgctgctgctggcgctcggcgcgctgggctggaccgcgctgcgctccgcggccactgcgcgcctctttcggcccctggcgaagcggtgctgcctccagcccagagatgccgccaagatgcccgagagcgcttggaagtttctcttctacctgggcagctggagctacagtgcctacctgctgtttggcaccgactaccccttcttccatgacccaccatctgtcttctacgactggacgccgggcatggcagtgccacgggacattgcagccgcctacctgctccagggaagcttctatggccactccatctacgctacgctatacatggacacctggcgcaaggactcggtggtcatgctgctccaccacgtggtcactctcatcctcatcgtctcctcctacgccttccggtaccacaatgtgggcatccttgtgctcttcctgcacgatatcagtgacgtgcagcttgagttcaccaagctcaacatttacttcaagtcccgcggcggctcctaccatcggctgcatgccttggcagcagacttgggctgcctcagcttcggcttcagctggttctggttccgcctctactggttcccgctcaaggtcctgtatgccaccagtcactgcagtctgcgcacggtgcctgacatccccttctacttcttcttcaatgcgctcctgctgctgctcacccttatgaacctctactggttcctgtacatcgtggcgtttgcagccaaggtgttgacaggccaggtgcacgagctgaaggacctgcgggagtatgacacagccgaggcccagagcctgaagcccagcaaagccgaggaagcagtggctcagagctccgtgacgttttttggaacgggaggtgcgagatgcagacatttaacacatccggggctgtagccaggcagaggagcgtcagaccccccaccctgtttggaagggagaacccatcagattcgccttgggtgtagatgaaacagaaataaaagaatcaaagacga

SEQ ID NO: 381558 - DNA, 2223 bp, Homo sapiens
acgcggggcgcgcggctccgtcggctaccgcgggcgggcgcaggcgacgggcacggcgggcgagcgggcggtatggcggcggcggggcccgcggcggggccgacggggcccgagcccatgccgagctacgcgcagctagtgcagcgcggctggggcagcgcgctggcggcggcgcggggctgcacggactgcggctgggggctggcgcgtcgcggcctggctgagcacgcgcacctggcgccgcccgagctgctgctgctggcgctcggcgcgctgggctggaccgcgctgcgctccgcggccactgcgcgcctctttcggcccctggcgaagcggtgctgcctccagcccagagatgccgccaagatgcccgagagcgcttggaagtttctcttctacctgggcagctggagctacagtgcctacctgctgtttggcaccgactaccccttcttccatgacccaccatctgtcttctacgactggacgccgggcatggcagtgccacgggacattgcagccgcctacctgctccagggaagcttctatggccactccatctacgctacgctatacatggacacctggcgcaaggactcggtggtcatgctgctccaccacgtggtcactctcatcctcatcgtctcctcctacgccttccggtaccacaatgtgggcatccttgtgctcttcctgcacgatatcagtgacgtgcagcttgagttcaccaagctcaacatttacttcaagtcccgcggcggctcctaccatcggctgcatgccttggcagcagacttgggctgcctcagcttcggcttcagctggttctggttccgcctctactggttcccgctcaaggtcctgtatgccaccagtcactgcagtctgcgcacggtgcctgacatccccttctacttcttcttcaatgcgctcctgctgctgctcacccttatgaacctctactggttcctgtacatcgtggcgtttgcagccaaggtgttgacaggccaggtgcacgagctgaaggacctgcgggagtatgacacagccgaggcccagagcctgaagcccagcaaagccgagtgagtgtggaggggcccgcaccccgcgttccctcctttagtgtcacccgtccaagcgtgttcgtgggcaggcccccaagacccagcagcagatgaggccgacgcggatgctgccccccaagcctactccaaaacagagactgcaataaaggcgtggacgatgtggccagtaccctgaaggacaggacagtgaggaaggggagggagaggctggggaggggcaggcagggcgacaggcagggtctcagcggtagggacactgagggccaggcctagtggctggtgtggcgggagtggcgagccagggccctgtgggtggtgaggagtagttgctggccagcctggatgacgacctctgacccatgtcgccactggagctggtggcagtggggctggggaggaaggaacgccaagggccacagagagaacccaggctccatctgggccgagacatcctggcctctgagtttgacaggggagcccactgcccggccaaacaggagctggggctgggagctcagactcagtccagcccaggtgggagtcctggggaaggagatagcccacgagcctcaccagccctgggtgacagccagatggtgtccgaagccccaggcctggggcaggcagggggtgtctgggccagggatgaacggaggccaaactgggtaacaagcagagtcgggtgtgcagtgtctcataggcaacgtgaggagtgtttgagcaggagccggggcaggaggttgtggaaggccctggaaggtgccgaccagccaggccctctgatttggccggtgggggccatcggtgacgtgggaacgatggtttcagggaagcagtggctcagagctccgtgacgttttttggaacgggaggtgcgagatgcagacatttaacacatccggggctgtagccaggcagaggagcgtcagaccccccaccctgtttggaagggagaacccatcagattcgccttgggtgtagatgaaacagaaataaaagaatcaaagacgaaaaaaaaaaaaaaaactggggcattatgtcggggggaaaagggttttacatgggcctggttaagtgtttcggaaccatttttgtaaaagggaaattgggggccaaggggggataatggaaagagtac

SEQ ID NO: 381559 - DNA, 2827 bp, Homo sapiens
acgcggggcgcgcggctccgtcggctaccgcgggcgggcgcaggcgacgggcacggcgggcgagcgggcggtatggcggcggcggggcccgcggcggggccgacggggcccgagcccatgccgagctacgcgcagctagtgcagcgcggctggggcagcgcgctggcggcggcgcggggctgcacggactgcggctgggggctggcgcgtcgcggcctggctgagcacgcgcacctggcgccgcccgagctgctgctgctggcgctcggcgcgctgggctggaccgcgctgcgctccgcggccactgcgcgcctctttcgggtcagtgtggccgggggccgggacgaggggaccccggactgggggaagccgggaccggggacctggggccgccggcgcgttcctttcttccagcgctggctgctgcggatgaaggggtcgccggaacgtgggtgggggcctcgggctggagaggcccaggacgttggagccccaggataaggtctctcgggccgccgcgcgcccccttcagacagtgctgcgtgggggaaccgggtagatgcgggggtgtggccgggctgggcccctggcgaagcggtgctgcctccagcccagagatgccgccaagatgcccgagagcgcttggaagtttctcttctacctgggcagctggagctacagtgcctacctgctgtttggcaccgactaccccttcttccatgacccaccatctgtcttctacgactggacgccgggcatggcagtgccacgggacattgcagccgcctacctgctccagggaagcttctatggccactccatctacgctacgctatacatggacacctggcgcaaggactcggtggtcatgctgctccaccacgtggtcactctcatcctcatcgtctcctcctacgccttccggtaccacaatgtgggcatccttgtgctcttcctgcacgatatcagtgacgtgcagcttgagttcaccaagctcaacatttacttcaagtcccgcggcggctcctaccatcggctgcatgccttggcagcagacttgggctgcctcagcttcggcttcagctggttctggttccgcctctactggttcccgctcaaggtcctgtatgccaccagtcactgcagtctgcgcacggtgcctgacatccccttctacttcttcttcaatgcgctcctgctgctgctcacccttatgaacctctactggttcctgtacatcgtggcgtttgcagccaaggtgttgacaggccaggtgcacgagctgaaggacctgcgggagtatgacacagccgaggcccagagcctgaagcccagcaaagccgagaagccactgaggaacggcctggtgaaggacaagcgcttctgaacccctcggccccgcccccgtggacccggccccaccccgaataccccggccacgctccccgtccttggccgcccctccaccccctccaactctgctcctctagggccgccgccacctcccctgggaccccgccccctcatcctgcctccatttcccggccacgccccccaggacccctgcccctccggggacaccggccccgccctcagcccactggtcccgggccgccgcggaccctgcgcactctctggtcatcgcctgggaggaagatgccaccgccgcagcaaggtccctgcggccaccacctcctcctcctcctggccctgctgctgccctcgctgcccctgacccgcgcccccgtgcccccaggcccagccgccgccctgctccaggctctaggactgcgcgatgagccccagggtgcccccaggctccggccggttcccccggtcatgtggcgcctgtttcgacgccgggacccccaggagaccaggtctggctcgcggcggacgtccccaggggtcaccctgcaaccgtgccacgtggaggagctgggggtcgccggaaacatcgtgcgccacatcccggaccgcggtgcgcccacccgggcctcggagcctgtctcggccgcggggcattgccctgagtggacagtcgtcttcgacctgtcggctgtggaacccgctgagcgcccgagccgggcccgcctggagctgcgtttcgcggcggcggcggcggcagccccggagggcggctgggagctgagcgtggcgcaagcgggccagggcgcgggcgcggaccccgggccggtgctgctccgccagttggtgcccgccctggggccgccagtgcgcgcggagctgctgggcgccgcttgggctcgcaacgcctcatggccgcgcagcctccgcctggcgctggcgctacgcccccgggcccctgccgcctgcgcgcgcctggccgaggcctcgctgctgctggtgaccctcgacccgcgcctgtgccaccccctggcccggccgcggcgcgacgccgaacccgtgttgggcggcggccccgggggcgcttgtcgcgcgcggcggctgtacgtgagcttccgcgaggtgggctggcaccgctgggtcatcgcgccgcgcggcttcctggccaactactgccagggtcagtgcgcgctgcccgtcgcgctgtcggggtccggggggccgccggcgctcaaccacgctgtgctgcgcgcgctcatgcacgcggccgccccgggagccgccgacctgccctgctgcgtgcccgcgcgcctgtcgcccatctccgtgctcttctttgacaacagcgacaacgtggtgctgcggcagtatgaggacatggtggtggacgagtgcggctgccgctaacccggggcgggcagggacgcgggcccaacaataaatgccgcgtggtctgctc

SEQ ID NO: 381560 - DNA, 2424 bp, Homo sapiens
acgcggggcgcgcggctccgtcggctaccgcgggcgggcgcaggcgacgggcacggcgggcgagcgggcggtatggcggcggcggggcccgcggcggggccgacggggcccgagcccatgccgagctacgcgcagctagtgcagcgcggctggggcagcgcgctggcggcggcgcggggctgcacggactgcggctgggggctggcgcgtcgcggcctggctgagcacgcgcacctggcgccgcccgagctgctgctgctggcgctcggcgcgctgggctggaccgcgctgcgctccgcggccactgcgcgcctctttcggcccctggcgaagcggtgctgcctccagcccagagatgccgccaagatgcccgagagcgcttggaagtttctcttctacctgggcagctggagctacagtgcctacctgctgtttggcaccgactaccccttcttccatgacccaccatctgtcttctacgactggacgccgggcatggcagtgccacgggacattgcagccgcctacctgctccagggaagcttctatggccactccatctacgctacgctatacatggacacctggcgcaaggactcggtggtcatgctgctccaccacgtggtcactctcatcctcatcgtctcctcctacgccttccggtaccacaatgtgggcatccttgtgctcttcctgcacgatatcagtgacgtgcagcttgagttcaccaagctcaacatttacttcaagtcccgcggcggctcctaccatcggctgcatgccttggcagcagacttgggctgcctcagcttcggcttcagctggttctggttccgcctctactggttcccgctcaaggtcctgtatgccaccagtcactgcagtctgcgcacggtgcctgacatccccttctacttcttcttcaatgcgctcctgctgctgctcacccttatgaacctctactggttcctgtacatcgtggcgtttgcagccaaggtgttgacaggccaggtgcacgagctgaaggacctgcgggagtatgacacagccgaggcccagagcctgaagcccagcaaagccgagaagccactgaggaacggcctggtgaaggacaagcgcttctgaacccctcggccccgcccccgtggacccggccccaccccgaataccccggccacgctccccgtccttggccgcccctccaccccctccaactctgctcctctagggccgccgccacctcccctgggaccccgccccctcatcctgcctccatttcccggccacgccccccaggacccctgcccctccggggacaccggccccgccctcagcccactggtcccgggccgccgcggaccctgcgcactctctggtcatcgcctgggaggaagatgccaccgccgcagcaaggtccctgcggccaccacctcctcctcctcctggccctgctgctgccctcgctgcccctgacccgcgcccccgtgcccccaggcccagccgccgccctgctccaggctctaggactgcgcgatgagccccagggtgcccccaggctccggccggttcccccggtcatgtggcgcctgtttcgacgccgggacccccaggagaccaggtctggctcgcggcggacgtccccaggggtcaccctgcaaccgtgccacgtggaggagctgggggtcgccggaaacatcgtgcgccacatcccggaccgcggtgcgcccacccgggcctcggagcctgtctcggccgcggggcattgccctgagtggacagtcgtcttcgacctgtcggctgtggaacccgctgagcgcccgagccgggcccgcctggagctgcgtttcgcggcggcggcggcggcagccccggagggcggctgggagctgagcgtggcgcaagcgggccagggcgcgggcgcggaccccgggccggtgctgctccgccagttggtgcccgccctggggccgccagtgcgcgcggagctgctgggcgccgcttgggctcgcaacgcctcatggccgcgcagcctccgcctggcgctggcggcttgtcgcgcgcggcggctgtacgtgagcttccgcgaggtgggctggcaccgctgggtcatcgcgccgcgcggcttcctggccaactactgccagggtcagtgcgcgctgcccgtcgcgctgtcggggtccggggggccgccggcgctcaaccacgctgtgctgcgcgcgctcatgcacgcggccgccccgggagccgccgacctgccctgctgcgtgcccgcgcgcctgtcgcccatctccgtgctcttctttgacaacagcgacaacgtggtgctgcggcagtatgaggacatggtggtggacgagtgcggctgccgctaacccggggcgggcagggacgcgggcccaacaataaatgccgcgtggtctgctc

SEQ ID NO: 381561 - DNA, 1494 bp, Homo sapiens
acgcggggcgcgcggctccgtcggctaccgcgggcgggcgcaggcgacgggcacggcgggcgagcgggcggtatggcggcggcggggcccgcggcggggccgacggggcccgagcccatgccgagctacgcgcagctagtgcagcgcggctggggcagcgcgctggcggcggcgcggggctgcacggactgcggctgggggctggcgcgtcgcggcctggctgagcacgcgcacctggcgccgcccgagctgctgctgctggcgctcggcgcgctgggctggaccgcgctgcgctccgcggccactgcgcgcctctttcggcccctggcgaagcggtgctgcctccagcccagagatgccgccaagatgcccgagagcgcttggaagtttctcttctacctgggcagctggagctacagtgcctacctgctgtttggcaccgactaccccttcttccatgacccaccatctgtcttctacgactggacgccgggcatggcagtgccacgggacattgcagccgcctacctgctccagggaagcttctatggccactccatctacgctacgctatacatggacacctggcgcaaggactcggtggtcatgctgctccaccacgtggtcactctcatcctcatcgtctcctcctacgccttccggtaccacaatgtgggcatccttgtgctcttcctgcacgatatcagtgacgtgcagcttgagttcaccaagctcaacatttacttcaagtcccgcggcggctcctaccatcggctgcatgccttggcagcagacttgggctgcctcagcttcggcttcagctggttctggttccgcctctactggttcccgctcaaggtcctgtatgccaccagtcactgcagtctgcgcacggtgcctgacatccccttctacttcttcttcaatgcgctcctgctgctgctcacccttatgaacctctactggttcctgtacatcgtggcgtttgcagccaaggtgttgacaggccaggtgcacgagctgaaggacctgcgggagtatgacacagccgaggcccagagcctgaagcccagcaaagccgagtgagtgtggaggggcccgcaccccgcgttccctcctttagtgtcacccgtccaagcgtgttcgtgggcaggcccccaagacccagcagcagatgaggccgacgcggatgctgccccccaagcctactccaaaacagagactgcaataaaggcctggaaggtgccgaccagccaggccctctgatttggccggtgggggccatcggtgacgtgggaacgatggtttcagggaagcagtggctcagagctccgtgacgttttttggaacgggaggtgcgagatgcagacatttaacacatccggggctgtagccaggcagaggagcgtcagaccccccaccctgtttggaagggagaacccatcagattcgccttgggtgtagatgaaacagaaataaaagaatcaaagacga

SEQ ID NO: 381562 - DNA, 1807 bp, Homo sapiens
ccaagtgcctgaccgccaggccctcacacccaggctcctgggcactgtggtgtgaggcgaggcctcgggatccatcaccgcaggatgctgtgaaaagtactcgcgatggcagccaggtagcaagcccttgccagtggagagcactggatgtcatggtggcaaacaaggcagccatttgctgtcctcctcccacgagtggaaggggtttccaaggaagccacagggcagctgaccacgtgcttgtgtgaggcattttcagtctgttctgcatatgattctcagggcacactctgtggtatgtgaaataggtttccttccacatacagcagaagagaggcaaaggctggtaggaaggaggaagacattggctgggggcttggatgtggggccgtcagggcaggagggaggaagccccagctggaatgaaactcagagcaagtgaccgagggaggacacggctcctgccactgaggccgggcacctgatgcccagcactgtcctggcgccagacacagggagcaggcagtcaagtgaggtctgacccccatggccacgctcaggagagaaagaccatgctcaggacactgtccaaggtgcacaagatgctgggaggtcccttgtttggtgaagaaagggagcatttagagcagttgatggtggtgtgtcctccgtgttctgaaattccagatgatctgtgttggattcttggcttctaccccatgattctcctcaaagaaattgtgtgtgatgtgtgtgtgtgtgtgtgtgtgtgtgtctgtgtcacaggagatgcagtgcctgtacaggtgtgttcagtgtgtggatgtcattaacccatagggctatgcaacaaaagacacatttaatagaagtaaaacacacaagaccgctgcctggtctcggggttcagcatgattgtgaccaaacctttttatagaatttccttacctgaaggcacaacactctgaaactttaaagataacagagtattttattccaatagaataaaccagggaatctcggactgtgcatgtggatcactgtgctcctgttgcaaagtagaaggatgtgtatttttgacactgacgttttgtctcttgttccccagcccccagcccatgttatcttgggtgtcgaatgtgtccattccatgcagaaccacagccatttccccaggcagtgttgggtcgagaatccacttttctaaacccacacagcctagctggcttgtctagactcttctaggcattggaattgatgaaaactacagggagcggggaaaggagacattatgtcttgttttcctgactttgggttttgtttctcactgtgtcttctccggctatcatatatgtcccctgaatctcatagtgagctgccaaatttgaagtgcatcacccagttgtctgcatctggaaccagtcaagcagtggctgtagtttgaacaagttatgtgtgcatgtaacatatatacatatatacatatatacaagtatgtgcatgataatgtatatcttcgtactttttgatacaatgtattcatttgttaatttttaattatatttgatataaatcaaaggtttgttgcaaaactttatatttaagaagtgttaaaaaaaaaaaaaagtcccaaccatgcaacacaactgggacctacttaaaaagaaattctgtgattgactagtttgctgcctgagtcatatttatcagccaaactttggattctgctgttgtttctacaatgacattttgtatgaagcaaagtccttgaattaaaataaaaacttagcaaaaaatcaaaaacaaa

SEQ ID NO: 381563 - DNA, 7364 bp, Homo sapiens
gcggcggcggctgcggcggtggggccgggcgaggtccgctgcggtcccggcggctccgtggctgctccgctctgagcgcctggcgcgccccgcgccctccctgccggggccgctgggccggggatgcacgcggggcccgggagccatggtccgcttcggggacgagctgggcggccgctatggaggccccggcggcggagagcgggcccggggcggcggggccggcggggcggggggcccgggtcccggggggctgcagcccggccagcgggtcctctacaagcaatcgatcgcgcagcgcgcgcggaccatggcgctgtacaaccccatcccggtcaagcagaactgcttcaccgtcaaccgctcgctcttcgtcttcagcgaggacaacgtcgtccgcaaatacgcgaagcgcatcaccgagtggcctccattcgagtatatgatcctggccaccatcatcgccaactgcatcgtgctggccctggagcagcacctccctgatggggacaaaacgcccatgtccgagcggctggacgacacggagccctatttcatcgggatcttttgcttcgaggcagggatcaaaatcatcgctctgggctttgtcttccacaagggctcttacctgcggaacggctggaacgtcatggacttcgtggtcgtcctcacagggatccttgccacggctggaactgacttcgacctgcgaacactgagggctgtgcgtgtgctgaggcccctgaagctggtgtctgggattccaagtttgcaggtggtgctcaagtccatcatgaaggccatggttccactcctgcagattgggctgcttctcttctttgccatcctcatgtttgccatcattggcctggagttctacatgggcaagttccacaaggcctgtttccccaacagcacagatgcggagcccgtgggtgacttcccctgtggcaaggaggccccagcccggctgtgcgagggcgacactgagtgccgggagtactggccaggacccaactttggcatcaccaactttgacaatatcctgtttgccatcttgacggtgttccagtgcatcaccatggagggctggactgacatcctctataatacaaacgatgcggccggcaacacctggaactggctctacttcatccctctcatcatcatcggctccttcttcatgctcaacctggtgctgggcgtgctctcgggggagtttgccaaggagcgagagagggtggagaaccgccgcgccttcctgaagctgcgccggcagcagcagatcgagcgagagctcaacgggtacctggagtggatcttcaaggcggaggaagtcatgctggccgaggaggacaggaatgcagaggagaagtcccctttggacgtgctgaagagagcggccaccaagaagagcagaaatgacctgatccacgcagaggagggagaggaccggtttgcagatctctgtgctgttggatcccccttcgcccgcgccagcctcaagagcgggaagacagagagctcgtcatacttccggaggaaggagaagatgttccggttttttatccggcgcatggtgaaggctcagagcttctactgggtggtgctgtgcgtggtggccctgaacacactgtgtgtggccatggtgcattacaaccagccgcggcggcttaccacgaccctgtattttgcagagtttgttttcctgggtctcttcctcacagagatgtccctgaagatgtatggcctggggcccagaagctacttccggtcctccttcaactgcttcgactttggggtcatcgtggggagcgtctttgaagtggtctgggcggccatcaagccgggaagctcctttgggatcagtgtgctgcgggccctccgcctgctgaggatcttcaaagtcacgaagtactggagctccctgcggaacctggtggtgtccctgctgaactccatgaagtccatcatcagcctgctcttcttgctcttcctgttcattgtggtcttcgccctgctggggatgcagctgtttgggggacagttcaacttccaggatgagactcccacaaccaacttcgacaccttccctgccgccatcctcactgtcttccagatcctgacgggagaggactggaatgcagtgatgtatcacgggatcgaatcgcaaggcggcgtcagcaaaggcatgttctcgtccttttacttcattgtcctgacactgttcggaaactacactctgctgaatgtctttctggccatcgctgtggacaacctggccaacgcccaagagctgaccaaggatgaagaggagatggaagaagcagccaatcagaagcttgctctgcaaaaggccaaagaagtggctgaagtcagccccatgtctgccgcgaacatctccatcgccgccaggcagcagaactcggccaaggcgcgctcggtgtgggagcagcgggccagccagctacggctgcagaacctgcgggccagctgcgaggcgctgtacagcgagatggaccccgaggagcggctgcgcttcgccactacgcgccacctgcggcccgacatgaagacgcacctggaccggccgctggtggtggagctgggccgcgacggcgcgcgggggcccgtgggaggcaaagcccgacctgaggctgcggaggcccccgagggcgtcgaccctccgcgcaggcaccaccggcaccgcgacaaggacaagacccccgcggcgggggaccaggaccgagcagaggccccgaaggcggagagcggggagcccggtgcccgggaggagcggccgcggccgcaccgcagccacagcaaggaggccgcggggcccccggaggcgcggagcgagcgcggccgaggcccaggccccgagggcggccggcggcaccaccggcgcggctccccggaggaggcggccgagcgggagccccgacgccaccgcgcgcaccggcaccaggatccgagcaaggagtgcgccggcgccaagggcgagcggcgcgcgcggcaccgcggcggcccccgagcggggccccgggaggcggagagcggggaggagccggcgcggcggcaccgggcccggcacaaggcgcagcctgctcacgaggctgtggagaaggagaccacggagaaggaggccacggagaaggaggctgagatagtggaagccgacaaggaaaaggagctccggaaccaccagccccgggagccacactgtgacctggagaccagtgggactgtgactgtgggtcccatgcacacactgcccagcacctgtctccagaaggtggaggaacagccagaggatgcagacaatcagcggaacgtcactcgcatgggcagtcagcccccagacccgaacactattgtacatatcccagtgatgctgacgggccctcttggggaagccacggtcgttcccagtggtaacgtggacctggaaagccaagcagaggggaagaaggaggtggaagcggatgacgtgatgaggagcggcccccggcctatcgtcccatacagctccatgttctgtttaagccccaccaacctgctccgccgcttctgccactacatcgtgaccatgaggtacttcgaggtggtcattctcgtggtcatcgccttgagcagcatcgccctggctgctgaggacccagtgcgcacagactcgcccaggaacaacgctctgaaatacctggattacattttcactggtgtctttacctttgagatggtgataaagatgatcgacttgggactgctgcttcaccctggagcctatttccgggacttgtggaacattctggacttcattgtggtcagtggcgccctggtggcgtttgctttctcaggatccaaagggaaagacatcaataccatcaagtctctgagagtccttcgtgtcctgcggcccctcaagaccatcaaacggctgcccaagctcaaggctgtgtttgactgtgtggtgaactccctgaagaatgtcctcaacatcttgattgtctacatgctcttcatgttcatatttgccgtcattgcggtgcagctcttcaaagggaagtttttctactgcacagatgaatccaaggagctggagagggactgcaggggtcagtatttggattatgagaaggaggaagtggaagctcagcccaggcagtggaagaaatacgactttcactacgacaatgtgctctgggctctgctgacgctgttcacagtgtccacgggagaaggctggcccatggtgctgaaacactccgtggatgccacctatgaggagcagggtccaagccctgggtaccgcatggagctgtccatcttctacgtggtctactttgtggtctttcccttcttcttcgtcaacatctttgtggctttgatcatcatcaccttccaggagcagggggacaaggtgatgtctgaatgcagcctggagaagaacgagagggcttgcattgacttcgccatcagcgccaaacccctgacacggtacatgccccaaaaccggcagtcgttccagtataagacgtggacatttgtggtctccccgccctttgaatacttcatcatggccatgatagccctcaacactgtggtgctgatgatgaagttctatgatgcaccctatgagtacgagctgatgctgaaatgcctgaacatcgtgttcacatccatgttctccatggaatgcgtgctgaagatcatcgcctttggggtgctgaactatttcagagatgcctggaatgtctttgactttgtcactgtgttgggaagtattactgatattttagtaacagagattgcggaaacgaacaatttcatcaacctcagcttcctccgcctctttcgagctgcgcggctgatcaagctgctccgccagggctacaccatccgcatcctgctgtggacctttgtccagtccttcaaggccctgccctacgtgtgtctgctcattgccatgctgttcttcatctacgccatcatcggcatgcaggtgtttgggaatattgccctggatgatgacaccagcatcaaccgccacaacaacttccggacgtttttgcaagccctgatgctgctgttcaggagcgccacgggggaggcctggcacgagatcatgctgtcctgcctgagcaaccaggcctgtgatgagcaggccaatgccaccgagtgtggaagtgactttgcctacttctacttcgtctccttcatcttcctgtgctcctttctgatgttgaacctctttgtggctgtgatcatggacaattttgagtacctcacgcgggactcttccatcctaggtcctcaccacttggatgagttcatccgggtctgggctgaatacgacccggctgcgtgtgggcgcatcagttacaatgacatgtttgagatgctgaaacacatgtccccgcctctggggctggggaagaaatgccctgctcgagttgcttacaagcgcctggttcgcatgaacatgcccatctccaacgaggacatgactgttcacttcacgtccacgctgatggccctcatccggacggcactggagatcaagctggccccagctgggacaaagcagcatcagtgtgacgcggagttgaggaaggagatttccgttgtgtgggccaatctgccccagaagactttggacttgctggtaccaccccataagcctgatgagatgacagtggggaaggtttatgcagctctgatgatatttgacttctacaagcagaacaaaaccaccagagaccagatgcagcaggctcctggaggcctctcccagatgggtcctgtgtccctgttccaccctctgaaggccaccctggagcagacacagccggctgtgctccgaggagcccgggttttccttcgacagaagagttccacctccctcagcaatggcggggccatacaaaaccaagagagtggcatcaaagagtctgtctcctggggcactcaaaggacccaggatgcaccccatgaggccaggccacccctggagcgtggccactccacagagatccctgtggggcggtcaggagcactggctgtggacgttcagatgcagagcataacccggaggggccctgatggggagccccagcctgggctggagagccagggtcgagcggcctccatgccccgccttgcggccgagactcagcccgtcacagatgccagccccatgaagcgctccatctccacgctggcccagcggccccgtgggactcatctttgcagcaccaccccggaccgcccaccccctagccaggcgtcgtcgcaccaccaccaccaccgctgccaccgccgcagggacaggaagcagaggtccctggagaaggggcccagcctgtctgccgatatggatggcgcaccaagcagtgctgtggggccggggctgcccccgggagaggggcctacaggctgccggcgggaacgagagcgccggcaggagcggggccggtcccaggagcggaggcagccctcatcctcctcctcggagaagcagcgcttctactcctgcgaccgctttgggggccgtgagcccccgaagcccaagccctccctcagcagccacccaacgtcgccaacagctggccaggagccgggaccccacccacagggcagtggttccgtgaatgggagccccttgctgtcaacatctggtgctagcacccccggccgcggtgggcggaggcagctcccccagacgcccctgactccccgccccagcatcacctacaagacggccaactcctcacccatccacttcgccggggctcagaccagcctccctgccttctccccaggccggctcagccgtgggctttccgaacacaacgccctgctgcagagagaccccctcagccagcccctggcccctggctctcgaattggctctgacccttacctggggcagcgtctggacagtgaggcctctgtccacgccctgcctgaggacacgctcactttcgaggaggctgtggccaccaactcgggccgctcctccaggacttcctacgtgtcctccctgacctcccagtctcaccctctccgccgcgtgcccaacggttaccactgcaccctgggactcagctcgggtggccgagcacggcacagctaccaccaccctgaccaagaccactggtgctagctgcaccgtgaccgctcagacgcctgcatgcagcaggcgtgtgttccagtggatgagttttatcatccacacggggcagtcggccctcgggggaggccttgcccaccttggtgaggctcctgtggcccctccctccccctcctcccctcttttactctagacgacgaataaagccctgttgcttgagtgtacgtaccgc

SEQ ID NO: 381564 - DNA, 7177 bp, Homo sapiens
gcggcggcggctgcggcggtggggccgggcgaggtccgctgcggtcccggcggctccgtggctgctccgctctgagcgcctggcgcgccccgcgccctccctgccggggccgctgggccggggatgcacgcggggcccgggagccatggtccgcttcggggacgagctgggcggccgctatggaggccccggcggcggagagcgggcccggggcggcggggccggcggggcggggggcccgggtcccggggggctgcagcccggccagcgggtcctctacaagcaatcgatcgcgcagcgcgcgcggaccatggcgctgtacaaccccatcccggtcaagcagaactgcttcaccgtcaaccgctcgctcttcgtcttcagcgaggacaacgtcgtccgcaaatacgcgaagcgcatcaccgagtggcctccattcgagtatatgatcctggccaccatcatcgccaactgcatcgtgctggccctggagcagcacctccctgatggggacaaaacgcccatgtccgagcggctggacgacacggagccctatttcatcgggatcttttgcttcgaggcagggatcaaaatcatcgctctgggctttgtcttccacaagggctcttacctgcggaacggctggaacgtcatggacttcgtggtcgtcctcacagggatccttgccacggctggaactgacttcgacctgcgaacactgagggctgtgcgtgtgctgaggcccctgaagctggtgtctgggattccaagtttgcaggtggtgctcaagtccatcatgaaggccatggttccactcctgcagattgggctgcttctcttctttgccatcctcatgtttgccatcattggcctggagttctacatgggcaagttccacaaggcctgtttccccaacagcacagatgcggagcccgtgggtgacttcccctgtggcaaggaggccccagcccggctgtgcgagggcgacactgagtgccgggagtactggccaggacccaactttggcatcaccaactttgacaatatcctgtttgccatcttgacggtgttccagtgcatcaccatggagggctggactgacatcctctataatacaaacgatgcggccggcaacacctggaactggctctacttcatccctctcatcatcatcggctccttcttcatgctcaacctggtgctgggcgtgctctcgggggagtttgccaaggagcgagagagggtggagaaccgccgcgccttcctgaagctgcgccggcagcagcagatcgagcgagagctcaacgggtacctggagtggatcttcaaggcggaggaagtcatgctggccgaggaggacaggaatgcagaggagaagtcccctttggacgtgctgaagagagcggccaccaagaagagcagaaatgacctgatccacgcagaggagggagaggaccggtttgcagatctctgtgctgttggatcccccttcgcccgcgccagcctcaagagcgggaagacagagagctcgtcatacttccggaggaaggagaagatgttccggttttttatccggcgcatggtgaaggctcagagcttctactgggtggtgctgtgcgtggtggccctgaacacactgtgtgtggccatggtgcattacaaccagccgcggcggcttaccacgaccctgtattttgcagagtttgttttcctgggtctcttcctcacagagatgtccctgaagatgtatggcctggggcccagaagctacttccggtcctccttcaactgcttcgactttggggtcatcgtggggagcgtctttgaagtggtctgggcggccatcaagccgggaagctcctttgggatcagtgtgctgcgggccctccgcctgctgaggatcttcaaagtcacgaagtactggagctccctgcggaacctggtggtgtccctgctgaactccatgaagtccatcatcagcctgctcttcttgctcttcctgttcattgtggtcttcgccctgctggggatgcagctgtttgggggacagttcaacttccaggatgagactcccacaaccaacttcgacaccttccctgccgccatcctcactgtcttccagatcctgacgggagaggactggaatgcagtgatgtatcacgggatcgaatcgcaaggcggcgtcagcaaaggcatgttctcgtccttttacttcattgtcctgacactgttcggaaactacactctgctgaatgtctttctggccatcgctgtggacaacctggccaacgcccaagagctgaccaaggatgaagaggagatggaagaagcagccaatcagaagcttgctctgcaaaaggccaaagaagtggctgaagtcagccccatgtctgccgcgaacatctccatcgccgccaggcagcagaactcggccaaggcgcgctcggtgtgggagcagcgggccagccagctacggctgcagaacctgcgggccagctgcgaggcgctgtacagcgagatggaccccgaggagcggctgcgcttcgccactacgcgccacctgcggcccgacatgaagacgcacctggaccggccgctggtggtggagctgggccgcgacggcgcgcgggggcccgtgggaggcaaagcccgacctgaggctgcggaggcccccgagggcgtcgaccctccgcgcaggcaccaccggcaccgcgacaaggacaagacccccgcggcgggggaccaggaccgagcagaggccccgaaggcggagagcggggagcccggtgcccgggaggagcggccgcggccgcaccgcagccacagcaaggaggccgcggggcccccggaggcgcggagcgagcgcggccgaggcccaggccccgagggcggccggcggcaccaccggcgcggctccccggaggaggcggccgagcgggagccccgacgccaccgcgcgcaccggcaccaggatccgagcaaggagtgcgccggcgccaagggcgagcggcgcgcgcggcaccgcggcggcccccgagcggggccccgggaggcggagagcggggaggagccggcgcggcggcaccgggcccggcacaaggcgcagcctgctcacgaggctgtggagaaggagaccacggagaaggaggccacggagaaggaggctgagatagtggaagccgacaaggaaaaggagctccggaaccaccagccccgggagccacactgtgacctggagaccagtgggactgtgactgtgggtcccatgcacacactgcccagcacctgtctccagaaggtggaggaacagccagaggatgcagacaatcagcggaacgtcactcgcatgggcagtcagcccccagacccgaacactattgtacatatcccagtgatgctgacgggccctcttggggaagccacggtcgttcccagtggtaacgtggacctggaaagccaagcagaggggaagaaggaggtggaagcggatgacgtgatgaggagcggcccccggcctatcgtcccatacagctccatgttctgtttaagccccaccaacctgctccgccgcttctgccactacatcgtgaccatgaggtacttcgaggtggtcattctcgtggtcatcgccttgagcagcatcgccctggctgctgaggacccagtgcgcacagactcgcccaggaacaacgctctgaaatacctggattacattttcactggtgtctttacctttgagatggtgataaagatgatcgacttgggactgctgcttcaccctggagcctatttccgggacttgtggaacattctggacttcattgtggtcagtggcgccctggtggcgtttgctttctcaggatccaaagggaaagacatcaataccatcaagtctctgagagtccttcgtgtcctgcggcccctcaagaccatcaaacggctgcccaagctcaaggctgtgtttgactgtgtggtgaactccctgaagaatgtcctcaacatcttgattgtctacatgctcttcatgttcatatttgccgtcattgcggtgcagctcttcaaagggaagtttttctactgcacagatgaatccaaggagctggagagggactgcaggggtcagtatttggattatgagaaggaggaagtggaagctcagcccaggcagtggaagaaatacgactttcactacgacaatgtgctctgggctctgctgacgctgttcacagtgtccacgggagaaggctggcccatggtgctgaaacactccgtggatgccacctatgaggagcagggtccaagccctgggtaccgcatggagctgtccatcttctacgtggtctactttgtggtctttcccttcttcttcgtcaacatctttgtggctttgatcatcatcaccttccaggagcagggggacaaggtgatgtctgaatgcagcctggagaagaacgagagggcttgcattgacttcgccatcagcgccaaacccctgacacggtacatgccccaaaaccggcagtcgttccagtataagacgtggacatttgtggtctccccgccctttgaatacttcatcatggccatgatagccctcaacactgtggtgctgatgatgaagttctatgatgcaccctatgagtacgagctgatgctgaaatgcctgaacatcgtgttcacatccatgttctccatggaatgcgtgctgaagatcatcgcctttggggtgctgaactatttcagagatgcctggaatgtctttgactttgtcactgtgttgggaagtattactgatattttagtaacagagattgcggaaacgaacaatttcatcaacctcagcttcctccgcctctttcgagctgcgcggctgatcaagctgctccgccagggctacaccatccgcatcctgctgtggacctttgtccagtccttcaaggccctgccctacgtgtgtctgctcattgccatgctgttcttcatctacgccatcatcggcatgcaggtgtttgggaatattgccctggatgatgacaccagcatcaaccgccacaacaacttccggacgtttttgcaagccctgatgctgctgttcaggagcgccacgggggaggcctggcacgagatcatgctgtcctgcctgagcaaccaggcctgtgatgagcaggccaatgccaccgagtgtggaagtgactttgcctacttctacttcgtctccttcatcttcctgtgctcctttctgatgttgaacctctttgtggctgtgatcatggacaattttgagtacctcacgcgggactcttccatcctaggtcctcaccacttggatgagttcatccgggtctgggctgaatacgacccggctgcgtgtgggcgcatcagttacaatgacatgtttgagatgctgaaacacatgtccccgcctctggggctggggaagaaatgccctgctcgagttgcttacaagcgcctggttcgcatgaacatgcccatctccaacgaggacatgactgttcacttcacgtccacgctgatggccctcatccggacggcactggagatcaagctggccccagctgggacaaagcagcatcagtgtgacgcggagttgaggaaggagatttccgttgtgtgggccaatctgccccagaagactttggacttgctggtaccaccccataagcctgatgagatgacagtggggaaggtttatgcagctctgatgatatttgacttctacaagcagaacaaaaccaccagagaccagatgcagcaggctcctggaggcctctcccagatgggtcctgtgtccctgttccaccctctgaaggccaccctggagcagacacagccggctgtgctccgaggagcccgggttttccttcgacagaagagttccacctccctcagcaatggcggggccatacaaaaccaagagagtggcatcaaagagtctgtctcctggggcactcaaaggacccaggatgcaccccatgaggccaggccacccctggagcgtggccactccacagagatccctgtggggcggtcaggagcactggctgtggacgttcagatgcagagcataacccggaggggccctgatggggagccccagcctgggctggagagccagggtcgagcggcctccatgccccgccttgcggccgagactcagcccgtcacagatgccagccccatgaagcgctccatctccacgctggcccagcggccccgtgggactcatctttgcagcaccaccccggaccgcccaccccctagccaggcgtcgtcgcaccaccaccaccaccgctgccaccgccgcagggacaggaagcagaggtccctggagaaggggcccagcctgtctgccgatatggatggcgcaccaagcagtgctgtggggccggggctgcccccgggagaggggcctacaggctgccggcgggaacgagagcgccggcaggagcggggccggtcccaggagcggaggcagccctcatcctcctcctcggagaagcagcgcttctactcctgcgaccgctttgggggccgtgagcccccgaagcccaagccctccctcagcagccacccaacgtcgccaacagctggccaggagccgggaccccacccacaggccggctcagccgtgggctttccgaacacaacgccctgctgcagagagaccccctcagccagcccctggcccctggctctcgaattggctctgacccttacctggggcagcgtctggacagtgaggcctctgtccacgccctgcctgaggacacgctcactttcgaggaggctgtggccaccaactcgggccgctcctccaggacttcctacgtgtcctccctgacctcccagtctcaccctctccgccgcgtgcccaacggttaccactgcaccctgggactcagctcgggtggccgagcacggcacagctaccaccaccctgaccaagaccactggtgctagctgcaccgtgaccgctcagacgcctgcatgcagcaggcgtgtgttccagtggatgagttttatcatccacacggggcagtcggccctcgggggaggccttgcccaccttggtgaggctcctgtggcccctccctccccctcctcccctcttttactctagacgacgaataaagccctgttgcttgagtgtacgtaccgc

SEQ ID NO: 381565 - DNA, 1022 bp, Homo sapiens
gagcatgatggacgtggacagaggacatggagaagagagaagaaattatcattaaaaggaggtgtcaccagaagtggttagaacatcgtgttcacatccatgttctccatggaatgcgtgctgaagatcatcgcctttggggtgctgaactatttcagagatgcctggaatgtctttgactttgtcactgtgttgggaagtattactgatattttagtaacagagattgcggaaacgaacaatttcatcaacctcagcttcctccgcctctttcgagctgcgcggctgatcaagctgctccgccagggctacaccatccgcatcctgctgtggacctttgtccagtccttcaaggccctgccctacgtgtgtctgctcattgccatgctgttcttcatctacgccatcatcggcatgcaggtgtttgggaatattgccctggatgatgacaccagcatcaaccgccacaacaacttccggacgtttttgcaagccctgatgctgctgttcaggagcgccacgggggaggcctggcacgagatcatgctgtcctgcctgagcaaccaggcctgtgatgagcaggccaatgccaccgagtgtggaagtgactttgcctacttctacttcgtctccttcatcttcctgtgctcctttctggtgagtcctgggcactgtgcccctcccagtgccacgtcttgtctcggtacagctcaggcttctcccacatctcctgctgatccctgactctgatccaggccatgtcagaagctgagtccatgctgatggcccttgtttccccagagatggcgactttgttagccagagaaagggccgacatggtaacgggctcctgtgggcccttccttgacatccgtggaaaagggttacatttccaggggcaactgttccttaacttccagcttctagaaggtcatccactgtggtgatgggatgtgaaggaacagcatcccagccagtgtacggggaaagcagctggactgggtggggaggtcggcagggca

SEQ ID NO: 381566 - DNA, 3223 bp, Homo sapiens
gcggcggcggctgcggcggtggggccgggcgaggtccgctgcggtcccggcggctccgtggctgctccgctctgagcgcctggcgcgccccgcgccctccctgccggggccgctgggccggggatgcacgcggggcccgggagccatggtccgcttcggggacgagctgggcggccgctatggaggccccggcggcggagagcgggcccggggcggcggggccggcggggcggggggcccgggtcccggggggctgcagcccggccagcgggtcctctacaagcaatcgatcgcgcagcgcgcgcggaccatggcgctgtacaaccccatcccggtcaagcagaactgcttcaccgtcaaccgctcgctcttcgtcttcagcgaggacaacgtcgtccgcaaatacgcgaagcgcatcaccgagtggcctccattcgagtatatgatcctggccaccatcatcgccaactgcatcgtgctggccctggagcagcacctccctgatggggacaaaacgcccatgtccgagcggctggacgacacggagccctatttcatcgggatcttttgcttcgaggcagggatcaaaatcatcgctctgggctttgtcttccacaagggctcttacctgcggaacggctggaacgtcatggacttcgtggtcgtcctcacagggatccttgccacggctggaactgacttcgacctgcgaacactgagggctgtgcgtgtgctgaggcccctgaagctggtgtctgggattccaagtttgcaggtggtgctcaagtccatcatgaaggccatggttccactcctgcagattgggctgcttctcttctttgccatcctcatgtttgccatcattggcctggagttctacatgggcaagttccacaaggcctgtttccccaacagcacagatgcggagcccgtgggtgacttcccctgtggcaaggaggccccagcccggctgtgcgagggcgacactgagtgccgggagtactggccaggacccaactttggcatcaccaactttgacaatatcctgtttgccatcttgacggtgttccagtgcatcaccatggagggctggactgacatcctctataatacaaacgatgcggccggcaacacctggaactggctctacttcatccctctcatcatcatcggctccttcttcatgctcaacctggtgctgggcgtgctctcgggggagtttgccaaggagcgagagagggtggagaaccgccgcgccttcctgaagctgcgccggcagcagcagatcgagcgagagctcaacgggtacctggagtggatcttcaaggcggaggaagtcatgctggccgaggaggacaggaatgcagaggagaagtcccctttggacgtgctgaagagagcggccaccaagaagagcagaaatgacctgatccacgcagaggagggagaggaccggtttgcagatctctgtgctgttggatcccccttcgcccgcgccagcctcaagagcgggaagacagagagctcgtcatacttccggaggaaggagaagatgttccggttttttatccggcgcatggtgaaggctcagagcttctactgggtggtgctgtgcgtggtggccctgaacacactgtgtgtggccatggtgcattacaaccagccgcggcggcttaccacgaccctgtattttgcagagtttgttttcctgggtctcttcctcacagagatgtccctgaagatgtatggcctggggcccagaagctacttccggtcctccttcaactgcttcgactttggggtcatcgtggggagcgtctttgaagtggtctgggcggccatcaagccgggaagctcctttgggatcagtgtgctgcgggccctccgcctgctgaggatcttcaaagtcacgaagtactggagctccctgcggaacctggtggtgtccctgctgaactccatgaagtccatcatcagcctgctcttcttgctcttcctgttcattgtggtcttcgccctgctggggatgcagctgtttgggggacagttcaacttccaggatgagactcccacaaccaacttcgacaccttccctgccgccatcctcactgtcttccagatcctgacgggagaggactggaatgcagtgatgtatcacgggatcgaatcgcaaggcggcgtcagcaaaggcatgttctcgtccttttacttcattgtcctgacactgttcggaaactacactctgctgaatgtctttctggccatcgctgtggacaacctggccaacgcccaagagctgaccaaggatgaagaggagatggaagaagcagccaatcagaagcttgctctgcaaaaggccaaagaagtggctgaagtcagccccatgtctgccgcgaacatctccatcgccgccaggcagcagaactcggccaaggcgcgctcggtgtgggagcagcgggccagccagctacggctgcagaacctgcgggccagctgcgaggcgctgtacagcgagatggaccccgaggagcggctgcgcttcgccactacgcgccacctgcggcccgacatgaagacgcacctggaccggccgctggtggtggagctgggccgcgacggcgcgcgggggcccgtgggaggcaaagcccgacctgaggctgcggaggcccccgagggcgtcgaccctccgcgcaggcaccaccggcaccgcgacaaggacaagacccccgcggcgggggaccaggaccgagcagaggccccgaaggcggagagcggggagcccggtgcccgggaggagcggccaggcccaggccccgagggcggccggcggcaccaccggcgcggctccccggaggaggcggccgagcgggagccccgacgccaccgcgcgcaccggcaccaggatccgagcaaggagtgcgccggcgccaagggcgagcggcgcgcgcggcaccgcggcggcccccgagcggggccccgggaggcggagagcggggaggagccggcgcggcggcaccgggcccggcacaaggcgcagcctgctcacgaggctgtggagaaggaggccacggagaaggaggctgagatagtggaagccgacaaggaaaaggagctccggaaccaccagccccggtgagtccgcggctgggcggggtcagggagggaagggttggccggggcggcgcgggccccagcggtggctgcggccatggggtccacggcg

SEQ ID NO: 381567 - DNA, 1563 bp, Homo sapiens
gagcatgatggacgtggacagaggacatggagaagagagaagaaattatcattaaaaggaggtgtcaccagaagtggttagaacatcgtgttcacatccatgttctccatggaatgcgtgctgaagatcatcgcctttggggtgctgaactatttcagagatgcctggaatgtctttgactttgtcactgtgttgggaagtattactgatattttagtaacagagattgcggaaacgaacaatttcatcaacctcagcttcctccgcctctttcgagctgcgcggctgatcaagctgctccgccagggctacaccatccgcatcctgctgtggacctttgtccagtccttcaaggccctgccctacgtgtgtctgctcattgccatgctgttcttcatctacgccatcatcggcatgcaggtgtttgggaatattgccctggatgatgacaccagcatcaaccgccacaacaacttccggacgtttttgcaagccctgatgctgctgttcaggagcgccacgggggaggcctggcacgagatcatgctgtctgcctgtacaggtgtgttcagtgtgtggatgtcattaacccatagggctatgcaacaaaagacacatttaatagaagtaaaacacacaagaccgctgcctggtctcggggttcagcatgattgtgaccaaacctttttatagaatttccttacctgaaggcacaacactctgaaactttaaagataacagagtattttattccaatagaataaaccagggaatctcggactgtgcatgtggatcactgtgctcctgttgcaaagtagaaggatgtgtatttttgacactgacgttttgtctcttgttccccagcccccagcccatgttatcttgggtgtcgaatgtgtccattccatgcagaaccacagccatttccccaggcagtgttgggtcgagaatccacttttctaaacccacacagcctagctggcttgtctagactcttctaggcattggaattgatgaaaactacagggagcggggaaaggagacattatgtcttgttttcctgactttgggttttgtttctcactgtgtcttctccggctatcatatatgtcccctgaatctcatagtgagctgccaaatttgaagtgcatcacccagttgtctgcatctggaaccagtcaagcagtggctgtagtttgaacaagttatgtgtgcatgtaacatatatacatatatacatatatacaagtatgtgcatgataatgtatatcttcgtactttttgatacaatgtattcatttgttaatttttaattatatttgatataaatcaaaggtttgttgcaaaactttatatttaagaagtgttaaaaaaaaaaaaaagtcccaaccatgcaacacaactgggacctacttaaaaagaaattctgtgattgactagtttgctgcctgagtcatatttatcagccaaactttggattctgctgttgtttctacaatgacattttgtatgaagcaaagtccttgaattaaaataaaaacttagcaaaaaatcaaaaacaaa

SEQ ID NO: 381568 - DNA, 531 bp, Homo sapiens
gagcatgatggacgtggacagaggacatggagaagagagaagaaattatcattaaaaggaggtgtcaccagaagtggttagaacatcgtgttcacatccatgttctccatggaatgcgtgctgaagatcatcgcctttggggtgctgaactatttcagagatgcctggaatgtctttgactttgtcactgtgttgggaagtattactgatattttagtaacagagattgcggaaacgaacaatttcatcaacctcagcttcctccgcctctttcgagctgcgcggctgatcaagctgctccgccagggctacaccatccgcatcctgctgtggacctttgtccagtccttcaaggtgggccaggcggggggcctccatgctttctgtcgggctagtcggggagctgtcgggctagtcggccccgactagcccgacagggcggaggcagcatgcaggcatgtgaactgggtggtgggggaagcccaactgtcaggtaagcagaaatggtaggagctatcgggctagtcgggg

SEQ ID NO: 381569 - DNA, 198 bp, Homo sapiens
gctgaacctctgagacaataggaaattttccacttagtagagttacttaggccatgatgctttcctgggttggtttgatatccagcattggaagacgtcaaaattagtttctgtgatcaggtttgagtcaccactgcagagacagcatcttgatgtttaggctttgggcttttggtttgtagcccaggctggatgtgt

SEQ ID NO: 381570 - DNA, 216 bp, Homo sapiens
gtgacccagatggagggggaggcccaccgtgctgccccaggctttttccagcacgaaggagttcttccttggggtggaaccccttggtgaattaggaagagatgtgcggtgggaagaagagaatggtgcagtgggaggaggggcagaggccaatcctgaacgccccaggggccctttgcaatgcagagcggtcctggcaggggacgcccaagtggc

SEQ ID NO: 381571 - DNA, 440 bp, Homo sapiens
ggaaagaggtttatttgggttatgattctgcaggctgtacaagaagcacagggccagcatctgtctctgctgaggacctcaggaggcttccactcatggtggaacgggaaggggagctggtatgtgtacagagaccacacgaagagacaggagggaagacagacgggagacgccaggctctatttaacaaccagcctgtggagaactcatagagtaaaaactcactcatgcttcaagaaaggacattgatctcttcaggaagaatccatcgtccgttgctcaaacccctcccattcgacctcccatccagcactgaggcttacattttaacctgagtttgggagaggaggaattttaaagcagagcctgtagattctaaagcaaaatattctgggtctcctgcttgtagaatggttgtgagtgtgacttcctttttctat

SEQ ID NO: 381572 - DNA, 879 bp, Homo sapiens
agacatatgccatgtgaagacgcagggagaatgtgacatctgcaagccaaggagagaggctgcaggagaaaccagctctgctgacactttgatctcaagctctggccaccagaactgtgagcaaataagtgtctgttgtttagggcaccctgtccatggcaccttgctccgatagccccaggaaacgaatccacagaggaggaagccgaggttgggaaaggtggagggacttgcccaagtcacacaaacgacaactcagaagagctgagaattggcacccagggcaactggagtccatcctgagcttgtcactgctgggctctgagacctcctggtgaagaaggacagtggcagagacagcccgacccagagaaacccagcaacgctactttctaagggcatttttccctctcatttggaatcctgagcctcctgctcgtcctgtaggccacacccagcaaacagagctggctgggaactgggagaagagctggagcaacagcctgcatccatttcctcttgctgcaataacaactgatcacaagatggagtctcactctgtcaaccaggctggagtgcactggcgcaatctcggctcactgcagtcacctcctctcaggttcaagtgattctcctgcctctgcctcctgagtagctgggattacaggtgcatgccaccacgctctgctaatttttgtatttttagtagagacggggtttcaccgtgttggccaggctggtctggaactcctgacctcaggtgatccggctgcctcagcctcccaaagtactgggattacaggcatgagccaccacaccttgccacaaatgtggtttttaaatgtggtttttaaaaatatcttgatagccatatttcca

SEQ ID NO: 381573 - DNA, 804 bp, Homo sapiens
agacatatgccatgtgaagacgcagggagaatgtgacatctgcaagccaaggagagaggctgcaggagaaaccagctctgctgacactttgatctcaagctctggccaccagaactgtgagcaaataagtgtctgttgtttagggcaccctgtccatggcaccttgctccgatagccccaggaaacgaatccacagaggaggaagccgaggttgggaaaggtggagggacttgcccaagtcacacaaacgacaactcagaagagctgagaattggcacccagggcaactggagtccatcctgagcttgtcactgctgggctctgagacctcctggtgaagaaggacagtggcagagacagcccgacccagagaaacccagcaacgctactttctaagggcatttttccctctcatttggaatcctgagcctcctgctcgtcctgtaggccacacccagcaaacaggtgggtttcatttcctggagaaaccacagatggaaagtcccagccatgggctccgtgtgacctggtggccttaagaagctccccccaccgcccctcagccctttaatcatttacaaagcagggccacacagagcatctattttctttctggaacatcagagctggctgggaactgggagaagagctggagcaacagcctgcatccatttcctcttgctgcaataacaactgatcacaaggtcagtggcttaaacaacacagatttactctcttacagtctgaagtaagagccaagatgtcagcggggccgtgttgcttccagaggccctagggaaatcc

SEQ ID NO: 381574 - DNA, 315 bp, Homo sapiens
tatggctgattcaacaatgcagcaaaccccagcagtttcagtagttccacaccttccgcttgttattaaggggtgacgttcaatgtgctcatgaggacgaggtcaggcctggcccaacctggaggccaggtgatggtccctagttggatgatctgaagacatcttttgatgcagtttgggttgaggaaggcaagagatgtattgatgctatcataggagtgaatcaggtgaggtaaaggcaaggaaacatgatatgaagtagaactggattcattataatatatgtgtgatttagtcacacaaatataccggcaa

SEQ ID NO: 381575 - DNA, 397 bp, Homo sapiens
taaaaatagttttgcttaaactcagaagggattattgggtctcttgctttgtgccaacaagaaaatgcttggttatgaatataaatatgaataaaatgctgcactgcagaagtttatattaacctgtctgtcccttccaaacatgtttccaaggagtaaaatgctaattatttcagccacataaatacagaaaaaatagtttatcttggaagtcaaaggtttctggagcctattttgttgggagagctgtcttacctatcagactggcctttttgcatttcggagaatgtatcttatatttcttgacagtcatctgaagtgaattcagacaattccttctgctacacaaaggtatactaccctttatatataaagagctctcagaaatcaaatagga

SEQ ID NO: 381576 - DNA, 391 bp, Homo sapiens
aaacccaggcaatcaagtgagtacaaggtaaagataagtatggtttagaggagaaattatgttcctgaactggtgtcctttgatggcagcgtcagccttgctaagtcagagtagagggagcagtgaccttaataagctttggtgagcatcatgtgcacgcgtgggtgggagtccctttcactgatgcttttaaaagtgcttttgcagaccctggaagggatcctccacacatatgaggtgtgggacaggtaggccagagaggattagccctgctttcgagactagaaatctacagtcctgaaggagcagtaattaattggtacacctgtcagggccagcccccaggtctcctggctttttccaggttttctgtctcacatgattttgcttt

SEQ ID NO: 381577 - DNA, 378 bp, Homo sapiens
gcagctgcctactgcctcggacttcaaggggctactttaggagcaattatcttgtttactaaaactgaataccttgctatctctttgatacatttttacaaagctgaattaaaatggtataaattaaatcactttaaaaccatgtctgtacatttttagagggcttcagcagggcattgaggaggtgctctgtgtatgcatagaatttgcaatatcaaaaagaaagtattcgtaagagaaatgaggaaatgtgttacagtatttttattttttttaaaagcgtagtagggcaatatttcccagaaaaatctatgaagtgatttgttttgtcctgccctttctgcagtttcaaaataggtgttttttagacccattcac

SEQ ID NO: 381578 - DNA, 999 bp, Homo sapiens
gagtctctttgggccagccgggctgctgcagacagacaggaagcacgcctgacgctcctctaccctcgggcagcacagcggggctgggactcactctagcttgcccagcaacttgctttcctgtgtgaactctggcaggctgccctctctgtgcaaagctgccactggggcctgctcagggtggcctggaacttggaggtgggcagtcagggcctaggatgggcctgtgtcaccagggcatgtgcccttgggccagttacttcctctcagagccttgggctcctcctctgaggatggggcttgttggtgtgaaatgaggtgagcatgttgagttggggagcagcaggacacgcacctgcaggcagccgccctggccacgctccctccctaccttccgagtcctgggacagacacagtagagcacagcgggccagcctgctctcttctctgtctactttttgcagaagagtcaacagatacaacaggcccagggaggtgcccctgggggccccagtccccatcactccaaggggcagtcctgcaagtgacaaggtgggcccaatccctgtggaacaggtctctgaggaccacagagtggggccccagggaaagctgggagccgagctagaggcaggcagcaagtaagggcaaagctgtgcccctgcccggaagaccttcctgcccccagaacccgaccctccgcagatagccctccctgggcagcagccccccagcttccaaggcccgtgcctcaccagacgccatgctctcacggacttgtttgctgctctgtaccctgcagatctgccccagaggagcaggtgaaaagccgcgcctgccgaggtgctgtggcggtggagttttgggcagaggagtggggggaagagtttctcacttttaagattctccaaatccaagatgaagtcatgctgtgctttggaatggtagatgctcatttatgtaaaatcataataaatgttacacaaactgttagaataa

SEQ ID NO: 381579 - DNA, 426 bp, Homo sapiens
gatacaggctgggcatggtggctcacacctgtaatcccaacactttgggaggccgaggcaggtggatcacttgaggtcaggagttcaagaccagcctggccaaaatggcgaaaccccatctctactaaaaatacaaaaaagaattagccaggcatcgtggtgcatgcctgcaatcccagctactcaggaggctgaggtaggagaatcactggaacccaggaagcagagggtgcagtgagcagagatcgtgccactgcactccaccctgggcaacagagtgagactccatctaaaaaaaaaaaagatacacattaagtttttcacacaaattcttaagggcagatattactaaatgccattagaaaaaaaggaaaccttttatcaagcattttttaaaaatgcttctacatttcttatttataggta

SEQ ID NO: 381580 - DNA, 1055 bp, Homo sapiens
cccacgcgtccggcaatgtgtatcatcttaagtgttttacatgctctacctgccggaatcgcctggtcccgggagatcggtttcactacatcaatggcagtttattttgtgaacatgatagacctacagctctcatcaatggccatttgaattcacttcagagcaatccactactgccagaccagaaggtgaatacccagcaattactaataagctttattagagcaagttggaaggttcaacctcttaacctagcaagagagttttcttgggtggttgtatttttgcatgcccttttaaagaaatgtagattactagttgtacatagagtgttcagaagtaggatagctgattaaattgtgaatcctttctagttaaaaaaaaaatcctgactttgttatatctgtagcttcactcacgttgaacataagattatcacatgcaaaagcaaacaaaatgtaaagcttccatataactggttatttattccatttgacaattttgaaattcagaaacatgatgtgataggttattgtggaagaaaaattagaacatttatggtaggaaaagagaataaagatctttgttatgaaagaatgatttctgcgttaggaatagcaatctggacacctgccttccaaacccaatttacaattcatttactttttagaagagtaattttacaaaacattctgtaacttcataagagggcatttttgttcattggcggtaccataacatttgaataagttatggcttttaaaaccaagttcttgttcttgctaacccgcttagtgccattaatagtgccattagaaattatgtatcttgattcttgatccacaacttgaaaatccttgtaccagaattaaaaattaggaaattatacaagtatacaaatcatgtagtattagaagatattccagagggaaaattggtgatcaacagttgtccagcacccccagtactggatagttttagatctattttaatctccttaataagtcctatagctatgcaagtgagtgcattttgataactgctgtgcctaattt

SEQ ID NO: 381581 - DNA, 3581 bp, Homo sapiens
gctctgtcagtaacacatgtgtaagagccgcggagggagcgagcgagccggctagaggccagcgccgccgccgccgccgcctccgagccgggcagcaacagccccggcagcggcgcaggctccagcgcgccgggcccggccggccgcagcccccgacgcctgggtgcgcctgcctgccggcctccgcaccgtccgccgccgctcccggggctgttgtgtctgcgactgctcccggccggaggtgcagggagctcagccgagccgccgctgccatcccggagcgagcaagcgagcgagcgcgcgggagggaggaaggcggcggcggaggaggaggaggagcgggaggagcgcgggcgggggcgggggccgccgggcgggggaatatacaaagtgaagccacattgccaaacttgcagcagcgattgcagcagttgctgccgctgcgccgcgcctgaagccgcgccgcgcgggccgagggctcctgcagctgctcgcgcgcagtcggaggcggagaaggacgaagactgagactgacacttctgctcccggccgcccggcacttacgcgggggccccccaacccgccccagagcaacgcgatttaaaaaaaaaaaaaaagccgcccttagccccctcctcccctttcctgcttctgcgagaactccctccctccctccagctccgccagcccaggcgccccttccctggaagccgagcggcttcgctcgcatttcaccgccgccgcctctcgcaatattgcaatataggggaaaagcagaccatggtgaatccgggcagcagctcgcagccgcccccggtgacggccggctccctctcctggaagcggtgcgcaggctgcgggggcaagattgcggaccgctttctgctctatgccatggacagctattggcacagccggtgcctcaagtgctcctgctgccaggcgcagctgggcgacatcggcacgtcctgttacaccaaaagtggcatgatcctttgcagaaatgactacattaggttatttggaaatagcggtgcttgcagcgcttgcggacagtcgattcctgcgagtgaactcgtcatgagggcgcaaggcaatgtgtatcatcttaagtgttttacatgctctacctgccggaatcgcctggtcccgggagatcggtttcactacatcaatggcagtttattttgtgaacatgatagacctacagctctcatcaatggccatttgaattcacttcagagcaatccactactgccagaccagaaggtctgctaaaaggtcagagtaatgcagaatgcgtgccttcatctcagatttgttcatcacaggtggatcccatgtgtcttcagtagacaagtcacctttgtagctagcaccagtgccagctccatgccattgcaccttctttagtcttgattgcccttcccgcatttattggtgtattaaaatgactgaatatgaacattaaggactccatgaacctgggctaatgggagactgtagagaaaatgaaaaaagatccaccagaggacatcttggggagggggagggagctgggggggagggaaatgactaatgaagctaattaaaagaagcattcaaatctgctttctaccctcattaacaattagcagggcactggccagagtttgtaccctgtgttttaccttaacaacattctatttgctctttgtatatttaagtgttgtaaggaaacgtgtttcaatcaaaactgaccatgagataaaggaaagagatgtggcttttgtgatattctatcacaaacacttattgtatctctgtaaaatacaatgtatgtatgcatgtaagtgtttttgtcctaatgttgctactcccatggcaaagaaaaaaaaaagaatgaaaaaaagaaaaaaatttggaaaaaaaaatcaggctcatagcagctactgtgtagaaaattccccctacttctaatttgctgaatgaagaaaaaaaaaaatcttttatttgtgatattttcagagacatttgctctagtatggtgtatttaaataataaaaacttaaaagaaaaaatatttaatggtgtttgggtttaaacactgctttttctcttctgtattttgaagaaatttagtttttattgttgttgaataacaagctcactttaaatttgaaggagttgagggaggtggagtgtatatttatttagctctgggccagtaaggtattcttcaaattacttaaccacgccattattggcaggggtacaaagtagtttctaacagggtcctttctataagtcaagaatattctgttaacagcatttcgttacacttctatatcacagtaagtcttttgtgtttataaatacttgagtgtccactattttgtttattctttttctcaatagcaaacaaagccttgggtattgatgaaaagtatgtataaaaaaaaatacggcacaaccatcctgttctcttattgagtttatagcttttgaaggaagtcacaatttctaagtcatacctgtacatattttgaagctcacttagttgtagggacccagagctctttttttatggtgatctttgattggtgaagtagccatttcctggtgacccttaggctcgtgtggttggctgtaaggtgtttattttgttttgctcctacacttctttactgactgcgtttccgtatgtattttgggggaagattctgacttcatttagtcttagtcttgagatactgagttgctggttgcaggcagcagagtgtccaccacagtgcctgcactgcccgcagagctgccctccggaaagcatgcagtataacagctagtgctggaaggaggaaaaccaaataggcctggaggctgaggttgtactgccagcttccttagatgtgagcaaatttcaactacaacttccatcacaggctaataaaaccaggtgtgtgaacgctactattttaaattttcttttttaagatggcattttattttgttccagaaaagcgcctgatgtagaccctccctctgagaatagccgtggagccatgtagagaggtgtagctcagcacatctcaactaccagtcagcttccctttgagaacttctgtgctcacttcctgttttcagagattccagggcaggggaaaaaaaaaatcagttgaacttcaaacctcctagaggagattgtaaaggcatagagttgaggtgaatagttttgttagaaccttataaaaataaaatgcaagaaaataatatgaagaaatcacatatatatgtttgaattagatgtctgtttgaattagatccttggggaatttcttcaaactagttctggttcttatatttgttttttttcctttaaggaactttctgaaggaagttagactgcgatggtaaagggggaaatgggttaatgagattgcaggcattttctatattctttttggcataagcacttatgtccctgatatgtacaaattcaaaggaggtggttaataactttagtaaataatatattgtcgcatttaatgatgtggagggctaaggtcattacggactttaaataaactattatatggctggtt

SEQ ID NO: 381582 - DNA, 4358 bp, Homo sapiens
gctctgtcagtaacacatgtgtaagagccgcggagggagcgagcgagccggctagaggccagcgccgccgccgccgccgcctccgagccgggcagcaacagccccggcagcggcgcaggctccagcgcgccgggcccggccggccgcagcccccgacgcctgggtgcgcctgcctgccggcctccgcaccgtccgccgccgctcccggggctgttgtgtctgcgactgctcccggccggaggtgcagggagctcagccgagccgccgctgccatcccggagcgagcaagcgagcgagcgcgcgggagggaggaaggcggcggcggaggaggaggaggagcgggaggagcgcgggcgggggcgggggccgccgggcgggggaatatacaaagtgaagccacattgccaaacttgcagcagcgattgcagcagttgctgccgctgcgccgcgcctgaagccgcgccgcgcgggccgagggctcctgcagctgctcgcgcgcagtcggaggcggagaaggacgaagactgagactgacacttctgctcccggccgcccggcacttacgcgggggccccccaacccgccccagagcaacgcgatttaaaaaaaaaaaaaaagccgcccttagccccctcctcccctttcctgcttctgcgagaactccctccctccctccagctccgccagcccaggcgccccttccctggaagccgagcggcttcgctcgcatttcaccgccgccgcctctcgcaatattgcaatataggggaaaagcagaccatggtgaatccgggcagcagctcgcagccgcccccggtgacggccggctccctctcctggaagcggtgcgcaggctgcgggggcaagattgcggaccgctttctgctctatgccatggacagctattggcacagccggtgcctcaagtgctcctgctgccaggcgcagctgggcgacatcggcacgtcctgttacaccaaaagtggcatgatcctttgcagaaatgactacattaggttatttggaaatagcggtgcttgcagcgcttgcggacagtcgattcctgcgagtgaactcgtcatgagggcgcaaggcaatgtgtatcatcttaagtgttttacatgctctacctgccggaatcgcctggtcccgggagatcggtttcactacatcaatggcagtttattttgtgaacatgatagacctacagctctcatcaatggccatttgaattcacttcagagcaatccactactgccagaccagaaggtctgctaaaaggtcagagtaatgcagaatgcgtgccttcatctcagatttgttcatcacaggtggatcccatgtgtcttcagtagacaagtcacctttgtagctagcaccagtgccagctccatgccattgcaccttctttagtcttgattgcccttcccgcatttattggtgtattaaaatgactgaatatgaacattaaggactccatgaacctgggctaatgggagactgtagagaaaatgaaaaaagatccaccagaggacatcttggggagggggagggagctgggggggagggaaatgactaatgaagctaattaaaagaagcattcaaatctgctttctaccctcattaacaattagcagggcactggccagagtttgtaccctgtgttttaccttaacaacattctatttgctctttgtatatttaagtgttgtaaggaaacgtgtttcaatcaaaactgaccatgagataaaggaaagagatgtggcttttgtgatattctatcacaaacacttattgtatctctgtaaaatacaatgtatgtatgcatgtaagtgtttttgtcctaatgttgctactcccatggcaaagaaaaaaaaaagaatgaaaaaaagaaaaaaatttggaaaaaaaaatcaggctcatagcagctactgtgtagaaaattccccctacttctaatttgctgaatgaagaaaaaaaaaaatcttttatttgtgatattttcagagacatttgctctagtatggtgtatttaaataataaaaacttaaaagaaaaaatatttaatggtgtttgggtttaaacactgctttttctcttctgtattttgaagaaatttagtttttattgttgttgaataacaagctcactttaaatttgaaggagttgagggaggtggagtgtatatttatttagctctgggccagtaaggtattcttcaaattacttaaccacgccattattggcaggggtacaaagtagtttctaacagggtcctttctataagtcaagaatattctgttaacagcatttcgttacacttctatatcacagtaagtcttttgtgtttataaatacttgagtgtccactattttgtttattctttttctcaatagcaaacaaagccttgggtattgatgaaaagtatgtataaaaaaaaatacggcacaaccatcctgttctcttattgagtttatagcttttgaaggaagtcacaatttctaagtcatacctgtacatattttgaagctcacttagttgtagggacccagagctctttttttatggtgatctttgattggtgaagtagccatttcctggtgacccttaggctcgtgtggttggctgtaaggtgtttattttgttttgctcctacacttctttactgactgcgtttccgtatgtattttgggggaagattctgacttcatttagtcttagtcttgagatactgagttgctggttgcaggcagcagagtgtccaccacagtgcctgcactgcccgcagagctgccctccggaaagcatgcagtataacagctagtgctggaaggaggaaaaccaaataggcctggaggctgaggttgtactgccagcttccttagatgtgagcaaatttcaactacaacttccatcacaggctaataaaaccaggtgtgtgaacgctactattttaaattttcttttttaagatggcattttattttgttccagaaaagcgcctgatgtagaccctccctctgagaatagccgtggagccatgtagagaggtgtagctcagcacatctcaactaccagtcagcttccctttgagaacttctgtgctcacttcctgttttcagagattccagggcaggggaaaaaaaaaatcagttgaacttcaaacctcctagaggagattgtaaaggcatagagttgaggtgaatagttttgttagaaccttataaaaataaaatgcaagaaaataatatgaagaaatcacatatatatgtttgaattagatgtctgtttgaattagatccttggggaatttcttcaaactagttctggttcttatatttgttttttttcctttaaggaactttctgaaggaagttagactgcgatggtaaagggggaaatgggttaatgagattgcaggcattttctatattctttttggcataagcacttatgtccctgatatgtacaaattcaaaggaggtggttaataactttagtaaataatatattgtcgcatttaatgatgtggagggctaaggtcattacggactttaaataaactattatatggctggttcctcaagcactgctgcgtatttaataatgagcttctaaaagcatttcttaagttgcagacctataagattacaaatgtcactcatgttagtataatccacatgcaagtgatgaagccttctctttgatgtgctaaattggagaaggactaatggagctatgaatatacaatagaacatatttaagtagtagtcttgctttaggtaaaacactttcttgaaaccagaggcatttcaaacaataaaacccggctctaatggggatgctctgtgtggatagaaagctactaaaaacactcaggtttattctgatgtgagcagcgattgtgtgcagttcctcccccaatctcaacattgcttaggaaaaaaaaaaatctatgagtttattccacctttcatccattgcatttgtgatgttattagttagcaagatggacactgttctttagaaaggacttatttaatattaaccacgtcatagagcaagatggcccccagtccctacaagcaagtgcaattaaaaataaaagcaaatgttactgagccctgctgaactcctgataaaaaaaattatgtttatggtacatataaatgtctcaatcatgcaaattgtcactcttgttaatgaaacaattttgtaaaaagatagtcctctaaaagggtttaatgttttttacctatctaactgtctaattagatttacacatcccgcaaggcaggggagcctgaagcttttccaaaccaaatcgtttgccactagaaactattttcagctcttc

SEQ ID NO: 381583 - DNA, 2956 bp, Homo sapiens
aggcgggggctgggaggaggtgccgcgaggggtggagcgcgcagcggagcctgctctcggagttttgacagtaccggagctgaaattgtcagcggcggcaagcgcaggaaagttgagaggagctcgtggccccagaacaaagcttgagaaaaaccatggtgaatccgggcagcagctcgcagccgcccccggtgacggccggctccctctcctggaagcggtgcgcaggctgcgggggcaagattgcggaccgctttctgctctatgccatggacagctattggcacagccggtgcctcaagtgctcctgctgccaggcgcagctgggcgacatcggcacgtcctgttacaccaaaagtggcatgatcctttgcagaaatgactacattaggttatttggaaatagcggtgcttgcagcgcttgcggacagtcgattcctgcgagtgaactcgtcatgagggcgcaaggcaatgtgtatcatcttaagtgttttacatgctctacctgccggaatcgcctggtcccgggagatcggtttcactacatcaatggcagtttattttgtgaacatgatagacctacagctctcatcaatggccatttgaattcacttcagagcaatccactactgccagaccagaaggtctgctaaaaggtcagagtaatgcagaatgcgtgccttcatctcagatttgttcatcacaggtggatcccatgtgtcttcagtagacaagtcacctttgtagctagcaccagtgccagctccatgccattgcaccttctttagtcttgattgcccttcccgcatttattggtgtattaaaatgactgaatatgaacattaaggactccatgaacctgggctaatgggagactgtagagaaaatgaaaaaagatccaccagaggacatcttggggagggggagggagctgggggggagggaaatgactaatgaagctaattaaaagaagcattcaaatctgctttctaccctcattaacaattagcagggcactggccagagtttgtaccctgtgttttaccttaacaacattctatttgctctttgtatatttaagtgttgtaaggaaacgtgtttcaatcaaaactgaccatgagataaaggaaagagatgtggcttttgtgatattctatcacaaacacttattgtatctctgtaaaatacaatgtatgtatgcatgtaagtgtttttgtcctaatgttgctactcccatggcaaagaaaaaaaaaagaatgaaaaaaagaaaaaaatttggaaaaaaaaatcaggctcatagcagctactgtgtagaaaattccccctacttctaatttgctgaatgaagaaaaaaaaaaatcttttatttgtgatattttcagagacatttgctctagtatggtgtatttaaataataaaaacttaaaagaaaaaatatttaatggtgtttgggtttaaacactgctttttctcttctgtattttgaagaaatttagtttttattgttgttgaataacaagctcactttaaatttgaaggagttgagggaggtggagtgtatatttatttagctctgggccagtaaggtattcttcaaattacttaaccacgccattattggcaggggtacaaagtagtttctaacagggtcctttctataagtcaagaatattctgttaacagcatttcgttacacttctatatcacagtaagtcttttgtgtttataaatacttgagtgtccactattttgtttattctttttctcaatagcaaacaaagccttgggtattgatgaaaagtatgtataaaaaaaaatacggcacaaccatcctgttctcttattgagtttatagcttttgaaggaagtcacaatttctaagtcatacctgtacatattttgaagctcacttagttgtagggacccagagctctttttttatggtgatctttgattggtgaagtagccatttcctggtgacccttaggctcgtgtggttggctgtaaggtgtttattttgttttgctcctacacttctttactgactgcgtttccgtatgtattttgggggaagattctgacttcatttagtcttagtcttgagatactgagttgctggttgcaggcagcagagtgtccaccacagtgcctgcactgcccgcagagctgccctccggaaagcatgcagtataacagctagtgctggaaggaggaaaaccaaataggcctggaggctgaggttgtactgccagcttccttagatgtgagcaaatttcaactacaacttccatcacaggctaataaaaccaggtgtgtgaacgctactattttaaattttcttttttaagatggcattttattttgttccagaaaagcgcctgatgtagaccctccctctgagaatagccgtggagccatgtagagaggtgtagctcagcacatctcaactaccagtcagcttccctttgagaacttctgtgctcacttcctgttttcagagattccagggcaggggaaaaaaaaaatcagttgaacttcaaacctcctagaggagattgtaaaggcatagagttgaggtgaatagttttgttagaaccttataaaaataaaatgcaagaaaataatatgaagaaatcacatatatatgtttgaattagatgtctgtttgaattagatccttggggaatttcttcaaactagttctggttcttatatttgttttttttcctttaaggaactttctgaaggaagttagactgcgatggtaaagggggaaatgggttaatgagattgcaggcattttctatattctttttggcataagcacttatgtccctgatatgtacaaattcaaaggaggtggttaataactttagtaaataatatattgtcgcatttaatgatgtggagggctaaggtcattacggactttaaataaactattatatggctggtt

SEQ ID NO: 381584 - DNA, 2542 bp, Homo sapiens
cctaacaggctttggagctggcactggtgctagctacaaaggtgacttgtctactgaagacacatgggatccactgttttacatgctctacctgccggaatcgcctggtcccgggagatcggtttcactacatcaatggcagtttattttgtgaacatgatagacctacagctctcatcaatggccatttgaattcacttcagagcaatccactactgccagaccagaaggtctgctaaaaggtcagagtaatgcagaatgcgtgccttcatctcagatttgttcatcacaggtggatcccatgtgtcttcagtagacaagtcacctttgtagctagcaccagtgccagctccatgccattgcaccttctttagtcttgattgcccttcccgcatttattggtgtattaaaatgactgaatatgaacattaaggactccatgaacctgggctaatgggagactgtagagaaaatgaaaaaagatccaccagaggacatcttggggagggggagggagctgggggggagggaaatgactaatgaagctaattaaaagaagcattcaaatctgctttctaccctcattaacaattagcagggcactggccagagtttgtaccctgtgttttaccttaacaacattctatttgctctttgtatatttaagtgttgtaaggaaacgtgtttcaatcaaaactgaccatgagataaaggaaagagatgtggcttttgtgatattctatcacaaacacttattgtatctctgtaaaatacaatgtatgtatgcatgtaagtgtttttgtcctaatgttgctactcccatggcaaagaaaaaaaaaagaatgaaaaaaagaaaaaaatttggaaaaaaaaatcaggctcatagcagctactgtgtagaaaattccccctacttctaatttgctgaatgaagaaaaaaaaaaatcttttatttgtgatattttcagagacatttgctctagtatggtgtatttaaataataaaaacttaaaagaaaaaatatttaatggtgtttgggtttaaacactgctttttctcttctgtattttgaagaaatttagtttttattgttgttgaataacaagctcactttaaatttgaaggagttgagggaggtggagtgtatatttatttagctctgggccagtaaggtattcttcaaattacttaaccacgccattattggcaggggtacaaagtagtttctaacagggtcctttctataagtcaagaatattctgttaacagcatttcgttacacttctatatcacagtaagtcttttgtgtttataaatacttgagtgtccactattttgtttattctttttctcaatagcaaacaaagccttgggtattgatgaaaagtatgtataaaaaaaaatacggcacaaccatcctgttctcttattgagtttatagcttttgaaggaagtcacaatttctaagtcatacctgtacatattttgaagctcacttagttgtagggacccagagctctttttttatggtgatctttgattggtgaagtagccatttcctggtgacccttaggctcgtgtggttggctgtaaggtgtttattttgttttgctcctacacttctttactgactgcgtttccgtatgtattttgggggaagattctgacttcatttagtcttagtcttgagatactgagttgctggttgcaggcagcagagtgtccaccacagtgcctgcactgcccgcagagctgccctccggaaagcatgcagtataacagctagtgctggaaggaggaaaaccaaataggcctggaggctgaggttgtactgccagcttccttagatgtgagcaaatttcaactacaacttccatcacaggctaataaaaccaggtgtgtgaacgctactattttaaattttcttttttaagatggcattttattttgttccagaaaagcgcctgatgtagaccctccctctgagaatagccgtggagccatgtagagaggtgtagctcagcacatctcaactaccagtcagcttccctttgagaacttctgtgctcacttcctgttttcagagattccagggcaggggaaaaaaaaaatcagttgaacttcaaacctcctagaggagattgtaaaggcatagagttgaggtgaatagttttgttagaaccttataaaaataaaatgcaagaaaataatatgaagaaatcacatatatatgtttgaattagatgtctgtttgaattagatccttggggaatttcttcaaactagttctggttcttatatttgttttttttcctttaaggaactttctgaaggaagttagactgcgatggtaaagggggaaatgggttaatgagattgcaggcattttctatattctttttggcataagcacttatgtccctgatatgtacaaattcaaaggaggtggttaataactttagtaaataatatattgtcgcatttaatgatgtggagggctaaggtcattacggactttaaataaactattatatggctggtt

SEQ ID NO: 381585 - DNA, 2855 bp, Homo sapiens
ttttattaagggccaagcactgttgaaagtgctcccatatgtattatgtaattatcataacagtgtcattatcccttctttaaagatgaggaaactgagacacaagcagtttaagcaacattccaaaaggttacacggttaagcatatgaacccaaaacttcctaggtaggaacttgtcttggaatgtccccgctatttaaaaaattcaagatcccactgctgggcaagatgttacattccttttggaaagacacttgctcttaacagagttaagcaattaattgtagtactttacaccagaaactttctgagcgtccatttactgtctcattttctttgctagtaaaactgcagaaaatgttatgctttagttcttcactgccagagtaagtagcatagaaagcctctatcaagtcacagttggaaagtaatctaataaaagaagattagtgaatgtggggaagacaaaagcagtcatgtttgagtttaatatctctcaaatttagcattttagctaagatgcccgtttttatttcttgcaggtctgctaaaaggtcagagtaatgcagaatgcgtgccttcatctcagatttgttcatcacaggtggatcccatgtgtcttcagtagacaagtcacctttgtagctagcaccagtgccagctccatgccattgcaccttctttagtcttgattgcccttcccgcatttattggtgtattaaaatgactgaatatgaacattaaggactccatgaacctgggctaatgggagactgtagagaaaatgaaaaaagatccaccagaggacatcttggggagggggagggagctgggggggagggaaatgactaatgaagctaattaaaagaagcattcaaatctgctttctaccctcattaacaattagcagggcactggccagagtttgtaccctgtgttttaccttaacaacattctatttgctctttgtatatttaagtgttgtaaggaaacgtgtttcaatcaaaactgaccatgagataaaggaaagagatgtggcttttgtgatattctatcacaaacacttattgtatctctgtaaaatacaatgtatgtatgcatgtaagtgtttttgtcctaatgttgctactcccatggcaaagaaaaaaaaaagaatgaaaaaaagaaaaaaatttggaaaaaaaaatcaggctcatagcagctactgtgtagaaaattccccctacttctaatttgctgaatgaagaaaaaaaaaaatcttttatttgtgatattttcagagacatttgctctagtatggtgtatttaaataataaaaacttaaaagaaaaaatatttaatggtgtttgggtttaaacactgctttttctcttctgtattttgaagaaatttagtttttattgttgttgaataacaagctcactttaaatttgaaggagttgagggaggtggagtgtatatttatttagctctgggccagtaaggtattcttcaaattacttaaccacgccattattggcaggggtacaaagtagtttctaacagggtcctttctataagtcaagaatattctgttaacagcatttcgttacacttctatatcacagtaagtcttttgtgtttataaatacttgagtgtccactattttgtttattctttttctcaatagcaaacaaagccttgggtattgatgaaaagtatgtataaaaaaaaatacggcacaaccatcctgttctcttattgagtttatagcttttgaaggaagtcacaatttctaagtcatacctgtacatattttgaagctcacttagttgtagggacccagagctctttttttatggtgatctttgattggtgaagtagccatttcctggtgacccttaggctcgtgtggttggctgtaaggtgtttattttgttttgctcctacacttctttactgactgcgtttccgtatgtattttgggggaagattctgacttcatttagtcttagtcttgagatactgagttgctggttgcaggcagcagagtgtccaccacagtgcctgcactgcccgcagagctgccctccggaaagcatgcagtataacagctagtgctggaaggaggaaaaccaaataggcctggaggctgaggttgtactgccagcttccttagatgtgagcaaatttcaactacaacttccatcacaggctaataaaaccaggtgtgtgaacgctactattttaaattttcttttttaagatggcattttattttgttccagaaaagcgcctgatgtagaccctccctctgagaatagccgtggagccatgtagagaggtgtagctcagcacatctcaactaccagtcagcttccctttgagaacttctgtgctcacttcctgttttcagagattccagggcaggggaaaaaaaaaatcagttgaacttcaaacctcctagaggagattgtaaaggcatagagttgaggtgaatagttttgttagaaccttataaaaataaaatgcaagaaaataatatgaagaaatcacatatatatgtttgaattagatgtctgtttgaattagatccttggggaatttcttcaaactagttctggttcttatatttgttttttttcctttaaggaactttctgaaggaagttagactgcgatggtaaagggggaaatgggttaatgagattgcaggcattttctatattctttttggcataagcacttatgtccctgatatgtacaaattcaaaggaggtggttaataactttagtaaataatatattgtcgcatttaatgatgtggagggctaaggtcattacggactttaaataaactattatatggctggtt

SEQ ID NO: 381586 - DNA, 2358 bp, Homo sapiens
ctccggggagacagaggttccagctgaactgagctctgcaccactgcactccagcctgggcaacaagcaaaactccgtctcagatagaaagaaaagaacagaaacacctttgtaagcacacataaagaatatgttattagacaattttcctttttccattaggccctatgatgccaagtagagaaatccagccataaaaggcagatgtaagcattgctaactttttctttttaagatacactgtacttagactgaaatgcccagtgctatcaattatatatataggcaattttctactaagtctaactccccggggatacagcggggagggagctgggggggagggaaatgactaatgaagctaattaaaagaagcattcaaatctgctttctaccctcattaacaattagcagggcactggccagagtttgtaccctgtgttttaccttaacaacattctatttgctctttgtatatttaagtgttgtaaggaaacgtgtttcaatcaaaactgaccatgagataaaggaaagagatgtggcttttgtgatattctatcacaaacacttattgtatctctgtaaaatacaatgtatgtatgcatgtaagtgtttttgtcctaatgttgctactcccatggcaaagaaaaaaaaaagaatgaaaaaaagaaaaaaatttggaaaaaaaaatcaggctcatagcagctactgtgtagaaaattccccctacttctaatttgctgaatgaagaaaaaaaaaaatcttttatttgtgatattttcagagacatttgctctagtatggtgtatttaaataataaaaacttaaaagaaaaaatatttaatggtgtttgggtttaaacactgctttttctcttctgtattttgaagaaatttagtttttattgttgttgaataacaagctcactttaaatttgaaggagttgagggaggtggagtgtatatttatttagctctgggccagtaaggtattcttcaaattacttaaccacgccattattggcaggggtacaaagtagtttctaacagggtcctttctataagtcaagaatattctgttaacagcatttcgttacacttctatatcacagtaagtcttttgtgtttataaatacttgagtgtccactattttgtttattctttttctcaatagcaaacaaagccttgggtattgatgaaaagtatgtataaaaaaaaatacggcacaaccatcctgttctcttattgagtttatagcttttgaaggaagtcacaatttctaagtcatacctgtacatattttgaagctcacttagttgtagggacccagagctctttttttatggtgatctttgattggtgaagtagccatttcctggtgacccttaggctcgtgtggttggctgtaaggtgtttattttgttttgctcctacacttctttactgactgcgtttccgtatgtattttgggggaagattctgacttcatttagtcttagtcttgagatactgagttgctggttgcaggcagcagagtgtccaccacagtgcctgcactgcccgcagagctgccctccggaaagcatgcagtataacagctagtgctggaaggaggaaaaccaaataggcctggaggctgaggttgtactgccagcttccttagatgtgagcaaatttcaactacaacttccatcacaggctaataaaaccaggtgtgtgaacgctactattttaaattttcttttttaagatggcattttattttgttccagaaaagcgcctgatgtagaccctccctctgagaatagccgtggagccatgtagagaggtgtagctcagcacatctcaactaccagtcagcttccctttgagaacttctgtgctcacttcctgttttcagagattccagggcaggggaaaaaaaaaatcagttgaacttcaaacctcctagaggagattgtaaaggcatagagttgaggtgaatagttttgttagaaccttataaaaataaaatgcaagaaaataatatgaagaaatcacatatatatgtttgaattagatgtctgtttgaattagatccttggggaatttcttcaaactagttctggttcttatatttgttttttttcctttaaggaactttctgaaggaagttagactgcgatggtaaagggggaaatgggttaatgagattgcaggcattttctatattctttttggcataagcacttatgtccctgatatgtacaaattcaaaggaggtggttaataactttagtaaataatatattgtcgcatttaatgatgtggagggctaaggtcattacggactttaaataaactattatatggctggtt

SEQ ID NO: 381587 - DNA, 1319 bp, Homo sapiens
gctctgtcagtaacacatgtgtaagagccgcggagggagcgagcgagccggctagaggccagcgccgccgccgccgccgcctccgagccgggcagcaacagccccggcagcggcgcaggctccagcgcgccgggcccggccggccgcagcccccgacgcctgggtgcgcctgcctgccggcctccgcaccgtccgccgccgctcccggggctgttgtgtctgcgactgctcccggccggaggtgcagggagctcagccgagccgccgctgccatcccggagcgagcaagcgagcgagcgcgcgggagggaggaaggcggcggcggaggaggaggaggagcgggaggagcgcgggcgggggcgggggccgccgggcgggggaatatacaaagtgaagccacattgccaaacttgcagcagcgattgcagcagttgctgccgctgcgccgcgcctgaagccgcgccgcgcgggccgagggctcctgcagctgctcgcgcgcagtcggaggcggagaaggacgaagactgagactgacacttctgctcccggccgcccggcacttacgcgggggccccccaacccgccccagagcaacgcgatttaaaaaaaaaaaaaaagccgcccttagccccctcctcccctttcctgcttctgcgagaactccctccctccctccagctccgccagcccaggcgccccttccctggaagccgagcggcttcgctcgcatttcaccgccgccgcctctcgcaatattgcaatataggggaaaagcagaccatggtgaatccgggcagcagctcgcagccgcccccggtgacggccggctccctctcctggaagcggtgcgcaggctgcgggggcaagattgcggaccgctttctgctctatgccatggacagctattggcacagccggtgcctcaagtgctcctgctgccaggcgcagctgggcgacatcggcacgtcctgttacaccaaaagtggcatgatcctttgcagaaatgactacattaggttatttggaaatagcggtgcttgcagcgcttgcggacagtcgattcctgcgagtgaactcgtcatgagggcgcaaggcaatgtgtatcatcttaagtgttttacatgctctacctgccggaatcgcctggtcccgggagatcggtttcactacatcaatggcagtttattttgtgaacatgatagacctacagctctcatcaatggccatttgaattcacttcagagcaatccactactgccagaccagaagtctgctaaaagtcagagtaatgcaaagaatcagccggtaccgagctgatt

SEQ ID NO: 381588 - DNA, 2136 bp, Homo sapiens
gctctgtcagtaacacatgtgtaagagccgcggagggagcgagcgagccggctagaggccagcgccgccgccgccgccgcctccgagccgggcagcaacagccccggcagcggcgcaggctccagcgcgccgggcccggccggccgcagcccccgacgcctgggtgcgcctgcctgccggcctccgcaccgtccgccgccgctcccggggctgttgtgtctgcgactgctcccggccggaggtgcagggagctcagccgagccgccgctgccatcccggagcgagcaagcgagcgagcgcgcgggagggaggaaggcggcggcggaggaggaggaggagcgggaggagcgcgggcgggggcgggggccgccgggcgggggaatatacaaagtgaagccacattgccaaacttgcagcagcgattgcagcagttgctgccgctgcgccgcgcctgaagccgcgccgcgcgggccgagggctcctgcagctgctcgcgcgcagtcggaggcggagaaggacgaagactgagactgacacttctgctcccggccgcccggcacttacgcgggggccccccaacccgccccagagcaacgcgatttaaaaaaaaaaaaaaagccgcccttagccccctcctcccctttcctgcttctgcgagaactccctccctccctccagctccgccagcccaggcgccccttccctggaagccgagcggcttcgctcgcatttcaccgccgccgcctctcgcaatattgcaatataggggaaaagcagaccatggtgaatccgggcagcagctcgcagccgcccccggtgacggccggctccctctcctggaagcggtgcgcaggctgcgggggcaagattgcggaccgctttctgctctatgccatggacagctattggcacagccggtgcctcaagtgctcctgctgccaggcgcagctgggcgacatcggcacgtcctgttacaccaaaagtggcatgatcctttgcagaaatgactacattaggttatttggaaatagcggtgcttgcagcgcttgcggacagtcgattcctgcgagtgaactcgtcatgagggcgcaaggcaatgtgtatcatcttaagtgttttacatgctctacctgccggaatcgcctggtcccgggagatcggtttcactacatcaatggcagtttattttgtgaacatgatagacctacagctctcatcaatggccatttgaattcacttcagagcaatccactactgccagaccagaaggtgaatacccagcaattactaataagctttattagagcaagttggaaggttcaacctcttaacctagcaagagagttttcttgggtggttgtatttttgcatgcccttttaaagaaatgtagattactagttgtacatagagtgttcagaagtaggatagctgattaaattgtgaatcctttctagttaaaaaaaaaatcctgactttgttatatctgtagcttcactcacgttgaacataagattatcacatgcaaaagcaaacaaaatgtaaagcttccatataactggttatttattccatttgacaattttgaaattcagaaacatgatgtgataggttattgtggaagaaaaattagaacatttatggtaggaaaagagaataaagatctttgttatgaaagaatgatttctgcgttaggaatagcaatctggacacctgccttccaaacccaatttacaattcatttactttttagaagagtaattttacaaaacattctgtaacttcataagagggcatttttgttcattggcggtaccataacatttgaataagttatggcttttaaaaccaagttcttgttcttgctaacccgcttagtgccattaatagtgccattagaaattatgtatcttgattcttgatccacaacttgaaaatccttgtaccagaattaaaaattaggaaattatacaagtatacaaatcatgtagtattagaagatattccagagggaaaattggtgatcaacagttgtccagcacccccagtactggatagttttagatctattttaatctccttaataagtcctatagctatgcaagtgagtgcattttgataactgctgtgcctaattt

SEQ ID NO: 381589 - DNA, 2442 bp, Homo sapiens
gctctgtcagtaacacatgtgtaagagccgcggagggagcgagcgagccggctagaggccagcgccgccgccgccgccgcctccgagccgggcagcaacagccccggcagcggcgcaggctccagcgcgccgggcccggccggccgcagcccccgacgcctgggtgcgcctgcctgccggcctccgcaccgtccgccgccgctcccggggctgttgtgtctgcgactgctcccggccggaggtgcagggagctcagccgagccgccgctgccatcccggagcgagcaagcgagcgagcgcgcgggagggaggaaggcggcggcggaggaggaggaggagcgggaggagcgcgggcgggggcgggggccgccgggcgggggaatatacaaagtgaagccacattgccaaacttgcagcagcgattgcagcagttgctgccgctgcgccgcgcctgaagccgcgccgcgcgggccgagggctcctgcagctgctcgcgcgcagtcggaggcggagaaggacgaagactgagactgacacttctgctcccggccgcccggcacttacgcgggggccccccaacccgccccagagcaacgcgatttaaaaaaaaaaaaaaagccgcccttagccccctcctcccctttcctgcttctgcgagaactccctccctccctccagctccgccagcccaggcgccccttccctggaagccgagcggcttcgctcgcatttcaccgccgccgcctctcgcaatattgcaatataggggaaaagcagaccatggtgaatccgggcagcagctcgcagccgcccccggtgacggccggctccctctcctggaagcggtgcgcaggctgcgggggcaagattgcggaccgctttctgctctatgccatggacagctattggcacagccggtgcctcaagtgctcctgctgccaggcgcagctgggcgacatcggcacgtcctgttacaccaaaagtggcatgatcctttgcagaaatgactacattaggttatttggaaatagcggtgcttgcagcgcttgcggacagtcgattcctgcgagtgaactcgtcatgagggcgcaaggcaatgtgtatcatcttaagtgttttacatgctctacctgccggaatcgcctggtcccgggagatcggtttcactacatcaatggcagtttattttgtgaacatgatagacctacagctctcatcaatggccatttgaattcacttcagagcaatccactactgccagaccagaaggtctgctaaaaggtcagagtaatgcagaatgcgtgccttcatctcagatttgttcatcacaggtggatcccatgtgtcttcagtagacaagtcacctttgtagctagcaccagtgccagctccatgccattgcaccttctttagtcttgattgcccttcccgcatttattggtgtattaaaatgactgaatatgaacattaaggactccatgaacctgggctaatgggagactgtagagaaaatgaaaaaagatccaccagaggacatcttggggagggggagggagctgggggggagggaaatgactaatgaagctaattaaaagaagcattcaaatctgctttctaccctcattaacaattagcagggcactggccagagtttgtaccctgtgttttaccttaacaacattctatttgctctttgtatatttaagtgttgtaaggaaacgtgtttcaatcaaaactgaccatgagataaaggaaagagatgtggcttttgtgatattctatcacaaacacttattgtatctctgtaaaatacaatgtatgtatgcatgtaagtgtttttgtcctaatgttgctactcccatggcaaagaaaaaaaaaagaatgaaaaaaagaaaaaaatttggaaaaaaaaatcaggctcatagcagctactgtgtagaaaattccccctacttctaatttgctgaatgaagaaaaaaaaaaatcttttatttgtgatattttcagagacatttgctctagtatggtgtatttaaataataaaaacttaaaagaaaaattaaaaaaaaaaagaaaaaaaaaaaaaaaaaaaaaaaaaaaaaaaaaaaaaaaaaaaaaaagaaaaaaaaaaaaacaaaaaaaagaaaaaaaaaaacaagaaaaaaaaacaacaacacaaagaaaagcagaacaaaacaaaagagaaaaagaacaggaagaaagagaaagaagagacaagcaagcaaagaaagaagacataaacaaacagcacacagaagagacagaggcgacaacaagaaacaacacaacaagagagaaggaaagactagagagaggacatagacgagcagcagcagagagaacacgaccacgaacgcgaagaagaagaaagagaggaaacgaggacgacaggagaagacagaaaacaagcagacgaaagaa

SEQ ID NO: 381590 - DNA, 3154 bp, Homo sapiens
aggcgggggctgggaggaggtgccgcgaggggtggagcgcgcagcggagcctgctctcggagttttgacagtaccggagctgaaattgtcagcggcggcaagcgcaggaaagttgagaggagctcgtggccccagaacaaagcttgagaaaagtaaacaggcggctgctgccggcgagcctcccttcttccctctccccctcagcctccttcccgcccttgccctgctgtttccttccagcagctccgcggggaggaggggaatgggcttgctctctctccggcgattactaacttttgcatcgcccctgttttgtctttctctccctgtccccttcccgccctctgcagaccatggtgaatccgggcagcagctcgcagccgcccccggtgacggccggctccctctcctggaagcggtgcgcaggctgcgggggcaagattgcggaccgctttctgctctatgccatggacagctattggcacagccggtgcctcaagtgctcctgctgccaggcgcagctgggcgacatcggcacgtcctgttacaccaaaagtggcatgatcctttgcagaaatgactacattaggttatttggaaatagcggtgcttgcagcgcttgcggacagtcgattcctgcgagtgaactcgtcatgagggcgcaaggcaatgtgtatcatcttaagtgttttacatgctctacctgccggaatcgcctggtcccgggagatcggtttcactacatcaatggcagtttattttgtgaacatgatagacctacagctctcatcaatggccatttgaattcacttcagagcaatccactactgccagaccagaaggtctgctaaaaggtcagagtaatgcagaatgcgtgccttcatctcagatttgttcatcacaggtggatcccatgtgtcttcagtagacaagtcacctttgtagctagcaccagtgccagctccatgccattgcaccttctttagtcttgattgcccttcccgcatttattggtgtattaaaatgactgaatatgaacattaaggactccatgaacctgggctaatgggagactgtagagaaaatgaaaaaagatccaccagaggacatcttggggagggggagggagctgggggggagggaaatgactaatgaagctaattaaaagaagcattcaaatctgctttctaccctcattaacaattagcagggcactggccagagtttgtaccctgtgttttaccttaacaacattctatttgctctttgtatatttaagtgttgtaaggaaacgtgtttcaatcaaaactgaccatgagataaaggaaagagatgtggcttttgtgatattctatcacaaacacttattgtatctctgtaaaatacaatgtatgtatgcatgtaagtgtttttgtcctaatgttgctactcccatggcaaagaaaaaaaaaagaatgaaaaaaagaaaaaaatttggaaaaaaaaatcaggctcatagcagctactgtgtagaaaattccccctacttctaatttgctgaatgaagaaaaaaaaaaatcttttatttgtgatattttcagagacatttgctctagtatggtgtatttaaataataaaaacttaaaagaaaaaatatttaatggtgtttgggtttaaacactgctttttctcttctgtattttgaagaaatttagtttttattgttgttgaataacaagctcactttaaatttgaaggagttgagggaggtggagtgtatatttatttagctctgggccagtaaggtattcttcaaattacttaaccacgccattattggcaggggtacaaagtagtttctaacagggtcctttctataagtcaagaatattctgttaacagcatttcgttacacttctatatcacagtaagtcttttgtgtttataaatacttgagtgtccactattttgtttattctttttctcaatagcaaacaaagccttgggtattgatgaaaagtatgtataaaaaaaaatacggcacaaccatcctgttctcttattgagtttatagcttttgaaggaagtcacaatttctaagtcatacctgtacatattttgaagctcacttagttgtagggacccagagctctttttttatggtgatctttgattggtgaagtagccatttcctggtgacccttaggctcgtgtggttggctgtaaggtgtttattttgttttgctcctacacttctttactgactgcgtttccgtatgtattttgggggaagattctgacttcatttagtcttagtcttgagatactgagttgctggttgcaggcagcagagtgtccaccacagtgcctgcactgcccgcagagctgccctccggaaagcatgcagtataacagctagtgctggaaggaggaaaaccaaataggcctggaggctgaggttgtactgccagcttccttagatgtgagcaaatttcaactacaacttccatcacaggctaataaaaccaggtgtgtgaacgctactattttaaattttcttttttaagatggcattttattttgttccagaaaagcgcctgatgtagaccctccctctgagaatagccgtggagccatgtagagaggtgtagctcagcacatctcaactaccagtcagcttccctttgagaacttctgtgctcacttcctgttttcagagattccagggcaggggaaaaaaaaaatcagttgaacttcaaacctcctagaggagattgtaaaggcatagagttgaggtgaatagttttgttagaaccttataaaaataaaatgcaagaaaataatatgaagaaatcacatatatatgtttgaattagatgtctgtttgaattagatccttggggaatttcttcaaactagttctggttcttatatttgttttttttcctttaaggaactttctgaaggaagttagactgcgatggtaaagggggaaatgggttaatgagattgcaggcattttctatattctttttggcataagcacttatgtccctgatatgtacaaattcaaaggaggtggttaataactttagtaaataatatattgtcgcatttaatgatgtggagggctaaggtcattacggactttaaataaactattatatggctggtt

SEQ ID NO: 381591 - DNA, 686 bp, Homo sapiens
caatctcggctcactgcaacctctgcctcccgggttcaagcaattctgcctctgcctcccgagtagctaggactataggtgcatgccaccacacccagctaatttttgtatttttagtagagatggggtttcaccatgttggccaggatggtcttgatctcttgatacctcatgatccccccatcttggcctcccaaagtgctgggagtacaggtgtgagccatcgcgcccagcctaaagtgatttttaaaatctttttaaaatttgtattcctttttgactaacttctccctgattctgaaaatttcactgaagtttcaaagttattagtgtgcatatggtgaagataataatataagctcctcaccctgttttagtaagaagtacttagagattttgtgtgtgtttttttggggggtgcttaggatggggtgccgggagatcaacttagagaattttgatttttggaacttcaaatggaagatgtgttaaatttgttgcagctttgcttttgcagacatttatgtgatgtaaagttctttttaaaaattggaccgggtgtggtggctcatgcctctaatcccagcactttggcaagaggatttacttgagcccaggagtttgagaccagcctggggaaacatagggagacttggtctctacaaatatatatatgtgtgtgagag

SEQ ID NO: 381592 - DNA, 610 bp, Homo sapiens
cctgacctcgacctgagacgtggaggagggacagggaaaaagccttcttctcgcagctgcaggttgccccaccgagggcatttttccgcaccgagggggcggggggcagaatgcacgccagaaaacctaagtgcgctgggtttaaaatagcaacaacaacaaaaattacaaataaccaaaaaacagcataagaattaaaaacagttatattccaatgtttttaatacttggttcacattttggatgctctccccagggatccgacggcgctgcggaggcggcagcgatgtttgggatcctaaagaaagcatcagaccagactcaggtctggacgtccctcaagtggcccggaggtaccgatattagtgtcaccgccgtcagtgccctgcccagaaataaaacctttgttctgagagaaattgaaaagctggaaaatatggagtaggcgatgtgaagagaaactacagggaatgtagaggtcgggttttaaatgcgtatttcctcaaggatgttgtggaagcagagacaaggtggctggcctggagcaggctggaggacctccaaggatctccacagggaggcagttacatttaacaccctacctagcaaa

SEQ ID NO: 381593 - DNA, 393 bp, Homo sapiens
aaataaatcattactaatcaggttaagttggttaattaaagtgattagtaattgttataaatacatacatatacatatgcacacatgcacacacacacatattatgttctgggacccttattgagtggcctctttattctaggttgagtccctagaaattaagacaggatcaaagaattcatgaatatgcataaatgctaaactgtaaatgactttatgcttaggattaaagttttgtagctactagaataggaagcaacctgaaacattcaccttgctgatgacttgaacgctaagttgccactttgcagccttactgtgcacatccacaaatgcgtttatgaggtatagttgacaaaaggcaagtatgtaaattgttttcctctgactggg

SEQ ID NO: 381594 - DNA, 390 bp, Homo sapiens
agcagtcttacaacctgagtattttctatcttcgcagattcacgtgtctggatttgttgacttagtgggttggcacagggtacatgcagaccccaggtcaaatgagtactgagatttttctcttctatgagatgtatttcaatcccctgaagtttccacgggaattctttatttcatggtggatgaggtcgtatgtcctgtcccataactgtcctgccaccatcacctgattttcaaccataacctgtttttggtcatgctctgagcccccattttttctgtaacctccaggtggtgtttaagctgctgcaccccattgaggggttagtggtaatcgctctgtggttccctctgtgtgcacacgaataaatttgtatgccttttctccaa

SEQ ID NO: 381595 - DNA, 530 bp, Homo sapiens
aaattgattgtggtgctagttgcacaactctgtgaatacactaaaaaccactgaattatatactttaaatcgataattgtttttgaaaattatatacatccaggtagcaaccagccaaaaccagatcaaaaacattttcattacccccaaaagttctagcctgtctatttccagtcaatcctctggcctccctgaaacatttctctctcactctccaccaccaccaggctgagatgtttgacttctctcgtgatagattagttttgctgatcctagaacttcatataaatggaatcatacagcacatgtatgtattcttttgtgtttggcttctttcactcagcagattataaaattaatacaagtttttctttttatcagtagttcttttttattgccaagtagtattctattgttgaaatatatcagtttgcttatccattgtcctgtggatggatatttgaattgtttcctgtttagggctgcatgaataaaattgctatgaatgtttgtatacaagtctatttgga

SEQ ID NO: 381596 - DNA, 271 bp, Homo sapiens
agcagaagcgtcctcagtcacggcggcacaggctctgggcctagcaccgaacgtctggtccctggcctgtgcacaattcgtacatcagtgatcacactgttatttcccaaacgacccttcagctggatacgacatttcctgattgcagctgtgcttattgcacttaataatgttctggtcatccttgtgccaactataaaatacatcttcggattcatagctgaagggtcgtttgggaaataacagtgtgatcactgatgtacgaattggg

SEQ ID NO: 381597 - DNA, 3736 bp, Homo sapiens
gcagcgcctggagcatgagccgggtggtggcgtgcacggaggatcgcgggaggctgccgcctcgggacaccccactcacacagaacagagtgttctgaacatcaacacaaagtggaagaaccttaagctgaaggtacagtatattatttacactgaaggggcttgtgtgtggacaagaaagcgctgacagctcaaatggatcccatggaactgagaaatgtcaacatcgaaccagatgatgagagcagcagtggagaaagtgctccagatagctacatcgggataggaaattcagaaaaggcagcaatgagcagtcaatttgctaatgaagacactgaaagtcagaaattcctgacaaatggatttttggggaaaaagaagctggcagattatgctgatgaacaccatcccggaaccacttcctttggaatgtcttcatttaacctgagtaatgccatcatgggcagtgggatcctgggcttgtcctatgccatggccaacacagggatcatactttttataatcatgctgcttgctgtggcaatattatcactgtattcagttcaccttttattaaaaacagccaaggaaggagggtctttgatttatgaaaaattaggagaaaaggcatttggatggccgggaaaaattggagcttttgtttccattacaatgcagaacattggagcaatgtcaagctacctctttatcattaaatatgaactacctgaagtaatcagagcattcatgggacttgaagaaaatactggagaatggtacctcaatggcaactacctcatcatatttgtgtctgttggaattattcttccactttcgctccttaaaaatttaggttatcttggctataccagtggattttctcttacctgcatggtgttttttgttagtgtggtgatttacaagaaattccaaataccctgccctctacctgttttggatcacagtgttggaaatctgtcattcaacaacacgcttccaatgcatgtggtaatgttacccaacaactctgagagttctgatgtgaacttcatgatggattacacccaccgcaatcctgcagggctggatgagaaccaggccaagggctctcttcatgacagtggagtagaatatgaagctcatagtgatgacaagtgtgaacccaaatactttgtattcaactcccggacggcctatgcaattcctatcctagtatttgcttttgtatgccaccctgaggtccttcccatctacagtgaacttaaagatcggtcccggagaaaaatgcaaacggtgtcaaatatttccatcacggggatgcttgtcatgtacctgcttgccgccctctttggttacctaaccttctatggagaagttgcacgagatgaattacttcatgcctacagcaaagtgtatacattagacatccctcttctcatggttcgcctggcagtccttgtggcagtaacactaactgtgcccattgtcctcttcccaattcgtacatcagtgatcacactgttatttcccaaacgacccttcagctggatacgacatttcctgattgcagctgtgcttattgcacttaataatgttctggtcatccttgtgccaactataaaatacatcttcggattcataggggcttcttctgccactatgctgatttttattcttccagcagttttttatcttaaacttgtcaagaaagaaacttttaggtcaccccaaaaggtcggggctttaattttccttgtggttggaatattcttcatgattggaagcatggcactcattataattgactggatttatgatcctccaaattccaagcatcactaacacaaggaaaaatactttctttttctattggaaatggttacaagttatactccaaaagatatttgaattatcttgattggaatgttattcataggaaataacaggaagattccaaagacgtttaccagtaatatcaccaggcacctgcagaagaggaaaatcactgtttttgtcaaggatggttgtgtatgtgtttaaaataaaacctgtggtgcacatttctacccaggttttgctagagcagtgtgagatgatgaaggtgtatttttgctgctttacgagcagaataagggtaactgcatgtaacaatcatcagatagtactctttcccctgccgtctcctcatcctgcaccccctaaaaaagtaccaaacatttgcattctcagaacatcaaacaaaaatgccctggtggcaaagctatcaccatttaatgtcttctctcagtcttgcaccaaagtctctggtctgtttactaacagaggcaaaaggcatgtcttaggaactgtttctgtttctgtaaggtacatgaatggtcaaacaccagtctagagcatcttattgtcaacagcaaaataatattttgcccaccctgtttgtgacattgagttgtgacttctatattcaatagatttttgtaaatgttaaaacatctatatttaaatgttaaaacactaaatatagagaggggctttatttcaatcatagagcaacaacattattcctaaatcctcttgtcatacttttgtcattgaacaatgctctccctctcgtcttccatcctcattcagaatttttagaagaccacaatcgtggagatacactacccagtattgtttgatacatttttatttgataaacattcagtgcaggaaactgtgatttgctatatgtttatgtatataatcttattctgtagtcatcagaatgttaatgtaaggtacatttgatttttattttttacatgtgtagttttctttcttcacagtcaaagcatttatattattgggggtgggggcagggaattaagttggtgggctcgaaaatccattcatatgtatctgtctacaaatgtctggggataatttaaatttgaaacctaagttatatatagtttggcaatgctcttcttcaatatttacaataataggatgatctacaagaaaataagtttctttttgcaaatttttatcatactaaagttgttcttttaatttagcatatctaaaataggaattagttcagtttagctcacacaggtgtttgctgacattcattggccatttaatacagtgttgagtggttctccgtaaaagtataagtgctaacactacgaagaaatgcacacgatcattcttgctcacttctataacaaacttacataaaatggatttaaaaattcctactcacagcctaaaacttctggagttcactacctttttttcaaatcatagtaagatcacttgtgtattttatattttagtaaagccaattatgaagtacaagtatcatacacgtacttttgagctactattatttgaaaaaaatctgccaaatagcatctttaggatatatttacattttcactcatctaaaaagtatacaaaaataaaaagtggaaaaaggtatcttctgaatgttcaagagcatcctatagtgccaaataataaagcaccatttttttcttcataaccaggattaaaattcatatatactgcagggcagacatacatatgatagcttgtgctgattaatttaaccccatttgtaaacagatgaaaattttattttcttatttcatttataagatggctcaatgtattgggaggcttcttttttattacagaaagtgtatattggtatataataaatgaacttttcaaatgacaaaaaaat

SEQ ID NO: 381598 - DNA, 3826 bp, Homo sapiens
gcagcgcctggagcatgagccgggtggtggcgtgcacggaggatcgcgggaggctgccgcctcgggacaccccactcacacagggcaaaaggatgtatacactccatcttcatttaaaacactggaggattggaaaggagaaaaggaacaggacagaaaaaaaaacagagtgttctgaacatcaacacaaagtggaagaaccttaagctgaaggtacagtatattatttacactgaaggggcttgtgtgtggacaagaaagcgctgacagctcaaatggatcccatggaactgagaaatgtcaacatcgaaccagatgatgagagcagcagtggagaaagtgctccagatagctacatcgggataggaaattcagaaaaggcagcaatgagcagtcaatttgctaatgaagacactgaaagtcagaaattcctgacaaatggatttttggggaaaaagaagctggcagattatgctgatgaacaccatcccggaaccacttcctttggaatgtcttcatttaacctgagtaatgccatcatgggcagtgggatcctgggcttgtcctatgccatggccaacacagggatcatactttttataatcatgctgcttgctgtggcaatattatcactgtattcagttcaccttttattaaaaacagccaaggaaggagggtctttgatttatgaaaaattaggagaaaaggcatttggatggccgggaaaaattggagcttttgtttccattacaatgcagaacattggagcaatgtcaagctacctctttatcattaaatatgaactacctgaagtaatcagagcattcatgggacttgaagaaaatactggagaatggtacctcaatggcaactacctcatcatatttgtgtctgttggaattattcttccactttcgctccttaaaaatttaggttatcttggctataccagtggattttctcttacctgcatggtgttttttgttagtgtggtgatttacaagaaattccaaataccctgccctctacctgttttggatcacagtgttggaaatctgtcattcaacaacacgcttccaatgcatgtggtaatgttacccaacaactctgagagttctgatgtgaacttcatgatggattacacccaccgcaatcctgcagggctggatgagaaccaggccaagggctctcttcatgacagtggagtagaatatgaagctcatagtgatgacaagtgtgaacccaaatactttgtattcaactcccggacggcctatgcaattcctatcctagtatttgcttttgtatgccaccctgaggtccttcccatctacagtgaacttaaagatcggtcccggagaaaaatgcaaacggtgtcaaatatttccatcacggggatgcttgtcatgtacctgcttgccgccctctttggttacctaaccttctatggagaagttgcacgagatgaattacttcatgcctacagcaaagtgtatacattagacatccctcttctcatggttcgcctggcagtccttgtggcagtaacactaactgtgcccattgtcctcttcccaattcgtacatcagtgatcacactgttatttcccaaacgacccttcagctggatacgacatttcctgattgcagctgtgcttattgcacttaataatgttctggtcatccttgtgccaactataaaatacatcttcggattcataggggcttcttctgccactatgctgatttttattcttccagcagttttttatcttaaacttgtcaagaaagaaacttttaggtcaccccaaaaggtcgggcatggcactcattataattgactggatttatgatcctccaaattccaagcatcactaacacaaggaaaaatactttctttttctattggaaatggttacaagttatactccaaaagatatttgaattatcttgattggaatgttattcataggaaataacaggaagattccaaagacgtttaccagtaatatcaccaggcacctgcagaagaggaaaatcactgtttttgtcaaggatggttgtgtatgtgtttaaaataaaacctgtggtgcacatttctacccaggttttgctagagcagtgtgagatgatgaaggtgtatttttgctgctttacgagcagaataagggtaactgcatgtaacaatcatcagatagtactctttcccctgccgtctcctcatcctgcaccccctaaaaaagtaccaaacatttgcattctcagaacatcaaacaaaaatgccctggtggcaaagctatcaccatttaatgtcttctctcagtcttgcaccaaagtctctggtctgtttactaacagaggcaaaaggcatgtcttaggaactgtttctgtttctgtaaggtacatgaatggtcaaacaccagtctagagcatcttattgtcaacagcaaaataatattttgcccaccctgtttgtgacattgagttgtgacttctatattcaatagatttttgtaaatgttaaaacatctatatttaaatgttaaaacactaaatatagagaggggctttatttcaatcatagagcaacaacaaaaataatgcttatagctaaactgcctgttctagaaagcatctgctttttcatgttattcctaaatcctcttgtcatacttttgtcattgaacaatgctctccctctcgtcttccatcctcattcagaatttttagaagaccacaatcgtggagatacactacccagtattgtttgatacatttttatttgataaacattcagtgcaggaaactgtgatttgctatatgtttatgtatataatcttattctgtagtcatcagaatgttaatgtaaggtacatttgatttttattttttacatgtgtagttttctttcttcacagtcaaagcatttatattattgggggtgggggcagggaattaagttggtgggctcgaaaatccattcatatgtatctgtctacaaatgtctggggataatttaaatttgaaacctaagttatatatagtttggcaatgctcttcttcaatatttacaataataggatgatctacaagaaaataagtttctttttgcaaatttttatcatactaaagttgttcttttaatttagcatatctaaaataggaattagttcagtttagctcacacaggtgtttgctgacattcattggccatttaatacagtgttgagtggttctccgtaaaagtataagtgctaacactacgaagaaatgcacacgatcattcttgctcacttctataacaaacttacataaaatggatttaaaaattcctactcacagcctaaaacttctggagttcactacctttttttcaaatcatagtaagatcacttgtgtattttatattttagtaaagccaattatgaagtacaagtatcatacacgtacttttgagctactattatttgaaaaaaatctgccaaatagcatctttaggatatatttacattttcactcatctaaaaagtatacaaaaataaaaagtggaaaaaggtatcttctgaatgttcaagagcatcctatagtgccaaataataaagcaccatttttttcttcataaccaggattaaaattcatatatactgcagggcagacatacatatgatagcttgtgctgattaatttaaccccatttgtaaacagatgaaaattttattttcttatttcatttataagatggctcaatgtattgggaggcttcttttttattacagaaagtgtatattggtatataataaatgaacttttcaaatgacaaaaaaat

SEQ ID NO: 381599 - DNA, 3674 bp, Homo sapiens
gcagcgcctggagcatgagccgggtggtggcgtgcacggaggatcgcgggaggctgccgcctcgggacaccccactcacacagggcaaaaggatgtatacactccatcttcatttaaaacactggaggattggaaaggagaaaaggaacaggacagaaaaaaaaacagagtgttctgaacatcaacacaaagtggaagaaccttaagctgaaggtacagtatattatttacactgaaggggcttgtgtgtggacaagaaagcgctgacagctcaaatggatcccatggaactgagaaatgtcaacatcgaaccagatgatgagagcagcagtggagaaagtgctccagatagctacatcgggataggaaattcagaaaaggcagcaatgagcagtcaatttgctaatgaagacactgaaagtcagaaattcctgacaaatggatttttggggaaaaagaagctggcagattatgctgatgaacaccatcccggaaccacttcctttggaatgtcttcatttaacctgagtaatgccatcatgggcagtgggatcctgggcttgtcctatgccatggccaacacagggatcatactttttataatcatgctgcttgctgtggcaatattatcactgtattcagttcaccttttattaaaaacagccaaggaaggagggtctttgatttatgaaaaattaggagaaaaggcatttggatggccgggaaaaattggagcttttgtttccattacaatgcagaacattggagcaatgtcaagctacctctttatcattaaatatgaactacctgaagtaatcagagcattcatgggacttgaagaaaatactggagaatggtacctcaatggcaactacctcatcatatttgtgtctgttggaattattcttccactttcgctccttaaaaatttaggttatcttggctataccagtggattttctcttacctgcatggtgttttttgttagtgtggtgatttacaagaaattccaaataccctgccctctacctgttttggatcacagtgttggaaatctgtcattcaacaacacgcttccaatgcatgtggtaatgttacccaacaactctgagagttctgatgtgaacttcatgatggattacacccaccgcaatcctgcagggctggatgagaaccaggccaagggctctcttcatgacagtggagtagaatatgaagctcatagtgatgacaagtgtgaacccaaatactttgtattcaactcccggacggcctatgcaattcctatcctagtatttgcttttgtatgccaccctgaggtccttcccatctacagtgaacttaaagatcggtcccggagaaaaatgcaaacggtgtcaaatatttccatcacggggatgcttgtcatgtacctgcttgccgccctctttggttacctaaccttctatggagaagttgcacgagatgaattacttcatgcctacagcaaagtgtatacattagacatccctcttctcatggttcgcctggcagtccttgtggcagtaacactaactgtgcccattgtcctcttcccaattcgtacatcagtgatcacactgttatttcccaaacgacccttcagctggatacgacatttcctgattgcagctgtgcttattgcacttaataatgttctggtcatccttgtgccaactataaaatacatcttcggattcataggggcttcttctgccactatgctgatttttattcttccagcagttttttatcttaaacttgtcaagaaagaaacttttaggtcaccccaaaaggtcggggaaataacaggaagattccaaagacgtttaccagtaatatcaccaggcacctgcagaagaggaaaatcactgtttttgtcaaggatggttgtgtatgtgtttaaaataaaacctgtggtgcacatttctacccaggttttgctagagcagtgtgagatgatgaaggtgtatttttgctgctttacgagcagaataagggtaactgcatgtaacaatcatcagatagtactctttcccctgccgtctcctcatcctgcaccccctaaaaaagtaccaaacatttgcattctcagaacatcaaacaaaaatgccctggtggcaaagctatcaccatttaatgtcttctctcagtcttgcaccaaagtctctggtctgtttactaacagaggcaaaaggcatgtcttaggaactgtttctgtttctgtaaggtacatgaatggtcaaacaccagtctagagcatcttattgtcaacagcaaaataatattttgcccaccctgtttgtgacattgagttgtgacttctatattcaatagatttttgtaaatgttaaaacatctatatttaaatgttaaaacactaaatatagagaggggctttatttcaatcatagagcaacaacaaaaataatgcttatagctaaactgcctgttctagaaagcatctgctttttcatgttattcctaaatcctcttgtcatacttttgtcattgaacaatgctctccctctcgtcttccatcctcattcagaatttttagaagaccacaatcgtggagatacactacccagtattgtttgatacatttttatttgataaacattcagtgcaggaaactgtgatttgctatatgtttatgtatataatcttattctgtagtcatcagaatgttaatgtaaggtacatttgatttttattttttacatgtgtagttttctttcttcacagtcaaagcatttatattattgggggtgggggcagggaattaagttggtgggctcgaaaatccattcatatgtatctgtctacaaatgtctggggataatttaaatttgaaacctaagttatatatagtttggcaatgctcttcttcaatatttacaataataggatgatctacaagaaaataagtttctttttgcaaatttttatcatactaaagttgttcttttaatttagcatatctaaaataggaattagttcagtttagctcacacaggtgtttgctgacattcattggccatttaatacagtgttgagtggttctccgtaaaagtataagtgctaacactacgaagaaatgcacacgatcattcttgctcacttctataacaaacttacataaaatggatttaaaaattcctactcacagcctaaaacttctggagttcactacctttttttcaaatcatagtaagatcacttgtgtattttatattttagtaaagccaattatgaagtacaagtatcatacacgtacttttgagctactattatttgaaaaaaatctgccaaatagcatctttaggatatatttacattttcactcatctaaaaagtatacaaaaataaaaagtggaaaaaggtatcttctgaatgttcaagagcatcctatagtgccaaataataaagcaccatttttttcttcataaccaggattaaaattcatatatactgcagggcagacatacatatgatagcttgtgctgattaatttaaccccatttgtaaacagatgaaaattttattttcttatttcatttataagatggctcaatgtattgggaggcttcttttttattacagaaagtgtatattggtatataataaatgaacttttcaaatgacaaaaaaat

SEQ ID NO: 381600 - DNA, 399 bp, Homo sapiens
tttttaatgactgagtctaggtgatttacaagaaattccaaataccctgccctctacctgttttggatcacagtgttggaaatctgtcattcaacaacacgcttccaatgcatgtggtaatgttacccaacaactctgagagttctgatgtgaacttcatgatggattacacccaccgcaatcctgcagggctggatgagaaccaggccaagggctctcttcatgacagtggagtagaatatgaagctcatagtgatgacaagtgtgaacccaaatactttgtattcaactcccgggtaagtgagcggtccgggcttctaatgagtacagttatgtgttttctaagtttttattcaataaactgagatggcctgagatcaccatctatgttggaatgct

SEQ ID NO: 381601 - DNA, 3982 bp, Homo sapiens
gcagcgcctggagcatgagccgggtggtggcgtgcacggaggatcgcgggaggctgccgcctcgggacaccccactcacacagagctgacgcaagttggacagaaggaggtgttggggtgaggtggtggtgttgattggcttgtctcgttcactcccactggtctttaaatcaatgtctagatctctaaagtttcatataaatcaaagctgttacacgggtctgccattccaaacaagtcaggaaagcctgcacaggactggataaataattaagaacagagtgttctgaacatcaacacaaagtggaagaaccttaagctgaaggtacagtatattatttacactgaaggggcttgtgtgtggacaagaaagcgctgacagctcaaatggatcccatggaactgagaaatgtcaacatcgaaccagatgatgagagcagcagtggagaaagtgctccagatagctacatcgggataggaaattcagaaaaggcagcaatgagcagtcaatttgctaatgaagacactgaaagtcagaaattcctgacaaatggatttttggggaaaaagaagctggcagattatgctgatgaacaccatcccggaaccacttcctttggaatgtcttcatttaacctgagtaatgccatcatgggcagtgggatcctgggcttgtcctatgccatggccaacacagggatcatactttttataatcatgctgcttgctgtggcaatattatcactgtattcagttcaccttttattaaaaacagccaaggaaggagggtctttgatttatgaaaaattaggagaaaaggcatttggatggccgggaaaaattggagcttttgtttccattacaatgcagaacattggagcaatgtcaagctacctctttatcattaaatatgaactacctgaagtaatcagagcattcatgggacttgaagaaaatactggagaatggtacctcaatggcaactacctcatcatatttgtgtctgttggaattattcttccactttcgctccttaaaaatttaggttatcttggctataccagtggattttctcttacctgcatggtgttttttgttagtgtggtgatttacaagaaattccaaataccctgccctctacctgttttggatcacagtgttggaaatctgtcattcaacaacacgcttccaatgcatgtggtaatgttacccaacaactctgagagttctgatgtgaacttcatgatggattacacccaccgcaatcctgcagggctggatgagaaccaggccaagggctctcttcatgacagtggagtagaatatgaagctcatagtgatgacaagtgtgaacccaaatactttgtattcaactcccggacggcctatgcaattcctatcctagtatttgcttttgtatgccaccctgaggtccttcccatctacagtgaacttaaagatcggtcccggagaaaaatgcaaacggtgtcaaatatttccatcacggggatgcttgtcatgtacctgcttgccgccctctttggttacctaaccttctatggagaagttgcacgagatgaattacttcatgcctacagcaaagtgtatacattagacatccctcttctcatggttcgcctggcagtccttgtggcagtaacactaactgtgcccattgtcctcttcccaattcgtacatcagtgatcacactgttatttcccaaacgacccttcagctggatacgacatttcctgattgcagctgtgcttattgcacttaataatgttctggtcatccttgtgccaactataaaatacatcttcggattcataggggcttcttctgccactatgctgatttttattcttccagcagttttttatcttaaacttgtcaagaaagaaacttttaggtcaccccaaaaggtcggggctttaattttccttgtggttggaatattcttcatgattggaagcatggcactcattataattgactggatttatgatcctccaaattccaagcatcactaacacaaggaaaaatactttctttttctattggaaatggttacaagttatactccaaaagatatttgaattatcttgattggaatgttattcataggaaataacaggaagattccaaagacgtttaccagtaatatcaccaggcacctgcagaagaggaaaatcactgtttttgtcaaggatggttgtgtatgtgtttaaaataaaacctgtggtgcacatttctacccaggttttgctagagcagtgtgagatgatgaaggtgtatttttgctgctttacgagcagaataagggtaactgcatgtaacaatcatcagatagtactctttcccctgccgtctcctcatcctgcaccccctaaaaaagtaccaaacatttgcattctcagaacatcaaacaaaaatgccctggtggcaaagctatcaccatttaatgtcttctctcagtcttgcaccaaagtctctggtctgtttactaacagaggcaaaaggcatgtcttaggaactgtttctgtttctgtaaggtacatgaatggtcaaacaccagtctagagcatcttattgtcaacagcaaaataatattttgcccaccctgtttgtgacattgagttgtgacttctatattcaatagatttttgtaaatgttaaaacatctatatttaaatgttaaaacactaaatatagagaggggctttatttcaatcatagagcaacaacaaaaataatgcttatagctaaactgcctgttctagaaagcatctgctttttcatgttattcctaaatcctcttgtcatacttttgtcattgaacaatgctctccctctcgtcttccatcctcattcagaatttttagaagaccacaatcgtggagatacactacccagtattgtttgatacatttttatttgataaacattcagtgcaggaaactgtgatttgctatatgtttatgtatataatcttattctgtagtcatcagaatgttaatgtaaggtacatttgatttttattttttacatgtgtagttttctttcttcacagtcaaagcatttatattattgggggtgggggcagggaattaagttggtgggctcgaaaatccattcatatgtatctgtctacaaatgtctggggataatttaaatttgaaacctaagttatatatagtttggcaatgctcttcttcaatatttacaataataggatgatctacaagaaaataagtttctttttgcaaatttttatcatactaaagttgttcttttaatttagcatatctaaaataggaattagttcagtttagctcacacaggtgtttgctgacattcattggccatttaatacagtgttgagtggttctccgtaaaagtataagtgctaacactacgaagaaatgcacacgatcattcttgctcacttctataacaaacttacataaaatggatttaaaaattcctactcacagcctaaaacttctggagttcactacctttttttcaaatcatagtaagatcacttgtgtattttatattttagtaaagccaattatgaagtacaagtatcatacacgtacttttgagctactattatttgaaaaaaatctgccaaatagcatctttaggatatatttacattttcactcatctaaaaagtatacaaaaataaaaagtggaaaaaggtatcttctgaatgttcaagagcatcctatagtgccaaataataaagcaccatttttttcttcataaccaggattaaaattcatatatactgcagggcagacatacatatgatagcttgtgctgattaatttaaccccatttgtaaacagatgaaaattttattttcttatttcatttataagatggctcaatgtattgggaggcttcttttttattacagaaagtgtatattggtatataataaatgaacttttcaaatgacaaaaaaat

SEQ ID NO: 381602 - DNA, 1738 bp, Homo sapiens
gcagcgcctggagcatgagccgggtggtggcgtgcacggaggatcgcgggaggctgccgcctcgggacaccccactcacacagggcaaaaggatgtatacactccatcttcatttaaaacactggaggattggaaaggagaaaaggaacaggacagaaaaaaaaacagagtgttctgaacatcaacacaaagtggaagaaccttaagctgaaggtacagtatattatttacactgaaggggcttgtgtgtggacaagaaagcgctgacagctcaaatggatcccatggaactgagaaatgtcaacatcgaaccagatgatgagagcagcagtggagaaagtgctccagatagctacatcgggataggaaattcagaaaaggcagcaatgagcagtcaatttgctaatgaagacactgaaagtcagaaattcctgacaaatggatttttggggaaaaagaagctggcagattatgctgatgaacaccatcccggaaccacttcctttggaatgtcttcatttaacctgagtaatgccatcatgggcagtgggatcctgggcttgtcctatgccatggccaacacagggatcatactttttataatcatgctgcttgctgtggcaatattatcactgtattcagttcaccttttattaaaaacagccaaggaaggagggtctttgatttatgaaaaattaggagaaaaggcatttggatggccgggaaaaattggagcttttgtttccattacaatgcagaacattggagcaatgtcaagctacctctttatcattaaatatgaactacctgaagtaatcagagcattcatgggacttgaagaaaatactggagaatggtacctcaatggcaactacctcatcatatttgtgtctgttggaattattcttccactttcgctccttaaaaatttaggttatcttggctataccagtggattttctcttacctgcatggtgttttttgttagtgtggatgatctacaagaaaataagtttctttttgcaaatttttatcatactaaagttgttcttttaatttagcatatctaaaataggaattagttcagtttagctcacacaggtgtttgctgacattcattggccatttaatacagtgttgagtggttctccgtaaaagtataagtgctaacactacgaagaaatgcacacgatcattcttgctcacttctataacaaacttacataaaatggatttaaaaattcctactcacagcctaaaacttctggagttcactacctttttttcaaatcatagtaagatcacttgtgtattttatattttagtaaagccaattatgaagtacaagtatcatacacgtacttttgagctactattatttgaaaaaaatctgccaaatagcatctttaggatatatttacattttcactcatctaaaaagtatacaaaaataaaaagtggaaaaaggtatcttctgaatgttcaagagcatcctatagtgccaaataataaagcaccatttttttcttcataaccaggattaaaattcatatatactgcagggcagacatacatatgatagcttgtgctgattaatttaaccccatttgtaaacagatgaaaattttattttcttatttcatttataagatggctcaatgtattgggaggcttcttttttattacagaaagtgtatattggtatataataaatgaacttttcaaatgacaaaaaaat

SEQ ID NO: 381603 - DNA, 3790 bp, Homo sapiens
gcagcgcctggagcatgagccgggtggtggcgtgcacggaggatcgcgggaggctgccgcctcgggacaccccactcacacagaacagagtgttctgaacatcaacacaaagtggaagaaccttaagctgaaggtacagtatattatttacactgaaggggcttgtgtgtggacaagaaagcgctgacagctcaaatggatcccatggaactgagaaatgtcaacatcgaaccagatgatgagagcagcagtggagaaagtgctccagatagctacatcgggataggaaattcagaaaaggcagcaatgagcagtcaatttgctaatgaagacactgaaagtcagaaattcctgacaaatggatttttggggaaaaagaagctggcagattatgctgatgaacaccatcccggaaccacttcctttggaatgtcttcatttaacctgagtaatgccatcatgggcagtgggatcctgggcttgtcctatgccatggccaacacagggatcatactttttataatcatgctgcttgctgtggcaatattatcactgtattcagttcaccttttattaaaaacagccaaggaaggagggtctttgatttatgaaaaattaggagaaaaggcatttggatggccgggaaaaattggagcttttgtttccattacaatgcagaacattggagcaatgtcaagctacctctttatcattaaatatgaactacctgaagtaatcagagcattcatgggacttgaagaaaatactggagaatggtacctcaatggcaactacctcatcatatttgtgtctgttggaattattcttccactttcgctccttaaaaatttaggttatcttggctataccagtggattttctcttacctgcatggtgttttttgttagtgtggtgatttacaagaaattccaaataccctgccctctacctgttttggatcacagtgttggaaatctgtcattcaacaacacgcttccaatgcatgtggtaatgttacccaacaactctgagagttctgatgtgaacttcatgatggattacacccaccgcaatcctgcagggctggatgagaaccaggccaagggctctcttcatgacagtggagtagaatatgaagctcatagtgatgacaagtgtgaacccaaatactttgtattcaactcccggacggcctatgcaattcctatcctagtatttgcttttgtatgccaccctgaggtccttcccatctacagtgaacttaaagatcggtcccggagaaaaatgcaaacggtgtcaaatatttccatcacggggatgcttgtcatgtacctgcttgccgccctctttggttacctaaccttctatggagaagttgcacgagatgaattacttcatgcctacagcaaagtgtatacattagacatccctcttctcatggttcgcctggcagtccttgtggcagtaacactaactgtgcccattgtcctcttcccaattcgtacatcagtgatcacactgttatttcccaaacgacccttcagctggatacgacatttcctgattgcagctgtgcttattgcacttaataatgttctggtcatccttgtgccaactataaaatacatcttcggattcataggggcttcttctgccactatgctgatttttattcttccagcagttttttatcttaaacttgtcaagaaagaaacttttaggtcaccccaaaaggtcggggctttaattttccttgtggttggaatattcttcatgattggaagcatggcactcattataattgactggatttatgatcctccaaattccaagcatcactaacacaaggaaaaatactttctttttctattggaaatggttacaagttatactccaaaagatatttgaattatcttgattggaatgttattcataggaaataacaggaagattccaaagacgtttaccagtaatatcaccaggcacctgcagaagaggaaaatcactgtttttgtcaaggatggttgtgtatgtgtttaaaataaaacctgtggtgcacatttctacccaggttttgctagagcagtgtgagatgatgaaggtgtatttttgctgctttacgagcagaataagggtaactgcatgtaacaatcatcagatagtactctttcccctgccgtctcctcatcctgcaccccctaaaaaagtaccaaacatttgcattctcagaacatcaaacaaaaatgccctggtggcaaagctatcaccatttaatgtcttctctcagtcttgcaccaaagtctctggtctgtttactaacagaggcaaaaggcatgtcttaggaactgtttctgtttctgtaaggtacatgaatggtcaaacaccagtctagagcatcttattgtcaacagcaaaataatattttgcccaccctgtttgtgacattgagttgtgacttctatattcaatagatttttgtaaatgttaaaacatctatatttaaatgttaaaacactaaatatagagaggggctttatttcaatcatagagcaacaacaaaaataatgcttatagctaaactgcctgttctagaaagcatctgctttttcatgttattcctaaatcctcttgtcatacttttgtcattgaacaatgctctccctctcgtcttccatcctcattcagaatttttagaagaccacaatcgtggagatacactacccagtattgtttgatacatttttatttgataaacattcagtgcaggaaactgtgatttgctatatgtttatgtatataatcttattctgtagtcatcagaatgttaatgtaaggtacatttgatttttattttttacatgtgtagttttctttcttcacagtcaaagcatttatattattgggggtgggggcagggaattaagttggtgggctcgaaaatccattcatatgtatctgtctacaaatgtctggggataatttaaatttgaaacctaagttatatatagtttggcaatgctcttcttcaatatttacaataataggatgatctacaagaaaataagtttctttttgcaaatttttatcatactaaagttgttcttttaatttagcatatctaaaataggaattagttcagtttagctcacacaggtgtttgctgacattcattggccatttaatacagtgttgagtggttctccgtaaaagtataagtgctaacactacgaagaaatgcacacgatcattcttgctcacttctataacaaacttacataaaatggatttaaaaattcctactcacagcctaaaacttctggagttcactacctttttttcaaatcatagtaagatcacttgtgtattttatattttagtaaagccaattatgaagtacaagtatcatacacgtacttttgagctactattatttgaaaaaaatctgccaaatagcatctttaggatatatttacattttcactcatctaaaaagtatacaaaaataaaaagtggaaaaaggtatcttctgaatgttcaagagcatcctatagtgccaaataataaagcaccatttttttcttcataaccaggattaaaattcatatatactgcagggcagacatacatatgatagcttgtgctgattaatttaaccccatttgtaaacagatgaaaattttattttcttatttcatttataagatggctcaatgtattgggaggcttcttttttattacagaaagtgtatattggtatataataaatgaacttttcaaatgacaaaaaaat

SEQ ID NO: 381604 - DNA, 1896 bp, Homo sapiens
gcacccccggacaccgaccaacatcacgagttacgctcgatagaaataacaggaagattccaaagacgtttaccagtaatatcaccaggcacctgcagaagaggaaaatcactgtttttgtcaaggatggttgtgtatgtgtttaaaataaaacctgtggtgcacatttctacccaggttttgctagagcagtgtgagatgatgaaggtgtatttttgctgctttacgagcagaataagggtaactgcatgtaacaatcatcagatagtactctttcccctgccgtctcctcatcctgcaccccctaaaaaagtaccaaacatttgcattctcagaacatcaaacaaaaatgccctggtggcaaagctatcaccatttaatgtcttctctcagtcttgcaccaaagtctctggtctgtttactaacagaggcaaaaggcatgtcttaggaactgtttctgtttctgtaaggtacatgaatggtcaaacaccagtctagagcatcttattgtcaacagcaaaataatattttgcccaccctgtttgtgacattgagttgtgacttctatattcaatagatttttgtaaatgttaaaacatctatatttaaatgttaaaacactaaatatagagaggggctttatttcaatcatagagcaacaacaaaaataatgcttatagctaaactgcctgttctagaaagcatctgctttttcatgttattcctaaatcctcttgtcatacttttgtcattgaacaatgctctccctctcgtcttccatcctcattcagaatttttagaagaccacaatcgtggagatacactacccagtattgtttgatacatttttatttgataaacattcagtgcaggaaactgtgatttgctatatgtttatgtatataatcttattctgtagtcatcagaatgttaatgtaaggtacatttgatttttattttttacatgtgtagttttctttcttcacagtcaaagcatttatattattgggggtgggggcagggaattaagttggtgggctcgaaaatccattcatatgtatctgtctacaaatgtctggggataatttaaatttgaaacctaagttatatatagtttggcaatgctcttcttcaatatttacaataataggatgatctacaagaaaataagtttctttttgcaaatttttatcatactaaagttgttcttttaatttagcatatctaaaataggaattagttcagtttagctcacacaggtgtttgctgacattcattggccatttaatacagtgttgagtggttctccgtaaaagtataagtgctaacactacgaagaaatgcacacgatcattcttgctcacttctataacaaacttacataaaatggatttaaaaattcctactcacagcctaaaacttctggagttcactacctttttttcaaatcatagtaagatcacttgtgtattttatattttagtaaagccaattatgaagtacaagtatcatacacgtacttttgagctactattatttgaaaaaaatctgccaaatagcatctttaggatatatttacattttcactcatctaaaaagtatacaaaaataaaaagtggaaaaaggtatcttctgaatgttcaagagcatcctatagtgccaaataataaagcaccatttttttcttcataaccaggattaaaattcatatatactgcagggcagacatacatatgatagcttgtgctgattaatttaaccccatttgtaaacagatgaaaattttattttcttatttcatttataagatggctcaatgtattgggaggcttcttttttattacagaaagtgtatattggtatataataaatgaacttttcaaatgacaaaaaaat

SEQ ID NO: 381605 - DNA, 736 bp, Homo sapiens
acaaatacatttgaagacaggaataggtggttgggtgggtttagacttagcaggtaaatgtccttttctcaactggctctgtccatttgttaatccgtaaaggaaaattcctggtagttcccttttttctctctggttgaaatagggttttatggctacccttagctgcaaggacagctgggaaagacttgattaacatagatggattatgatctgttctctggggttagtagtaccgtgtttttctgttggtaaaatgtggggctgggattggaagactcttgggtgtttctgccttggatatcttatataagacttcaatcagcacctatgtgctgatgatgcccttgtctgcctgagtcgcctgaacagatcagccctcatgtcagtttctcatggtttcattcagggaccaaccttagttccctgccctgttcctcccacatcaatccagtctgtctgtagggcccgtggattcttcctccctgctgaatgaccttttgtgttactgaccgtctagcctacttcacctccctctccctttctctctcttgtttctcttatcagcaccttttcagtgctaataactcttttttttctccagtgtttaacattttattgttaatactagataatattagattgtgaatttttcttttggcatacaggtttatgatttaacacgtgctattcatgtaactaccatcataattatatatgtaacaattctatcatt

SEQ ID NO: 381606 - DNA, 340 bp, Homo sapiens
gaccatttttaacattcttccctggcttctactagattactccattttgtgaggttcttggggctctttctgctgacctgccacattgtttctctgcaaggtctttagcagggtttatctttgtgcttctggcgtgccctgggattgggatggttttgggagagcttttgctatacaccccagggtatcgccagcccggcaccacttttcctatcaatttcttgactatgtggatttttgaaaaatggaacaccagttcaggcccttgcttataggtacttggggctggtgtgacgacagagcagcttctttgttgatcacctgtgctgacgggcagttt

SEQ ID NO: 381607 - DNA, 173 bp, Homo sapiens
agagccccaggtctttttgcatattaggaggccatgtaacttgaatcttaattaccctaagccaatcatggatagtccatcctccttgccagtgtttggtggaggaatgtatgtgaagcagttctaacctctaagatattagaagaagggttctaggggggtggtcctctacc

SEQ ID NO: 381608 - DNA, 3218 bp, Homo sapiens
ggcaggccgagccagccgtgcgccgcgctccagggcccagggcgccgcacacgcacccacccacccacccagcctcgcagcgccatgggcaagaacaagcagccacgcggccagcagaggcaggggggcccgccggccgcggacgccgctgggcccgacgacatggagccgaagaagggcacgggggcccccaaggagtgcggggaggaggagccccggacctgctgcggctgccggttcccgctgctgctcgccctgctgcagctggccctgggcatcgccgtgaccgtggtgggcttcctcatggcgagcatcagctcctccctgctagtcagggacactccattttgggctgggatcattgtctgcttagtggcctatcttggcttgtttatgctttgtgtctcatatcaggttgacgaacggacatgtattcaattttctatgaaactgttatactttctgctgagtgccctgggcctgacggtctgtgtgctggccgtggcctttgccgcccaccactattcgcagctcacacagtttacctgtgagaccacactcgactcttgccagtgcaaactgccctcctcggagccgctcagcaggacctttgtttaccgggatgtgacggactgtaccagcgtcactggcactttcaaactgttcttactcatccagatgattcttaatttggtctgcggccttgtgtgcttgttggcctgctttgtgatgtggaaacataggtaccaggtcttctatgtgggtgtcaggatatgctccctcacggcttccgaaggcccccagcaaaagatctaacattcttgctcaaagttgcgagagaaagtagcacatggagtagctgaggttaaacaaacaaaaaaaaattttaaacaaagaaaggaaaaaaattgacaataaaagtcactcttctaattgaatatttttatatttttatgaaacaaaagagcatttcttcaggtttctattgtattttttttaacattcttgcagagaaagcaagatccaaattgattttgggatattaaaagttaacagaacactgaacaaggaaagaatggcatagatctatctttacagtctggagttaattcctgttaactcattttatccattccttacataatcttctttcctgttagtccagtttgatggtgtgaatggtgaatttcaggcccagttgctaaattttgtggcatcttcctctagtccttcccacctccagtcatcagccccactctgtcttggagacaggcaggaggtgggggaagagctgaatctctttattttccctggtagagacatcttcaaggcatgaaatagcttaaagagcagagtagaaatggaagaggctttgcaaaaggctagataactaacaacacctgggttggggcggcggcctcttctcttcagctcccttagcttggctccgtaagtggatcacttgccaaatgctttagatgattgcctctcaataattgaaaggtggtggtagttgtattctaaatgatgtagaaggtttaaaaataattacattatgcttctattctatcatctaaaacaaatcattaaaactaatttctagctaattgttaattataattatgctcagaagtctatttaatgagctctgactgtacttacgctgcactgtcggtgttaagagaaattactctcacaagagcagaggcctgaagattctttcttctgaaagccaagcaccacaaggaaaaaaaaattattaatagctcaggttaaaaacacccatttaaacaaaaacaagagcatttgtaataggaagtgtttatacaaacagcacatttgtgatatgttgaaaagcatctctcttggcaaccaatctatgtttgaggaagattgggtaatgctgatgtgttccattcatgaaactgtatttgatacataatcctattattaattcgtatgcttagtcaacctaggaaatcaaaataatgttttgaagttcttatttgagcaatatggccttgacttggagggtagttttagttgttttgtttttaagtgactgtggtttaaagcacaaatgccccaaggtggggagacttctctctgtgattattgttgctattaaattctgaactgtatccatattttaaggaaggagctaaaaatggaaattcatgaaacataaatggtatcaagaactttatcagtatgctttgttgaaagcagaaattaagataataattgagttcaattcgcctctccgcattgcctattgatacactttactaatcatgaaattctaacctaaaaggaaaacattttcctgcttgtcttagaagaaagtggaataattccactgattgtgataatggtttcaatttctacacaatataaatatccagtataaaggaaagcgttaagtcggtaagctagaggattgtaaatatcttttatgtcctctagataaaacacccgattaacagatgttaaaccttttaatgttttgatttgctttaaaaatggccttcctacacattagctccagctaaaaagacacattggagagcttagaggataagtctctggagcagaatttatcacacacaaaagttacaccaacagaataccaagcagaatgatgaggacctgtaaaataccttgtgccctattaaaaaaaaaaaaaaaaaaaaaaagccagtaactgaatccattttgatttttggttgagtttcctacacaaagaagaaaataactgagaatctggaatgttgtagtccatcctttaaagagtaagaaagtagcagttaatgctagtaaccgtgaattaggcaccactgaaagcacatcccgaatttctttaacaacaacattttatagtgaacactacaagtttttatatttaaaaattaagactctgtatatccttaaggtgctctatgctttaccagtaattcacagggtatttcaaatggtagaatcattttagcttctgtgcttcctttttctaaataatgcaacttgtaagagttgacattgtaataagctttataatagtataaccgtcaggagatatatatatatatatacacatacacacacacacacacatatatactatacatatataaaatggggatattactattgtatgattaaatcattcttaagtccccaaggaaaaaaaatcataaacaaatagaaagaactaaacagaa

SEQ ID NO: 381609 - DNA, 369 bp, Homo sapiens
attacacatgattagcaatgtaatcagttacctagagaggtaaagtgtaaggaaagtaattatttgaagaatgtaagccattgttaaattaggaatttctttcattattcagatctgattagcatgaaatataaatcacaagtgtgatactgatttaacagacaaatatatttacttgtataaatattctcagtatttcttagctttcagaaatgttaattcttaatgcaaattacactgacatcacatttttctgtatttgttaacgtaagtatatatcttaaaaatttaaaaagtaatatggcaacaacgtgacttaaaacactatcctccaaaaaaagattaagaggtgtttattatttgaaaatg

SEQ ID NO: 381610 - DNA, 239 bp, Homo sapiens
gaagattaaaaaatgttctcaagggatttacagtctagtagagaatgaaggtagtcttgtaaaaatctttgatttgaggtatatttctttaataatagagttaactgctcccaagttctgagaaaagatttcttagaaacaagatttatcaaacagcagaaaaagagagtgggatgatgcacactgattctattctcccaactgcaaacattcctctcaaagaaataacaactaaatgc

SEQ ID NO: 381611 - DNA, 453 bp, Homo sapiens
attggccaggctggtctcgaactcctgacgttatgatcctcctgcctcagcacaaataactgccttttttatttctcaagacttagaagtccttgaagaacaaaaggatgctggaaatataaaagatggttctcccttaaaactaaaaaggattcataagacaaaagataaagagagacataaaattggagaagaggttatattgagagtactatcaaagagaagccatgccacaaatagttttaagcaagaaaataaagtctgccaacaaccacgagcatgagcttggaagcagatcctccatcctggtcaagtcttcagagactacacatccgggccaattgtgtgactgcagcctcacaagaaaccctgatccagagccactcagctaagctgctcccaaattcctgactctcagaaactgagataataaatgcttgttgtcttcaacca

SEQ ID NO: 381612 - DNA, 348 bp, Homo sapiens
taatagagacggggtttcaccatgttagccaggatggtctcgatctcctgacctcatgatccacctgcctcggccccccaaagtgctgggattacaggcgtgagccactgcgccagaccactcatagacttttaataaagaatgttcggataaattagatacatccatatgttatgcagctatttttgaattagatcgatacttattgacaatacattcatgtcaagtaaaagaaatcagaatgcaaaataatgtatgtaaaatgaccccatttaaaaataacaacaacaacaacaacaaagaaatgcatacctaagtatacatgtctttgtgtgagcatagagaaag

SEQ ID NO: 381613 - DNA, 418 bp, Homo sapiens
ctggagtcattctacagtggtatagaacactagaacttattactgtctaactgtaattttgtatcttttaacaaatctttccatgttccttgcttcccacctcactttccttgcttcccacctcactttccaacctctagtatcctctgttttactttttacttctatgagaagtaaaacacttttttagggagggcttttgatacccatcaaagatggagttcatgaaggaagaattggcattgagaagaaagagagtttctgcccattggttgttttaaagtacttattgtgaaatattccaatatatttaaagttagttttttattagtggtgacttaaattttaactctctagtaaggaatagaaagcttatgactatagagaatcaatatggggaacattagacaaaaatact

SEQ ID NO: 381614 - DNA, 372 bp, Homo sapiens
ttcgccacgtcagcgagcggccagagccacagatgatgactgagtctccgaggcctctcggtctttttctattttaacaggggcgcgtgcagagcgtgagacgaggtcttgctttgccatccaggctggagtgcagtggtgcaatcacagctcactgcagccacaaactcctgggctcaagtgaccctcccacctcggcctcccaggtagctgggactaatagggtcatgccaccatgccctgcttgatcactcttttaaacattgttcttctcttaagaaaacaaacaaaagatttaccttaccataatctacacttttccatcctacttaacattttctaacataaattacttatgtttattgccttact

SEQ ID NO: 381615 - DNA, 498 bp, Homo sapiens
acgtgaaatgctggggctttgagcactgggctgatgagcagggctttgtccaattccttctgatttctctgctgagatccagagcagggtctgccaaggtgtggagctcctattgcaagtccaagcgctgcctggccaggccagaatcgtggagcccagcgctctctccccaggctccggccacagcctctgaattctcagcatggtgcccagcagccgtcccaggagcagccactggagcaggcggccttcagtcctcacccaggctttccgcagctgttcacgcgaggtcctttcgggcaccttgtgcctgagctagtggagctcctgagaggctgctttcagggacagagaatggccatgtcctctgtttgtgaaatgctctgcagcttacaggatatttttgctattctgtcttatttaatcaccttgaaaccctgtaaaatggtctctcttatgggagaaatgtggaagaataaactaaatggctcagaattg

SEQ ID NO: 381616 - DNA, 397 bp, Homo sapiens
atttgtgactgacaggttctttaagagacacgtagaagcaatgtaacctccagtgggaagaggtgggcctttggatgccatttaaatatgtatgtttaaaagtatgtaatattgagctgggcatggtggctcacacctgtaatcctggcactgtgggaggccgaggcaggcggaccacctgaggtcaggagtttgagactagcctggccaacgtggggaaaccccatctctactaaaaatacagaagttagctgggcatggtggtgggcacctgtaatcccaactgctggggaggctgaggcgggagaatcgcttgaaccgggaggtggaggttgcagtgagctgagatcgcgccattgcactccagcctgggtgacaagagcgaaactccatctca

SEQ ID NO: 381617 - DNA, 621 bp, Homo sapiens
tttgtacattgtgtaaaagtataggtccaacttcattcttttgcttgtggatatctagtttccccaacaccatttgttgaagagattgtccttttccccattgagtgatcctggaacccttgctgaaaattaattacccatagatgtgagtgttagttctggcctctcgattctattccattggtctatattgtctatctctgtgccaagtccatgctatttcaattattatagctatgtagtacattttaatatcagaaaatgtgagtcctacaactttgttcctcttcagattattttggctattttgggttccttgaaattttatatgaattttagaataggtttttccgtttctgccaaaagcgctgttgggatcttattagcgtgattacattgactctacatatcattttgagtagcgttgtcgttttaacaatattaagtcttccaacttatgaacacaggatctctttccatttatttaagtctgctttaatttctttccagaatgctttgtagttttcagtgtacaagtcttctgccttcctggttaaattgatttctaaatattttattcttttgggtactactgtaaataaaaaattcttaatttccttt

SEQ ID NO: 381618 - DNA, 323 bp, Homo sapiens
tcaggcaggcctacgccctgcttgttctgggatgcgtgatctctgcgtggctggctcagttgtgccagggcttgggtgagggttacttcttccctcctgctgcctactgtgttttagcagagtctgatagaaacaaactcgattactcgcttagccaaactgagctagaaggcctgtattgtggaagaatccccagcatcatccttcaaaagtgaagctgggccaggcgtggtggcctgctgcaaatcccagcgctttgggagggtcacttgagtgcaggagttcaagaccagaccgggcagtatagcgagacctcatctcta

SEQ ID NO: 381619 - DNA, 290 bp, Homo sapiens
ggcaccccatgatgtgcaccccgccctggaactctcacaggctctccggaacccactccccaagaccattccctggacaccatactatcaagcaagacttggacatcagtgggtagtgatactcttaagggcttcccagtccactgcagtcatggggcagatgccccaggcaaggagcttcacctggacactggctctctcactcgccccagcacaggcacccagggcccatgtgtcccaggctatgcatccccatctccctccattccattaaaagtccatctctcagc

SEQ ID NO: 381620 - DNA, 524 bp, Homo sapiens
ggttgcagtgagccgagatcgcaccactgcactccagcctgagcgacagagtgactccatctcaaaaaaaaaaaaaaaggagttacccaaacaccaactgtttagttaggccaatgggcatataccagcaccaaggtaaatgtatttttatctggtgcatagtacaggtgggcacctttccaaatgggctacagcccatcagccttctacagtaacctttaattaatggaaatccctctagttcctatggcaacaagaccctcagttatcatttacatttcagactctctcagttcaaatgttattctttaggtgtagttggtatagaagttattattcctaggtaattcaatttagaaacggagaggttttgatgaaatatgtacttgtgccacattattccttcctgttttctcccatctataaaacaatcctatttaaggaatacttttttccagagtaaatgactccccttgaagaatacttaagtaggaattatactaaaaagtacctttgagaaagta

SEQ ID NO: 381621 - DNA, 510 bp, Homo sapiens
ccaggattcagtattattagaattactttttaatggtattgaaggcagagaagcttaatttcaatatatatctctgaatttttactagggaccatcttaggtctcactgaaatgtggattcagagttcagcctcaatagttgctaaatggcctgcttccttacaccagcaaccagccccagtcattctgtatttgccaggccattcatatgtatgcactgatttcatccccacaggacaaggttttgacctgtcacacatgacctcacctctgtggcttgccagggttggtgtgaatagtttaaccaaggctatcgaaggcctaactgtagcgatagcagttaacctatgtaacttttttgagtcatttgaattatgtagagattggacctgtaatcccagcactttgggaggccaaggtgggaggattgcttaagccctggaggtcaaggctgcaatgtgccactgcactctagcctagacaacagagtgagaccctgtctcaaaaaaa

SEQ ID NO: 381622 - DNA, 214 bp, Homo sapiens
tatgacgtcagcctcaatttctcttccggggcgggagcccggccgacctctctgcatcccctgcaatcctctctgctgattaatacctccttgtccttcagctcccagctcacgtgtcagctcctctcactccacagactgggtcagacactctgaaatgtgccctgcatctctccttcagagcccttagaccaatttacaattcaatcattat

SEQ ID NO: 381623 - DNA, 1290 bp, Homo sapiens
acgcgagggggaccggcggtccgggcgaggcctcggccgcgcatcgcaccccggctccccgccgccggagtgagggggaggcgcgctctccgtaagagccggaggcggggcgccatcgccctcccactccccggcgggcgggccgggggagcccggggctgcgaacacccccagacgggcggctgcgggaggggaggctggaccaaggggcctggtccaccggaccagcggtggcggcatcggcatctcgcctccttcaggcctgcacgcgccacaggccgcagcctggaccaaccccgcgtccccgggccgtgagcgctgcggtcccggccccccagagcgggacgccgggcggccgcagccccccggacccggctctccgcccgctccgcccgcagtcccggcgcggagagcggccgcccgagccgctgccgcggcagcgcgggtgtcggcgacggagcccggggcggggaagagcggaggaaggggcggcgagggggcgggccggcggcggccagggaggtcggagtgcgcggggctcggcaccccctcggcccgcgctgcgccagcaccacctgcggagctgcggtgcccacgccgtgccgcgacccgccgcccctgctccctccacacgcgggcaaacaaaacaagttgccggtcgctgccgcggagggggccgggcgggtcactcaccctcatcctgctcagcgggcttgggtcgtccggccgcggggtcaggaagaccagaggaccactagccccaggaagcttcccaccaccagcaaactgcgtggtgaatttgtaaccgaaaggcccgggtgagatgtgcaaatatcactggattggaggagctcacttggaaagccagtattcctcctgagctaatgaaaagaaaggctgtcgtcttatgccaaaagcaataccaaccttgttcacgggctgagatctagagtgtgtaattcacgaagtatgaatctgctgggtaatgtgatatgaaaagcgaatgcaccatttcttggtgatgattcaggtcagcgttgggacccaggaatctcctgttaatcagtaccctggtgattttgatccaggtcatcaagaccatggcttccatcgtaggcagtcacactctttctctcttggatcatttgctgtggggaagcaaactgtcatatgagaggacactcaaacagcctctggagtctcatttgctaaggaactgaggactccagcctgagaactcaggcaagtaactgaggcctgccaacaaccatggagaaagcctggaagtgg

SEQ ID NO: 381624 - DNA, 397 bp, Homo sapiens
atcactgcttgacttagcatttatatcagccccttaggttaaaaccagttgttttaagtagaagatgagagattttgcctaagaccattttttttgtgtgacagagatctagagtgtgtaattcacgaagtatgaatctgctgggtaatgtgatatgaaaagcgaatgcaccatttcttggtgatgattcaggtcagcgttgggacccaggaatctcctgttaatcagtaccctggtgattttgatccaggtaatctgggcaccacctttggagaaacactgaaaggaagcaaggttgcggggggtggttgggaaaagtcttatatggatatctttggaagacagaaataggctcatttatggactcaacttgaactgttcagaagtgaggtggact

SEQ ID NO: 381625 - DNA, 446 bp, Homo sapiens
ctaagtgaaattccaggaatattacaaagattttaccagcaatgggcctcatgagggacctaactgatgaggaattcaatccctccctactacctgtgtcttcaaagattctgaatgtcaaaaaccccaactaataaagagatccttaaatgattcattccctggacaaactccgtgaccacctatatagatctttaataggaatctcccctggacaaattttttttttttttgactgagtcttatactctgcactccagcctggtgacaaagctagactccaactcaaaaaaaataaaataaaataaaataaaataaaataaaataaaatagagtatcttagccaccacacccagcctaagaatggtgtctttcaaagagcaaaagtttttcattctgataaagtcaaaatgaaatcttaacctaaataaacacaatcttaacac

SEQ ID NO: 381626 - DNA, 1169 bp, Homo sapiens
ccctggtaagagtcgcgtagcccgagccgggcggaaccactgttcgcgctgccgtgtttccgggcggggacactcagggcgcgacgcttttctgttacccacagaggcccgccgcggctgcgccatccgcggccatgaagtttcgggccaagatcgtggacggggcctgtctgaaccacttcacacgaatcagtaacatgatagccaagcttgccaaaacctgcaccctccgcatcagccctgataagcttaacttcatcctttgtgacaagctggctaatggaggagtgagcatgtggtgtgagctggaacaggagaacttcttcaacgaatttcaaatggagggtgtctctgcagaaaacaatgagatttatttagagctaacatcggaaaacttatctcgagccttgaagactgcccagaatgccagggctttgaaaatcaaactgactaataaacactttccctgcctcacggtctccgtggagctgttatctatgtcaagcagtagccgcattgtgacccatgacatccccataaaggtgattcctaggaaattgtggaaggacttacaagaaccggtggtcccagatcctgatgttagtatttatttaccagtcttgaagactatgaagagtgttgtggaaaaaatgaaaaacatcagcaatcaccttgttattgaagcaaacctagatggagaattgaatttgaaaatagaaactgaattagtatgtgttacaactcattttaaagatcttggaaatcctccattagcctctgaaagcacccatgaggacagaaacgtggaacacatggctgaagtgcacatagatattaggaagctcctacagtttcttgctggacaacaagtaaatcccacaaaggccttatgcaatattgtgaataacaagatggtgcattttgatctgcttcatgaagacgtgtcccttcagtatttcatccctgcgctgtcctagcaccctgtcgctggagttggcatgcagagactttgtcaggatgggagaggccgcaggtgttgtgttctgatcactggtctgtgccctcacagcaccgcacatcgacacactgtacttatttgtccctctctaacattttaactaaaagttgattcaacaacacacagttggataaacatatcacttcatgtt

SEQ ID NO: 381627 - DNA, 235 bp, Homo sapiens
cggcacgagggagcctgctgaaactggtatagaattggggtggggacacacaggaggagttggcatgcagagactttgtcaggatgggagaggccgcaggtgttgtgttctgatcactggtctgtgccctcacagcaccgcacatcgacacactgtacttatttgtccctctctaacattttaactaaaagttgattcaacaacacacagttggataaacatatcacttcatgtt

SEQ ID NO: 381628 - DNA, 3049 bp, Homo sapiens
ccctggtaagagtcgcgtagcccgagccgggcggaaccactgttcgcgctgccgtgtttccgggcggggacactcagggcgcgacgcttttctgttacccacagaggcccgccgcggctgcgccatccgcggccatgaagtttcgggccaagatcgtggacggggcctgtctgaaccacttcacacgaatcagtaacatgatagccaagcttgccaaaacctgcaccctccgcatcagccctgataagcttaacttcatcctttgtgacaagctggctaatggaggagtgagcatgtggtgtgagctggaacaggagaacttcttcaacgaatttcaaatggagggtgtctctgcagaaaacaatgagatttatttagagctaacatcggaaaacttatctcgagccttgaagactgcccagaatgccagggctttgaaaatcaaactgactaataaacactttccctgcctcacggtctccgtggagctgttatctatgtcaagcagtagccgcattgtgacccatgacatccccataaaggtgattcctaggaaattgtggaaggacttacaagaaccggtggtcccagatcctgatgttagtatttatttaccagtcttgaagactatgaagagtgttgtggaaaaaatgaaaaacatcagcaatcaccttgttattgaagcaaacctagatggagaattgaatttgaaaatagaaactgaattagtatgtgttacaactcattttaaagatcttggaaatcctccattagcctctgaaagcacccatgaggacagaaacgtggaacacatggctgaagtgcacatagatattaggaagctcctacagtttcttgctggacaacaagtaaatcccacaaaggccttatgcaatattgtgaataacaagatggtgcattttgatctgcttcatgaagacgtgtcccttcagtatttcatccctgcgctgtcctagcaccctgtcgctggagttggcatgcagagactttgtcaggatgggagaggccgcaggtgttgtgttctgatcactggtctgtgccctcacagcaccgcacatcgacacactgtacttatttgtccctctctaacattttaactaaaagttgattcaacaacacacagttggataaacatatcacttcatgttgctcatgtctgttttgctttgtttttaagacactgaaaagaaaagctagaatttatttattcagactttaaagaacaatttctcattgatgttgtgaaaatcgtcatgtatttagacttggtgtagtagccagaattcgtaaagctgttgcctgggagcttggtactttccctccaggcagaggctctagctcagcacggcctgtagcgcacagtcagtcttgcatttcagtgtgttcaccccgctgctcctgccccttggagcccagtgacagaaagaacagcctctgtcaccccgccgccactgccttggttactcagagcactgtggggtgtcacagctgcagcatttggagtctctctcttgctgaggactcaagcccacctgagtccactcccctcttgatgcctagagagctggcccagccaacacagctcttagctgggagctccttctgccattccaactagtttcttcctggggccagttttgggtttaggttgtaattccttatatttctttcttccacagtgtatcggatctgtcgttctggaaagaagacccttctatttagagtagaaacaaacgaaacttctaaggtatcatctgtgttaagtgatgagaccatatttctttgatgtttctgaacatcaaagctgattcagtactggtagatgtgctcattctccctgaaacatacccatcatatttcctattataattacatctcattgtcctgtggaggtggacatgataaacattatcttttgttttcttgttttgttttgtttgagacggtctcattctgtcacccagactggagtgcagtgccacaatcatggctcaccgcattgacctccttggctcaaggcatcctcccacctcagcttcctgactagctgggactactggtgtgcaccaccacacccagctaattttcaatttttcatagagacagggtctcactgtgttgtccaggctggtcttgaactcctgggctcaagccacccgcccacctgggcctcccaaagtgctgggattacaggcatcagccatcacacccatccataaacattatattaatgtcacattacaaaactgagacctaagttgcttaggataaaatgaaattggaagactagctaacatgaaaatttatattttggctttttcatgttttttgataaaaccagtgtatttgaatgattcttttgatgtttagtaatggttttttgtttgttttttggtttttttttttgagacggagtctcactctgtcgccagtctggagtgctagtggcgcgatcttggcttactgcagcctccacttcccaagttcaagcgattctcctgcctcagcctcccgagtagctgggactacaggcgcatgccaccacgcccggctaatttttgtatttttagtagagacggagtttcactgtgttggccaggatggtctcgatctcgacctcgtgatcacccaccttggcctctcaaagtgctgggattacaggcgtgagccaccacgcctggcctatgtttaataatgttgaaataggatggaatattttgttaaattaacattttaaaattagaagacaccgttttaatttttaaacccttcctcctctcattgtaacgaaattaattccagctgcagtgagaaaacttaaaaatcatgatacaaaatgaaacaatatctgaaagtagttttataaaactgaaattgctgttaaagagaatgtgttagtgacttaaccatttgctctatgtgatgtttattatcaaatacatataattttgaagattttaatgaatggcttaagattttatctttgtgtagaatgtggctaaagaaaccttagttgagattcaagaag

SEQ ID NO: 381629 - DNA, 3107 bp, Homo sapiens
ccctggtaagagtcgcgtagcccgagccgggcggaaccactgttcgcgctgccgtgtttccgggcggggacactcagggcgcgacgcttttctgttacccacagaggcccgccgcggctgcgccatccgcggccatgaagtttcgggccaagatcgtggacggggcctgtctgaaccacttcacacgtgagcagggaggccggagaggagcgagggaggaacggaaggaagcagtgagcgcgcggaatcagtaacatgatagccaagcttgccaaaacctgcaccctccgcatcagccctgataagcttaacttcatcctttgtgacaagctggctaatggaggagtgagcatgtggtgtgagctggaacaggagaacttcttcaacgaatttcaaatggagggtgtctctgcagaaaacaatgagatttatttagagctaacatcggaaaacttatctcgagccttgaagactgcccagaatgccagggctttgaaaatcaaactgactaataaacactttccctgcctcacggtctccgtggagctgttatctatgtcaagcagtagccgcattgtgacccatgacatccccataaaggtgattcctaggaaattgtggaaggacttacaagaaccggtggtcccagatcctgatgttagtatttatttaccagtcttgaagactatgaagagtgttgtggaaaaaatgaaaaacatcagcaatcaccttgttattgaagcaaacctagatggagaattgaatttgaaaatagaaactgaattagtatgtgttacaactcattttaaagatcttggaaatcctccattagcctctgaaagcacccatgaggacagaaacgtggaacacatggctgaagtgcacatagatattaggaagctcctacagtttcttgctggacaacaagtaaatcccacaaaggccttatgcaatattgtgaataacaagatggtgcattttgatctgcttcatgaagacgtgtcccttcagtatttcatccctgcgctgtcctagcaccctgtcgctggagttggcatgcagagactttgtcaggatgggagaggccgcaggtgttgtgttctgatcactggtctgtgccctcacagcaccgcacatcgacacactgtacttatttgtccctctctaacattttaactaaaagttgattcaacaacacacagttggataaacatatcacttcatgttgctcatgtctgttttgctttgtttttaagacactgaaaagaaaagctagaatttatttattcagactttaaagaacaatttctcattgatgttgtgaaaatcgtcatgtatttagacttggtgtagtagccagaattcgtaaagctgttgcctgggagcttggtactttccctccaggcagaggctctagctcagcacggcctgtagcgcacagtcagtcttgcatttcagtgtgttcaccccgctgctcctgccccttggagcccagtgacagaaagaacagcctctgtcaccccgccgccactgccttggttactcagagcactgtggggtgtcacagctgcagcatttggagtctctctcttgctgaggactcaagcccacctgagtccactcccctcttgatgcctagagagctggcccagccaacacagctcttagctgggagctccttctgccattccaactagtttcttcctggggccagttttgggtttaggttgtaattccttatatttctttcttccacagtgtatcggatctgtcgttctggaaagaagacccttctatttagagtagaaacaaacgaaacttctaaggtatcatctgtgttaagtgatgagaccatatttctttgatgtttctgaacatcaaagctgattcagtactggtagatgtgctcattctccctgaaacatacccatcatatttcctattataattacatctcattgtcctgtggaggtggacatgataaacattatcttttgttttcttgttttgttttgtttgagacggtctcattctgtcacccagactggagtgcagtgccacaatcatggctcaccgcattgacctccttggctcaaggcatcctcccacctcagcttcctgactagctgggactactggtgtgcaccaccacacccagctaattttcaatttttcatagagacagggtctcactgtgttgtccaggctggtcttgaactcctgggctcaagccacccgcccacctgggcctcccaaagtgctgggattacaggcatcagccatcacacccatccataaacattatattaatgtcacattacaaaactgagacctaagttgcttaggataaaatgaaattggaagactagctaacatgaaaatttatattttggctttttcatgttttttgataaaaccagtgtatttgaatgattcttttgatgtttagtaatggttttttgtttgttttttggtttttttttttgagacggagtctcactctgtcgccagtctggagtgctagtggcgcgatcttggcttactgcagcctccacttcccaagttcaagcgattctcctgcctcagcctcccgagtagctgggactacaggcgcatgccaccacgcccggctaatttttgtatttttagtagagacggagtttcactgtgttggccaggatggtctcgatctcgacctcgtgatcacccaccttggcctctcaaagtgctgggattacaggcgtgagccaccacgcctggcctatgtttaataatgttgaaataggatggaatattttgttaaattaacattttaaaattagaagacaccgttttaatttttaaacccttcctcctctcattgtaacgaaattaattccagctgcagtgagaaaacttaaaaatcatgatacaaaatgaaacaatatctgaaagtagttttataaaactgaaattgctgttaaagagaatgtgttagtgacttaaccatttgctctatgtgatgtttattatcaaatacatataattttgaagattttaatgaatggcttaagattttatctttgtgtagaatgtggctaaagaaaccttagttgagattcaagaag

SEQ ID NO: 381630 - DNA, 344 bp, Homo sapiens
agagccctgcccttgtgctgctgtagtctcctggcaagtcctctcggagttccacctgttttcacatcttcactgagttcttcattccgggaggcaggcagggggacttcccctttgagatttttgggagatttctgagttcttggctcttgggccttatcttctcactttccctgatagcacgggggtctcagtgtgctctgaggtgttttgaggttttgtagggtactttgtcatctggttgtgtgaaagctgttgcccatggagtttttttccttttggcttccttttctaagactatgtaaaatactcaatttgcaggttattgaagcaaacctagatgg

SEQ ID NO: 381631 - DNA, 97 bp, Homo sapiens
gtgagtgtgcttctctgttttgtttttcatattctttcatattctaaatactgcagtcaactctagtctaacagattgcatatagtctcataaatcc

SEQ ID NO: 381632 - DNA, 2195 bp, Homo sapiens
ccctggtaagagtcgcgtagcccgagccgggcggaaccactgttcgcgctgccgtgtttccgggcggggacactcagggcgcgacgcttttctgttacccacagaggcccgccgcggctgcgccatccgcggccatgaagtttcgggccaagatcgtggacggggcctgtctgaaccacttcacacgaatcagtaacatgatagccaagcttgccaaaacctgcaccctccgcatcagccctgataagcttaacttcatcctttgtgacaagctggctaatggaggagtgagcatgtggtgtgagctggaacaggagaacttcttcaacgaatttcaaatggagggtgtctctgcagaaaacaatgagatttatttagagctaacatcggaaaacttatctcgagccttgaagactgcccagaatgccagggctttgaaaatcaaactgactaataaacactttccctgcctcacggtctccgtggagctgttatctatgtcaagcagtagccgcattgtgacccatgacatccccataaaggtgattcctaggaaattgtggaaggacttacaagaaccggtggtcccagatcctgatgttagtatttatttaccagtcttgaagactatgaagagtgttgtggaaaaaatgaaaaacatcagcaatcaccttgttattgaagcaaacctagatggagaattgaatttgaaaatagaaactgaattagtatgtgttacaactcattttaaagatcttggaaatcctccattagcctctgaaagcacccatgaggacagaaacgtggaacacatggctgaagtgcacatagatattaggaagctcctacagtttcttgctggacaacaagtaaatcccacaaaggccttatgcaatattgtgaataacaagatggtgcattttgatctgcttcatgaagacgtgtcccttcagtatttcatccctgcgctgtcctagcaccctgtcgctggagttggcatgcagagactttgtcaggatgggagaggccgcaggtgttgtgttctgatcactggtctgtgccctcacagcaccgcacatcgacacactgtacttatttgtccctctctaacattttaactaaaagttgattcaacaacacacagttggataaacatatcacttcatgttgctcatgtctgttttgctttgtttttaagacactgaaaagaaaagctagaatttatttattcagactttaaagaacaatttctcattgatgttgtgaaaatcgtcatgtatttagacttggtgtagtagccagaattcgtaaagctgttgcctgggagcttggtactttccctccaggcagaggctctagctcagcacggcctgtagcgcacagtcagtcttgcatttcagtgtgttcaccccgctgctcctgccccttggagcccagtgacagaaagaacagcctctgtcaccccgccgccactgccttggttactcagagcactgtggggtgtcacagctgcagcatttggagtctctctcttgctgaggactcaagcccacctgagtccactcccctcttgatgcctagagagctggcccagccaacacagctcttagctgggagctccttctgccattccaactagtttcttcctggggccagttttgggtttaggttgtaattccttatatttctttcttccacagtgtatcggatctgtcgttctggaaagaagacccttctatttagagtagaaacaaacgaaacttctaaggtatcatctgtgttaagtgatgagaccatatttctttgatgtttctgaacatcaaagctgattcagtactggtagatgtgctcattctccctgaaacatacccatcatatttcctattataattacatctcattgtcctgtggaggtggacatgataaacattatcttttgttttcttgttttgttttgtttgagacggtctcattctgtcacccagactggagtgcagtgccacaatcatggctcaccgcattgacctccttggctcaaggcatcctcccacctcagcttcctgactagctgggactactggtgtgcaccaccacacccagctaattttcaatttttcatagagacagggtctcactgtgttgtccaggagttggagaccagcccgggcaacaaagtgagaccccgtctctacttt

SEQ ID NO: 381633 - DNA, 2382 bp, Homo sapiens
ccctggtaagagtcgcgtagcccgagccgggcggaaccactgttcgcgctgccgtgtttccgggcggggacactcagggcgcgacgcttttctgttacccacagaggcccgccgcggctgcgccatccgcggccatgaagtttcgggccaagatcgtggacggggcctgtctgaaccacttcacacgaatcagtaacatgatagccaagcttgccaaaacctgcaccctccgcatcagccctgataagcttaacttcatcctttgtgacaagctggctaatggaggagtgagcatgtggtgtgagctggaacaggagaacttcttcaacgaatttcaaatggagggtgtctctgcagaaaacaatgagatttatttagagctaacatcggaaaacttatctcgagccttgaagactgcccagaatgccagggctttgaaaatcaaactgactaataaacactttccctgcctcacggtctccgtggagctgttatctatgtcaagcagtagccgcattgtgacccatgacatccccataaaggtgattcctaggaaattgtggaaggacttacaagaaccggtggtcccagatcctgatgttagtatttatttaccagtcttgaagactatgaagagtgttgtggaaaaaatgaaaaacatcagcaatcaccttgttattgaagcaaacctagatggagaattgaatttgaaaatagaaactgaattagtatgtgttacaactcattttaaagatcttggaaatcctccattagcctctgaaagcacccatgaggacagaaacgtggaacacatggctgaagtgcacatagatattaggaagctcctacagtttcttgctggacaacaagtaaatcccacaaaggccttatgcaatattgtgaataacaagatggtgcattttgatctgcttcatgaagacgtgtcccttcagtatttcatccctgcgctgtcctagcaccctgtcgctggagttggcatgcagagactttgtcaggatgggagaggccgcagtgtatcggatctgtcgttctggaaagaagacccttctatttagagtagaaacaaacgaaacttctaaggtatcatctgtgttaagtgatgagaccatatttctttgatgtttctgaacatcaaagctgattcagtactggtagatgtgctcattctccctgaaacatacccatcatatttcctattataattacatctcattgtcctgtggaggtggacatgataaacattatcttttgttttcttgttttgttttgtttgagacggtctcattctgtcacccagactggagtgcagtgccacaatcatggctcaccgcattgacctccttggctcaaggcatcctcccacctcagcttcctgactagctgggactactggtgtgcaccaccacacccagctaattttcaatttttcatagagacagggtctcactgtgttgtccaggctggtcttgaactcctgggctcaagccacccgcccacctgggcctcccaaagtgctgggattacaggcatcagccatcacacccatccataaacattatattaatgtcacattacaaaactgagacctaagttgcttaggataaaatgaaattggaagactagctaacatgaaaatttatattttggctttttcatgttttttgataaaaccagtgtatttgaatgattcttttgatgtttagtaatggttttttgtttgttttttggtttttttttttgagacggagtctcactctgtcgccagtctggagtgctagtggcgcgatcttggcttactgcagcctccacttcccaagttcaagcgattctcctgcctcagcctcccgagtagctgggactacaggcgcatgccaccacgcccggctaatttttgtatttttagtagagacggagtttcactgtgttggccaggatggtctcgatctcgacctcgtgatcacccaccttggcctctcaaagtgctgggattacaggcgtgagccaccacgcctggcctatgtttaataatgttgaaataggatggaatattttgttaaattaacattttaaaattagaagacaccgttttaatttttaaacccttcctcctctcattgtaacgaaattaattccagctgcagtgagaaaacttaaaaatcatgatacaaaatgaaacaatatctgaaagtagttttataaaactgaaattgctgttaaagagaatgtgttagtgacttaaccatttgctctatgtgatgtttattatcaaatacatataattttgaagattttaatgaatggcttaagattttatctttgtgtagaatgtggctaaagaaaccttagttgagattcaagaag

SEQ ID NO: 381634 - DNA, 2334 bp, Homo sapiens
tgatgtgtgcctgtattactccgttttcacgctgctaaaaagatattacctgagaccagcctctgaaagcacccatgaggacagaaacgtggaacacatggctgaagtgcacatagatattaggaagctcctacagtttcttgctggacaacaagtaaatcccacaaaggccttatgcaatattgtgaataacaagatggtgcattttgatctgcttcatgaagacgtgtcccttcagtatttcatccctgcgctgtcctagcaccctgtcgctggagttggcatgcagagactttgtcaggatgggagaggccgcaggtgttgtgttctgatcactggtctgtgccctcacagcaccgcacatcgacacactgtacttatttgtccctctctaacattttaactaaaagttgattcaacaacacacagttggataaacatatcacttcatgttgctcatgtctgttttgctttgtttttaagacactgaaaagaaaagctagaatttatttattcagactttaaagaacaatttctcattgatgttgtgaaaatcgtcatgtatttagacttggtgtagtagccagaattcgtaaagctgttgcctgggagcttggtactttccctccaggcagaggctctagctcagcacggcctgtagcgcacagtcagtcttgcatttcagtgtgttcaccccgctgctcctgccccttggagcccagtgacagaaagaacagcctctgtcaccccgccgccactgccttggttactcagagcactgtggggtgtcacagctgcagcatttggagtctctctcttgctgaggactcaagcccacctgagtccactcccctcttgatgcctagagagctggcccagccaacacagctcttagctgggagctccttctgccattccaactagtttcttcctggggccagttttgggtttaggttgtaattccttatatttctttcttccacagtgtatcggatctgtcgttctggaaagaagacccttctatttagagtagaaacaaacgaaacttctaaggtatcatctgtgttaagtgatgagaccatatttctttgatgtttctgaacatcaaagctgattcagtactggtagatgtgctcattctccctgaaacatacccatcatatttcctattataattacatctcattgtcctgtggaggtggacatgataaacattatcttttgttttcttgttttgttttgtttgagacggtctcattctgtcacccagactggagtgcagtgccacaatcatggctcaccgcattgacctccttggctcaaggcatcctcccacctcagcttcctgactagctgggactactggtgtgcaccaccacacccagctaattttcaatttttcatagagacagggtctcactgtgttgtccaggctggtcttgaactcctgggctcaagccacccgcccacctgggcctcccaaagtgctgggattacaggcatcagccatcacacccatccataaacattatattaatgtcacattacaaaactgagacctaagttgcttaggataaaatgaaattggaagactagctaacatgaaaatttatattttggctttttcatgttttttgataaaaccagtgtatttgaatgattcttttgatgtttagtaatggttttttgtttgttttttggtttttttttttgagacggagtctcactctgtcgccagtctggagtgctagtggcgcgatcttggcttactgcagcctccacttcccaagttcaagcgattctcctgcctcagcctcccgagtagctgggactacaggcgcatgccaccacgcccggctaatttttgtatttttagtagagacggagtttcactgtgttggccaggatggtctcgatctcgacctcgtgatcacccaccttggcctctcaaagtgctgggattacaggcgtgagccaccacgcctggcctatgtttaataatgttgaaataggatggaatattttgttaaattaacattttaaaattagaagacaccgttttaatttttaaacccttcctcctctcattgtaacgaaattaattccagctgcagtgagaaaacttaaaaatcatgatacaaaatgaaacaatatctgaaagtagttttataaaactgaaattgctgttaaagagaatgtgttagtgacttaaccatttgctctatgtgatgtttattatcaaatacatataattttgaagattttaatgaatggcttaagattttatctttgtgtagaatgtggctaaagaaaccttagttgagattcaagaag

SEQ ID NO: 381635 - DNA, 1173 bp, Homo sapiens
gttaagaaccgaactccagcaaaactgaatcaaacacgctgacactgccattccgctggccccaggcctcacgctcccgagaggaagaagagaataaacgtaattcccttgccctctttcgaggaatggtgacgtcccttggcccaccgcaggccccgggatcccccctcccacgttcaacgcccccaggaccttcgagaagcggccgcgtgtgtggaggggggacgtctgctcctccagaatcactcaccgaaggtcagcaggacgcagcagaggcccagcacccacagggccctcatggcgtgcggccgtatctgtaggtcaggaatccagaagcacctaactgggtagtcaagatgttggctgaggctgaaatcatctggaggctcaagaggagctggaggatctgcttccacgatggctccttcacatggctgttggctggggcctcagttcatcatcacatggacctctccatagggctgcttaagtgtgctcacagcatggcagctggcctcccctggagtgagtgatccaagacagagaacaaagcaggaggcacaatgactcataaccaacctcagaaatcacacaccatcatttcggaaacaaccctactcaatgagattatatgaggctgtaaataccagcagccagagagcactggggcctgtttggaggctacttattataccttagttgcaaggcaagctgggaaaggatttacatggcattttcagcttctctcatgggaggctcagaatcataaggtgggggttttcctcatgtaacaatgagattcagatgctgcaaagtgaaaaagaatgatgtgtcctctacatatttgaatatacaaacagatcagtgcaaccagtcgggcatggtggctcaacacctgtaatcccagcattttgggaggctgaggtgggtggatcacttgaggttgggagttcaagaccagtctggtcagcgtggtgaaaccccatctctactaaaaatacaagaattagccaggcgtggtggtgtgcacctgtaattccagctactggggaggctgaggcgggagaatctcttgaatctgggaggtggaggttgcggtgagtggagattgtgccactgcactccagcctgggcaacagagcaagactccacttcaaaaaaacgacaaaagaa

SEQ ID NO: 381636 - DNA, 889 bp, Homo sapiens
ggtttgcagcttttctccaatcaaatggctccgcgggcccctcacacgtgggaccgcccctttgcctgggcggccttggcctctaagggaaaacgtccaatgaatgtaagcagagaacacatccatccttttagagaggtcgcggcggaactacttccggatcctagagagcgtttattccgtgaccggggaaacggtagccatggcaacgtgttcttcaccctttcccatctatgcctggggtttcgttggaagtgattccagcacgactttcgcggccagctttctcgtgtggcggcgcttctcggaaagaagaaacacacgagagagtcctaacttaaactggattgtttttcaactctgatctgtcccctggttggcatctctcaccttccaataccaataagaaacaattttcaagaaagatttccacctgttcatagcaaacataattgggaggaagattagaagcagtgggggtcggtggctgtgctaggatgaaaattgtgatattttatgcatagtgttgtccccaagcaaagagaaatgagccagaagacaaatgagaatgtagaaaggtatacccaattccttcaaaagccccagaaacccattcagccttacatctgctcgactctgaatgattttcaagaagagagagactttttggcaaacaacatcttccctcagcttaatgaactctgcaattcctggggcacatatttcaaagccgtggacctgagttggtcagcattaaaggccccgaaatccttacccacccacctgtttagacagtattcttgtcttcgctcccaacgtctgaagctctgccttgactatgtgaacagctgctttccctttttcatctgcatgctgggtcagacgtatg

SEQ ID NO: 381637 - DNA, 795 bp, Homo sapiens
tgcggatcttggctctgtggttggcgctcacgtgttgtggtggtgccttatttacatctgcccaatttacctacatttgttattagtaagcaaagagtagcttacaaagaatgctttatgtatgcttctgtgctttcatctttttttaaaagagcatactagagtgtgaattacattcagagatttcagttgcatttttgtatattttaactcctttattttttgttttgagagaaaactgagtttcttcacttttttttctgcatttcacagctcaacttcttgaccttttcctccaattctgaataagtaagcaaccagttctgaaactgcaaatgccaccttaactagtgagtggtggggagttggtgctgcacctggagagaactgagacagagacatatccttcaaaatagagccactgcttgtgggtagacgtttctgcagatgatggtgggaattcatgaggcagacagagcacaagatggtaggctggcataagatggcgggccgttgtctgatcaactctgtcccttgaagattggctctctgggctgggagcggtggctcatgcctgtaatcccagcactttgggaggctgaggtgggcggatcacctgaggtcaggggttcaataccagcctggccaacatggcgaaaccccgtctctactaaaaacacaaaaattagctgggcgtggtgccgcatgccggtaatcccagctactctggaggctgaggctggagaatcgcttgaacccaggaggcggcggttgcagtgagcccagatcacgcca

SEQ ID NO: 381638 - DNA, 1406 bp, Homo sapiens
ggtttgcagcttttctccaatcaaatggctccgcgggcccctcacacgtgggaccgcccctttgcctgggcggccttggcctctaagggaaaacgtccaatgaatgtaagcagagaacacatccatccttttagagaggtcgcggcggaactacttccggatcctagagagcgtttattccgtgaccggggaaacggtagccatggcaacgtgttcttcaccctttcccatctatgcctggggtttcgttggaagtgattccagcacgactttcgcggccagctttctcgtgtggcggcgcttctcggaaagaagaaacacacgagagagctcaacttcttgaccttttcctccaattctgaataagtaagcaaccagttctgaaactgcaaatgccaccttaactagtgagtggtggggagttggtgctgcacctggagagaactgagacagagacatatccttcaaaatagagccactgcttgtgggtagacgtttctgcagatgatggtgggaattcatgaggcagacagagcacaagatgtatctgtaggtcaggaatccagaagcacctaactgggtagtcaagatgttggctgaggctgaaatcatctggaggctcaagaggagctggaggatctgcttccacgatggctccttcacatggctgttggctggggcctcagttcatcatcacatggacctctccatagggctgcttaagtgtgctcacagcatggcagctggcctcccctggagtgagtgatccaagacagagaacaaagcaggaggcacaatgactcataaccaacctcagaaatcacacaccatcatttcggaaacaaccctactcaatgagattatatgaggctgtaaataccagcagccagagagcactggggcctgtttggaggctacttattataccttagttgcaaggcaagctgggaaaggatttacatggcattttcagcttctctcatgggaggctcagaatcataaggtgggggttttcctcatgtaacaatgagattcagatgctgcaaagtgaaaaagaatgatgtgtcctctacatatttgaatatacaaacagatcagtgcaaccagtcgggcatggtggctcaacacctgtaatcccagcattttgggaggctgaggtgggtggatcacttgaggttgggagttcaagaccagtctggtcagcgtggtgaaaccccatctctactaaaaatacaagaattagccaggcgtggtggtgtgcacctgtaattccagctactggggaggctgaggcgggagaatctcttgaatctgggaggtggaggttgcggtgagtggagattgtgccactgcactccagcctgggcaacagagcaagactccacttcaaaaaaacgacaaaagaa

SEQ ID NO: 381639 - DNA, 428 bp, Homo sapiens
acttctttccctttcttagaagaaaggggaagatgacacagtgtcttccacctaaagactttctcctccccacagccatggttctgcgatttacattaagggctgtagcaggttggagtaaatggagcaggtttgcaattagttttcaaagtacttatctcattaaagtaaatgaattattgatttagggacactcatgcttttagtgagtggcgtggtgccatcctcactctgggcttcagctcccggagccggtggccggcacaagcaaacttgctatgtgtagggaatttttttttaattttaatatttccttctcgttatttagctttgtaattaaagtggattcacatgagaaaggaagggtcggtttatgggaatagaagccccagagacaagcgtgcctccctgcaggaaggagcagagct

SEQ ID NO: 381640 - DNA, 300 bp, Homo sapiens
aaaactttgtacttttccaagaggcttcacattcattgtagtgtttaagcttctgtgaaaaccctgtgaggcaggtaaggtgagtcccaggaggttttcccagatggcgcagctaattagtgttgctggtagcattaggagtagactgcagactcctggggccccagccctttatcagggaatcatgcctttatgaattgcggaaaggcttagtgtaagccccaaggagaacctttcttccctctgggtgggtctcaggccctggggtaatgaagacttgtttgtcattgcatgtttcca

SEQ ID NO: 381641 - DNA, 365 bp, Homo sapiens
caccaggaatgcctgctgctgggaggccacttttttggaacctctggaatagacggctggaaatgagccggggggctgtggtctcagggatttccacttccctgcacctctgggaccaccctgacacccactccccaacaaaagcccaggataaaggggaaccttccaggactgtcccggaaagagctgtccgtctcacttctgggaaaccatctgaaagacagcggacggagggatgggcacgagcgctccaagggccatctggggacagttaggcttgggcagagggcctcagctgggacactgccctctctccaggccagctggcagagggcacttggaaccaaagggccaaaatcccaaat

SEQ ID NO: 381642 - DNA, 379 bp, Homo sapiens
ttttttgagacagagtcttgctctgttgcccaggctggagtgcaatggcatgatcctggctcactgcaccctccccctcctgggtccaagtgattctcctgcctcagcctcccaagtacctgggattacaggcacacaccaccacacccagggaatttttttgtaattttagtagagacggggttttgccatgttgcctaggctggtctcgaactcctgagctcaggcaatccacccgccttggcctcccaaagtgctaggattacaggcatgagccaccgcgcccggcctaggcatatattttgaactgttttagtagtggtggtgatagatttgctctaatatatcaaaattttctaattctgtctagttaatatct

SEQ ID NO: 381643 - DNA, 448 bp, Homo sapiens
ggtcttatctttataatcactttatgttcaactttgtagactgacataaatgtgagaatccttcatcagaacagaatatagatttagtgaggagataaattaggtaaaaataggcagtttaatgccagccagttacattttcctgacttctgcttattaaaggacaaacacattaatttcattttacatttttaaaaagggttataataaactaacaattctgaggctgctcctataagtattctatggtacagagtaggtatccttaaaatatttttcttgggacatcatgtagtggataaaagttacatccacgacaaactcccaaggatgttcaaggagtacttgttataaatctatttttttctcattcaagaaacagagcagaacggaagtaagagtcacattattgtaaaagcagtctcgaatttagtctaattaattaaaa

SEQ ID NO: 381644 - DNA, 398 bp, Homo sapiens
gcctgattcacaaaagcaggaaagaaaagttgcaatctgtgccttttcccctcaaaggtcatggcctagattaaccaaatatggcaaggagaatggagggcaactcatccctgtaaggaggtttgccactaaagcaaaaccacaaatgaattcaaactcttctctccagtgatgactaagggtgatcaaaacacaaaaagtgactaaggtaaagcactgatatgctattgaatttcacttacctaaactagtacttcttagagaaaaaaaaaaaaagaatattggcactttttttttcctgagcaccatgtgacaagggtctttgaattcatgaaggcactattataagtgaaggatatacacattacttatacatacatatgcacttagcctaaata

SEQ ID NO: 381645 - DNA, 468 bp, Homo sapiens
ccccaactaaatccttaaaggaccctaggttgttagggccagacgggactccggagatgactcagccttacccctcattccataagtgagaacattgaggcccacagaaaggattcaactcattcaaggtcgtgctgttagtgagagtctgagttgagaccagaacccagttcctatcccttcaggctttccatgcccgaaacaagggctcctcccaccgttgagcctcagtttatatgaagtgaggataataacagtagtttttccattagattgtgaaggtccagtggtgtaattaatgtgaaaactttgtaaactctgcagagacgtggtggtggtagttatccaactcttccaaaactgagtgatgttcagcactcagttttacttactttgcatctgtcccggagtagaatctcagtgcttgacaaatagcaggcccttggtaaatgtttgttgaataaacga

SEQ ID NO: 381646 - DNA, 462 bp, Homo sapiens
atgacccatcctcactttaagttttagcatatggtgtgaggaagggattcattttcattcttttgcatgtagatgtctggtagttccagtaccatttgttgaaaagacagttctttgtacattgaattgtcttggtatccttgttgacctctcatctgtggccccattcctggctctagattctctccttcatttttcatttatccaaggatctgtgagtttagttaagtcactttctaaggctgctccttttgcccatagttctctcccattagtcaaaaatagttattgaacattatttattgagtgttccagtaaatgatagggcaatgaacacacacagtgtccctactcttgtggtgttacggtataaaatacttcagagtttgtagatgaaacttaatttttttggctggtcttttcttagaaaccagtatttaaaaatctgaatatcaaaaaaaa

SEQ ID NO: 381647 - DNA, 400 bp, Homo sapiens
gacacaggtttaagatttttagttgttgttaagacaaagttaaactaattcgttctagatgctttgagaagcctttgtgtattaaactaagcactattttaaaaactaaattgcatgtaatttttactatgcagatttttgtacatggttttatatgtacaagacataatatatatttctaatttcccctatacattacatatatttttatatatatatttacagacagagaaatatatatctatttctaacttcccctaatgattggattttaaaatgtaaaattcactttgctctgaaaaaatcctttggttatggctgtgtgtgtaattatttaaaataaagccaaaatcatgtttgagaaaagaatggaattttattagtttaaaattaaaaaatt

SEQ ID NO: 381648 - DNA, 247 bp, Homo sapiens
tgggacccttggggttaatacctggaaccctagcctgttccagctggcccctgggtgccccagttagtcctgtgttctgtgtatacacagccccctacttattggaagaaagctgcaaggcacggagggaaccaaccagtctttaaaatgcaggtatactgtaacagtttgttttcatcagatttccccgagagactagggtgaggaagtggtaaggcctggtgtctcctggagtttctttacacca

SEQ ID NO: 381649 - DNA, 1924 bp, Homo sapiens
ttttgacttataaacaatgctgcaatgaaataattgacatatttccttgtgtacatgtgagcatttcttgagatatgtatctagaacttgaatcactggccaacaggatattcttaatcttcagtttcaccagatacttccaaattgatctccataacatgcataccaaattatattcctaccagccatttataggagttcacattttttccataccctcccaatcctgccttggcagatatgttttttccaatgaataacaatgaaattttgttttgggatttgacaaaatgattctagattcatctggaagaaaagcaagtataagtaagaaatttaaaagggacctgaaaaactaagcaatggatatatttaaaaattggtaccagtagggataaccaaatatttgttaactgtagcagaaacaatgcatgtttttctcactggttccaccttctatctctcagtcaagccctgcccaggtgtggtagtcctcatagtctctcactgtaggggtcttctcacatagtagaccactctcttgagttgaatattgaaaagaaggcttggccgggggcagtggctcatgcctgtggtcccagcactttgggaagctgagtcgagcggattgcttgaggtcagcagttcgagagcagcctgactaacatggtgatgaaaagtacaaaattagctgggggtggtggcgcatgcctgcaatcccagctactcgggaggctgaggcacgagaatcgcttgaacgcaggaggcataggttgcagtgagccgagattgcaccactgcactccagcctgggcgacagagcaagatttcgtctcaaaaaaaaaaaaaaaaaaaaaaaggcttaagtccaactaactgtttccctgctgttcattttatccaacggctggggatataggctactgcacatgatgggttgatggatgtgaaatgataactcatgactttaattctaatttttctatattctggtgaggttgagcatatttttacaagttcataatccattttcctctgatgggagttgcctgtttgaatcctttgcccacttgctttttggggttatttgcaattttttgcattgatcttcaaacattcttaattaatcccaggtacatattattttatatataagatatattttagagatatataggctgatagtatcttttctcagtctaaggcttatcttttaattttgtttatggtgttttgtgtgtgttgttttgcagaagttttattgtatctgaattgtggcttttgtgtcttaagaaattctttacctactgtcataaaaatttttgtctaaaaattttatgattttgcctttctatttatcttgttaattcactttgaaattacttttgtttatggcataaagtccattattttccatatggataatcagttgtcttagcagtttattgaatggtccaacgtttccctgctgattataatgccctctctgttatttatcctaaattcttgacatccggtaaggaagtctcctctgcccacccttctctgtatttcaaaatggttttgactgttcttgaccccttgctctttctgtgaactttaggattaaatgattatgtagaattaaacaatcgggttaaggttttttattagaattacattgaatctatagattaatttggggaaagaatgttatctttctatccatgataattctgtatctctccattaattcaagtctttaatggtttttaaaaataaattattgtctctttgaaaatccttacacatcctttattgcactgattcgtatgtagtttatgtttttgttgttgctttggagaataggcttcttaaaattaaatgtttaaattgatcaatgctggagtatataaatgctattgatatttgtaaaatgattttg

SEQ ID NO: 381650 - DNA, 676 bp, Homo sapiens
tgccgtctgcacagcctcctccaggcctccccttcccagtgaaaagcaccaccatccagacctcaggaagcaatcattttagcctcttctccttctccctcaccatccaggacatcactgagccctgtcagttctgcccccagaatatctaagttcatccaatgccccatttccactgctgcttcctcacccaaatcaggatgtttctggccccgtctccctcctacctggtctccctgcctgtaccctcctctccactgggcccattctccaccggcagccagcatgatctctaagaaatgtacatctgtcatctgtcatatctgctgaaaattgttcagggcttcctgctgccttgagaatgagggtctgaatcccaaacaagggttcaaatctcaacctctcaggcctaccctgaccttacgtatctttcctcagggcctgtgcacatgctgttccttcttcctggaatgcttgtccccatagttttcagctggcgaatgtgagtcaggtctccccttaaatgtcatctaagagagccctttctaattcctccccttcatcttaactctatccccaatacactctctcacagagactgttcttttccttctgagaccctactccagcttgtagttctaaatctgtgattatgcactgtctgtcttcctcttga

SEQ ID NO: 381651 - DNA, 2743 bp, Homo sapiens
caggtacctcctgagccacggggccaacatcgccgccgtcaacagtgacggggacctgcccctggccccggcgccgagctcgaccccgccgcgccgccgcccgcccgcgccgtgctggactccaccaacgccgacggtatcagcgccctgcaccaggcctgcattgatgagaacctggaggtggtgcgcttcttggtggagcagggcgccactgtgaaccaggcagacaacgagggctggacgccactgcacgtggccgcctcctgtggctacctagatatcgccaggtacctcctgagccacggggccaacatcgccgccgtcaacagtgacggggacctgcccctggacctggccgagtcggacgccatggaggggctgctgaaggcggagatcgcccgccgaggtgtggatgtggaagcagccaagcgggcagaagaggaattgctccttcatgacacgaggtgctggctgaatgggggcgccatgccagaggcccggcacccccgcacaggcgcctctgccctgcacgtggctgctgccaagggctacattgaggtgatgaggttgctccttcaggctggctacgacccagagctccgggacggggacggctggactcccctgcacgcagcggcacactggggcgtggaggatgcctgccgcctgctggccgagcatggcgggggcatggactcactgacccatgcggggcagcgtccctgtgacctggccgatgaggaagtactgagcctgttggaggaactggcccggaaacaggaggaccttcggaaccaaaaagaagcttcccagagccggggccaggagccccaagcgccctctagcagcaaacacagaaggagctctgtgtgtcgtctgagcagtcgcgagaagatttccctccaggacttgtccaaggagcgccggcctggtggggctggggggccccccatccaggacgaggatgagggggaagaaggtcccaccgaaccaccccctgcagaacccagaaccctcaatggcgtctcctccccgccgcaccccagccctaagagtcccgtgcagcttgaagaggcccccttctccaggcgctttggcctcctgaagacagggagttctggtgccctgggtccccctgaaaggcggacagcggagggagcccctggggctgggctgcagcgctcggcttcctcctcctggctggaagggacctccactcaggccaaggagctccgtcttgccagaattaccccgaccccctccccgaagctgccggagccctctgtcctgtctgaggtcaccaagcctcctccttgcttggagaactcctcgcctccctccaggattccggagcctgaatccccagcgaagccaaacgtccccacagcctccacggcgcccccagcggactcccgggaccgacggaggtcctaccagatgcctgtgcgggatgaggagtcggaatcccagagaaaagctcgctcccgtctcatgcgccagtctcggaggtccacacagggtgtgactcttacagacctgaaggaggcagagaaggctgcagggaaggccccagagtcagagaagccggcgcagagcctggacccttcccgaaggccccgcgtccctggagtggagaactctgacagccctgcccagagagcagaggcgcccgacgggcagggtccgggaccgcaggcggccagggagcaccgcaaggtcggaaaggagtggagggggcctgcggagggggaggaggcggagccggctgaccgcagccaggagtccagcaccctggagggcggcccctcggcccgcaggcagcggtggcagcgggacctcaacccagaacctgagccagaatcggaagagccagacggaggctttaggacgctgtatgcagagctgcgcagggagaacgagcggcttcgcgaggccctgaccgagaccacgctgcggctggcgcagctcaaggtggagctggagcgggccacgcagaggcaagaacgcttcgctgagaggccagccctcctggaactggagagattcgagcgcagggccctggaacgcaaggccgcagagctggaggaggagctgaaggccctgtctgacctccgcgctgacaaccagcgcctcaaggatgagaatgcagcgttgatccgcgtcatcagcaaactctccaagtgacccggagggactttcccgcacccgtatttatacagctgcttctgccacacgcaccccttcccccgtgtgaacacgagtgacagggctccgggggaagtctcagagaagccatagcccccctgggacctccggactgggaggggagcagagtccccaggagccgagggggccacccgaggccaggatggaggtgggaggccgagccaagcagggggacgttgccagaggggaccagggccagagacgggaccaggaaggaactgaggaccaagaagtgcaaggatcagtagccaggaccagagtggccgcctggaggtccccatctcacgtgtgatgccaccccgtcacccctcccctcctgagcagggatccaagaatgtgccaagagtcccgccagcctcagccaggtgggcctgtatatagggtccatgtgcaatagggagggacgtcttctattttttgctgccccctccccgcccactgtctggggcagggggagaaggtattttcgagataaagcacaggcaccacaaataaaagtcgtgaagttgccactcaa

SEQ ID NO: 381652 - DNA, 412 bp, Homo sapiens
ggtctgtgttgaaacgtcaccttctcccctatcttccccccaccccgaggtgcacactgaccaccctgctgccaccacggcgccgtccgcacacgcacaccctcccgctctcagttctcgcactgctgcttctgtccagagtcctttatccttctgaccggttgcgtagtgtgctggtcttttcatggcttttgtgggttttgtgtatttctgctcagctccgtcttgccagaattaccccgaccccctccccgaagctgccggagccctctgtcctgtgagtccccagggcatgggcccctcaggggtgggtggcagatgtgggttaccaagcactgtaccgtgtgatcctgagtgagacaagtacccactggggtctggttcctgccgccagctccatagagcctagtgc

SEQ ID NO: 381653 - DNA, 1937 bp, Homo sapiens
tacggttgcggctggggttactcggccgagggcgcctctagcagcaaacacagagagctctgtgtgtcgtctgagcagtcgcgagaagatttccctccaggacttgtccaaggagcgccggcctggtggggctggggggccccccatccaggacgaggatgagggggaagaaggtcccaccgaaccaccccctgcagaacccagaaccctcaatggcgtctcctccccgccgcaccccagccctaagagtcccgtgcagcttgaagaggcccccttctccaggcgctttggcctcctgaagacagggagttctggtgccctgggtccccctgaaaggcggacagcggagggagcccctggggctgggctgcagcgctcggcttcctcctcctggctggaagggacctccactcaggccaaggagctccgtcttgccagaattaccccgaccccctccccgaagctgccggagccctctgtcctgtctgaggtcaccaagcctcctccttgcttggagaactcctcgcctccctccaggattccggagcctgaatccccagcgaagccaaacgtccccacagcctccacggcgcccccagcggactcccgggaccgacggaggtcctaccagatgcctgtgcgggatgaggagtcggaatcccagagaaaagctcgctcccgtctcatgcgccagtctcggaggtccacacagggtgtgactcttacagacctgaaggaggcagagaaggctgcagggaaggccccagagtcagagaagccggcgcagagcctggacccttcccgaaggccccgcgtccctggagtggagaactctgacagccctgcccagagagcagaggcgcccgacgggcagggtccgggaccgcaggcggccagggagcaccgcaaggtcggaaaggagtggagggggcctgcggagggggaggaggcggagccggctgaccgcagccaggagtccagcaccctggagggcggcccctcggcccgcaggcagcggtggcagcgggacctcaacccagaacctgagccagaatcggaagagccagacggaggctttaggacgctgtatgcagagctgcgcagggagaacgagcggcttcgcgaggccctgaccgagaccacgctgcggctggcgcagctcaaggtggagctggagcgggccacgcagaggcaagaacgcttcgctgagaggccagccctcctggaactggagagattcgagcgcagggccctggaacgcaaggccgcagagctggaggaggagctgaaggccctgtctgacctccgcgctgacaaccagcgcctcaaggatgagaatgcagcgttgatccgcgtcatcagcaaactctccaagtgacccggagggactttcccgcacccgtatttatacagctgcttctgccacacgcaccccttcccccgtgtgaacacgagtgacagggctccgggggaagtctcagagaagccatagcccccctgggacctccggactgggaggggagcagagtccccaggagccgagggggccacccgaggccaggatggaggtgggaggccgagccaagcagggggacgttgccagaggggaccagggccagagacgggaccaggaaggaactgaggaccaagaagtgcaaggatcagtagccaggaccagagtggccgcctggaggtccccatctcacgtgtgatgccaccccgtcacccctcccctcctgagcagggatccaagaatgtgccaagagtcccgccagcctcagccaggtgggcctgtatatagggtccatgtgcaatagggagggacgtcttctattttttgctgccccctccccgcccactgtctggggcagggggagaaggtattttcgagataaagcacaggcaccacaaataaaagtcgtgaagttgccactcaa

SEQ ID NO: 381654 - DNA, 2516 bp, Homo sapiens
caggtacctcctgagccacggggccaacatcgccgccgtcaacagtgacggggacctgcccctggccccggcgccgagctcgaccccgccgcgccgccgcccgcccgcgccgtgctggactccaccaacgccgacggtatcagcgccctgcaccaggcctgcattgatgagaacctggaggtggtgcgcttcttggtggagcagggcgccactgtgaaccaggcagacaacgagggctggacgccactgcacgtggccgcctcctgtggctacctagatatcgccaggtacctcctgagccacggggccaacatcgccgccgtcaacagtgacggggacctgcccctggacctggccgagtcggacgccatggaggggctgctgaaggcggagatcgcccgccgaggtgtggatgtggaagcagccaagcgggcagaagaggaattgctccttcatgacacgaggtgctggctgaatgggggcgccatgccagaggcccggcacccccgcacaggcgcctctgccctgcacgtggctgctgccaagggctacattgaggtgatgaggttgctccttcaggctggctacgacccagagctccgggacggggacggctggactcccctgcacgcagcggcacactggggcgtggaggatgcctgccgcctgctggccgagcatggcgggggcatggactcactgacccatgcggggcagcgtccctgtgacctggccgatgaggaagtactgagcctgttggaggaactggcccggaaacaggaggaccttcggaaccaaaaagaagcttcccagagccggggccaggagccccaagcgccctctagcagcaaacacagaaggagctctgtgtgtcgtctgagcagtcgcgagaagatttccctccaggacttgtccaaggagcgccggcctggtggggctggggggccccccatccaggacgaggatgagggggaagaaggtcccaccgaaccaccccctgcagaacccagaaccctcaatggcgtctcctccccgccgcaccccagccctaagagtcccgtggtctgaggtcaccaagcctcctccttgcttggagaactcctcgcctccctccaggattccggagcctgaatccccagcgaagccaaacgtccccacagcctccacggcgcccccagcggactcccgggaccgacggaggtcctaccagatgcctgtgcgggatgaggagtcggaatcccagagaaaagctcgctcccgtctcatgcgccagtctcggaggtccacacagggtgtgactcttacagacctgaaggaggcagagaaggctgcagggaaggccccagagtcagagaagccggcgcagagcctggacccttcccgaaggccccgcgtccctggagtggagaactctgacagccctgcccagagagcagaggcgcccgacgggcagggtccgggaccgcaggcggccagggagcaccgcaaggtcggaaaggagtggagggggcctgcggagggggaggaggcggagccggctgaccgcagccaggagtccagcaccctggagggcggcccctcggcccgcaggcagcggtggcagcgggacctcaacccagaacctgagccagaatcggaagagccagacggaggctttaggacgctgtatgcagagctgcgcagggagaacgagcggcttcgcgaggccctgaccgagaccacgctgcggctggcgcagctcaaggtggagctggagcgggccacgcagaggcaagaacgcttcgctgagaggccagccctcctggaactggagagattcgagcgcagggccctggaacgcaaggccgcagagctggaggaggagctgaaggccctgtctgacctccgcgctgacaaccagcgcctcaaggatgagaatgcagcgttgatccgcgtcatcagcaaactctccaagtgacccggagggactttcccgcacccgtatttatacagctgcttctgccacacgcaccccttcccccgtgtgaacacgagtgacagggctccgggggaagtctcagagaagccatagcccccctgggacctccggactgggaggggagcagagtccccaggagccgagggggccacccgaggccaggatggaggtgggaggccgagccaagcagggggacgttgccagaggggaccagggccagagacgggaccaggaaggaactgaggaccaagaagtgcaaggatcagtagccaggaccagagtggccgcctggaggtccccatctcacgtgtgatgccaccccgtcacccctcccctcctgagcagggatccaagaatgtgccaagagtcccgccagcctcagccaggtgggcctgtatatagggtccatgtgcaatagggagggacgtcttctattttttgctgccccctccccgcccactgtctggggcagggggagaaggtattttcgagataaagcacaggcaccacaaataaaagtcgtgaagttgccactcaa

SEQ ID NO: 381655 - DNA, 953 bp, Homo sapiens
tggcttaggtcgaggcctgggttaaatcggccggtggcagcgggacctcaacccagaacctgagccagaatcggaagagccagacggaggctttaggacgctgtatgcagagctgcgcagggagaacgagcggcttcgcgaggccctgaccgagaccacgctgcggctggcgcagctcaaggtggagctggagcgggccacgcagaggcaagaacgcttcgctgagaggccagccctcctggaactggagagattcgagcgcagggccctggaacgcaaggccgcagagctggaggaggagctgaaggccctgtctgacctccgcgctgacaaccagcgcctcaaggatgagaatgcagcgttgatccgcgtcatcagcaaactctccaagtgacccggagggactttcccgcacccgtatttatacagctgcttctgccacacgcaccccttcccccgtgtgaacacgagtgacagggctccgggggaagtctcagagaagccatagcccccctgggacctccggactgggaggggagcagagtccccaggagccgagggggccacccgaggccaggatggaggtgggaggccgagccaagcagggggacgttgccagaggggaccagggccagagacgggaccaggaaggaactgaggaccaagaagtgcaaggatcagtagccaggaccagagtggccgcctggaggtccccatctcacgtgtgatgccaccccgtcacccctcccctcctgagcagggatccaagaatgtgccaagagtcccgccagcctcagccaggtgggcctgtatatagggtccatgtgcaatagggagggacgtcttctattttttgctgccccctccccgcccactgtctggggcagggggagaaggtattttcgagataaagcacaggcaccacaaataaaagtcgtgaagttgccactcaa

SEQ ID NO: 381656 - DNA, 1127 bp, Homo sapiens
tggggtctgcgtgcgggccgggccggcccctgacgcgcgctcctcccctgccccagcaccctggagggcggcccctcggcccgcaggcagcggtggcagcgggacctcaacccagaacctgagccagaatcggaagagccagacggaggctttaggacggtgcgatcccacccctccgtcggggctttgcctgctgggtgcccagcttcctggcttccccgcccccccagcatcgccccatcctccacctgaccctcctctacctgacccccagctgtatgcagagctgcgcagggagaacgagcggcttcgcgaggccctgaccgagaccacgctgcggctggcgcagctcaaggtggagctggagcgggccacgcagaggcaagaacgcttcgctgagaggccagccctcctggaactggagagattcgagcgcagggccctggaacgcaaggccgcagagctggaggaggagctgaaggccctgtctgacctccgcgctgacaaccagcgcctcaaggatgagaatgcagcgttgatccgcgtcatcagcaaactctccaagtgacccggagggactttcccgcacccgtatttatacagctgcttctgccacacgcaccccttcccccgtgtgaacacgagtgacagggctccgggggaagtctcagagaagccatagcccccctgggacctccggactgggaggggagcagagtccccaggagccgagggggccacccgaggccaggatggaggtgggaggccgagccaagcagggggacgttgccagaggggaccagggccagagacgggaccaggaaggaactgaggaccaagaagtgcaaggatcagtagccaggaccagagtggccgcctggaggtccccatctcacgtgtgatgccaccccgtcacccctcccctcctgagcagggatccaagaatgtgccaagagtcccgccagcctcagccaggtgggcctgtatatagggtccatgtgcaatagggagggacgtcttctattttttgctgccccctccccgcccactgtctggggcagggggagaaggtattttcgagataaagcacaggcaccacaaataaaagtcgtgaagttgccactcaa

SEQ ID NO: 381657 - DNA, 2645 bp, Homo sapiens
caggtacctcctgagccacggggccaacatcgccgccgtcaacagtgacggggacctgcccctggccccggcgccgagctcgaccccgccgcgccgccgcccgcccgcgccgtgctggactccaccaacgccgacggtatcagcgccctgcaccaggcctgcattgatgagaacctggaggtggtgcgcttcttggtggagcagggcgccactgtgaaccaggcagacaacgagggctggacgccactgcacgtggccgcctcctgtggctacctagatatcgccaggtacctcctgagccacggggccaacatcgccgccgtcaacagtgacggggacctgcccctggacctggccgagtcggacgccatggaggggctgctgaaggcggagatcgcccgccgaggtgtggatgtggaagcagccaagcgggcagaagaggaattgctccttcatgacacgaggtgctggctgaatgggggcgccatgccagaggcccggcacccccgcacaggcgcctctgccctgcacgtggctgctgccaagggctacattgaggtgatgaggttgctccttcaggctggctacgacccagagctccgggacggggacggctggactcccctgcacgcagcggcacactggggcgtggaggatgcctgccgcctgctggccgagcatggcgggggcatggactcactgacccatgcggggcagcgtccctgtgacctggccgatgaggaagtactgagcctgttggaggaactggcccggaaacaggaggaccttcggaaccaaaaagaagcttcccagagccggggccaggagccccaagcgccctctagcagcaaacacagaaggagctctgtgtgtcgtctgagcagtcgcgagaagatttccctccaggacttgtccaaggagcgccggcctggtggggctggggggccccccatccaggacgaggatgagggggaagaaggtcccaccgaaccaccccctgcagaacccagaaccctcaatggcgtctcctccccgccgcaccccagccctaagagtcccgtgcagcttgaagaggcccccttctccaggcgctttggcctcctgaagacagggagttctggtgccctgggtccccctgaaaggcggacagcggagggagcccctggggctgggctgcagcgctcggcttcctcctcctggctggaagggacctccactcaggccaaggagctccgtcttgccagaattaccccgaccccctccccgaagctgccggagccctctgtcctgtctgaggtcaccaagcctcctccttgcttggagaactcctcgcctccctccaggattccggagcctgaatccccagcgaagccaaacgtccccacagcctccacggcgcccccagcggactcccgggaccgacggaggtcctaccagatgcctgtgcgggatgaggagtcggaatcccagagaaaagctcgctcccgtctcatgcgccagtctcggaggtccacacagggtgtgactcttacagacctgaaggaggcagagaaggctgcagggaaggccccagagtcagagaagccggcgcagagcctggacccttcccgaaggccccgcgtccctggagtggagaactctgacagccctgcccagagagcagaggcgcccgacgggcagggtccgggaccgcaggcggccagggagcaccgcaaggtcggaaaggagtggagggggcctgcggagggggaggaggcggagccggctgaccgcagccaggagtccagcaccctggagggcggcccctcggcccgcaggcagcggtggcagcgggacctcaacccagaacctgagccagaatcggaagagccagacggaggctttaggacgctgtatgcagagctgcgcagggagaacgagcggcttcgcgaggccctgaccgagaccacgctgcggctggcgcagctcaaggtggagctggagcgggccacgcagaggcaagaacgcttcgctgagaggccagccctcctggaactggagagattcgagcgcagggccctggaacgcaaggccgcagagctggaggaggagctgaaggccctgtctgacctccgcgctgacaaccagcgcctcaaggatgagaatgcagcgttgatccgcgtcatcagcaaactctccaagtgacccggagggactttcccgcacccgtatttatacagctgcttctgccacacgcaccccttcccccgtgtgaacacgagtgacagggctccgggggaagtctcagagaagccatagcccccctgggacctccggactgggaggggagcagagtccccaggagccgagggggccacccgaggccaggatggaggtgggaggccgagccaagcagggggacgttgccagaggggaccagggccagagacgggaccaggaaggaactgaggaccaagaagtgcaaggatcagtagccaggaccagagtggccgcctggaggtccccatctcacgtgtgatgccaccccgtcacccctcccctcctgagcagggatccaagaatgtgccaagagtcccgccagcctcagccaggtgggcctataaagcacaggcaccacaaataaaagtcgtgaagttgccactcaa

SEQ ID NO: 381658 - DNA, 4371 bp, Homo sapiens
gttctcagtggccaccctgcgctaccctctcccagaacctgagctgctctgacgcggccgtctggtgcgtttcactgatcctggtgctgcagcttccttacacttcccaagaggagaagcagtttggaaaaacaaaatcagaataagttggtcctgagttctaactttggctcttcacctttctagtccccaatttatattgttcctccgtgcgtcagttttacctgtgagataaggccagtagccagccccgtcctggcagggctgtggtgaggaggggggtgtccgtgtggaaaactccctttgtgagaatggtgcgtcctaggtgttcaccaggtcgtggccgcctctactccctttctctttctccatccttctttccttaaagagtccccagtgctatctgggacatattcctccgcccagagcagggtcccgcttccctaaggccctgctctgggcttctgggtttgagtccttggcaagcccaggagaggcgctcaggcttccctgtcccccttcctcgtccaccatctcatgcccctggctctcctgccccttccctacaggggttcctggctctgctcttcagactgagccccgttcccctgcatccccgttcccctgcatcccccttcccctgcatcccccagaggccccaggccacctacttggcctggaccccacgagaggccaccccagccctgtctaccaggctgccttttgggtggattctcctccaactgtggggtgactgcttggcaaactcactcttcggggtatcccaggaggcctggagcattggggtgggctggggttcagagaggagggattcccttctcaggttacgtggccaagaagcaggggagctgggtttgggtcaggtctgggtgtggggtgaccagcttatgctgtttgcccaggacagcctagttttagcactgaaaccctcagtcctaggaaaacagggatggttggtcactgtctctgggtgactcttgattcccggccagtttctccacctggggctgtgtttctcgtcctgcatccttctccaggcaggtccccaagcatcgcccccctgctgtggctgttcccaagttcttagggtaccccacgtgggtttatcaaccacttggtgaggctggtaccctgcccccattcctgcaccccaattgccttagtggctagggggttgggggctagagtaggaggggctggagccaggattcttagggctgaacagagaagagctgggggcctgggctcctgggtttgagagaggaggggctggggcctggactcctgggtccgagggaggaggggctggggcctggactcctgggtctgagggtggagggactgggggcctggactcctgggtccgagggaggaggggctggggcctggactcgtgggtctgagggaggaggggctgggggcctggacttctgggtcttagggaggcggggctgggcctggacccctgggtctgaatggggagaggctgggggcctggactccttcatctgagggcggaagggctggggcctggcctcctgggttgaatggggaggggttgggcctggactctggagtccctggtgcccaggcctcaggcatctttcacagggatgcctgtactgggcaggtccttgaaagggaaaggcccattgctctccttgcccccctcccctatcgccatgacaactgggtggaaataaacgagccgagttcatcccgttcccagggcacgtgcggccccttcacagcccgagtttccatgacctcatgctcttggccctcgtagctccctcccgcctcctccagatgggcagctttggagaggtgagggacttggggggtaatttatcccgtggatctaggagtttagcttcactccttcctcagctccagttcaggtcccggagcccacccagtgtccacaaggcctggggcaagtccctcctccgaccccctggacttcggcttttgtccccccaagttttggacccctaagggaagaatgagaaacggtggcccgtgtcagcccctggctgcagggccccgtgcagagggggcctcagtgaactggagtgtgacagcctggggcccaggcacacaggtgtgcagctgtctcacccctctgggagtcccgcccaggcccctgagtctgtcccagcacagggtggccttcctccaccctgcatagccctgggcccacggcttcgttcctgcagagtatctgctggggtggtttccgagcttgacccttggaaggacctggctgggtttaaggcaggaggggctgggggccaggactcctggctctgaaggaggaggggctggaacctcttccctagtctgagcactggaagcgccacctgtgggtggtgacgggggttttgccgtgtctaacaggtaccatgtggggttcccgcacccagatgagaagccccctcccttccccgttcacttcctgtttgcagatagccaggagtcctttcgtggtttccactgagcactgaaggcctggccggcctgaccactgggcaaccaggcgtatcttaaacagccagtggccagaggctgttgggtcattttccccactgtcctagcaccgtgtccctggatctgttttcgtggctccctctggagtcccgacttgctgggacaccgtggctggggtaggtgcggctgacggctgtttcccacccccaggcctgcattgatgagaacctggaggtggtgcgcttcttggtggagcagggcgccactgtgaaccaggcagacaacgagggctggacgccactgcacgtggccgcctcctgtggctacctagatatcgccaggtgaggcaagggagggccgggcaggacctggtcggggtgggggcctggaccctcagccctgaccagcccccacccccaggtacctcctgagccacggggccaacatcgccgccgtcaacagtgacggggacctgcccctggacctggccgagtcggacgccatggaggggctgctgaaggcggagatcgcccgccgaggtgggctctggtgtgctgtgtgtggggtgggggacacctcctcacccgtggtctccaggctgagagctttagaggcggcctgggcaccgaggctgaccctgcttcctaggattgtctttctttgtgcctcagtttcctcacctgtgaaatgggggtgtaggggcctgcctccaggattgcttggagcccagcacacgcacaggatgagaactcaaacccctaccaactgggactgtcaatccccctgagtaactgaggggattggaatgccggggcggggtgggtgggtggagggactcacccaggagtgcgttaggtaggattgctggaaccctgccgcaggtctttctgggaggggatgcgtttacttgggggggagtaggggcatgcaggggttgccagggactggtctccctgtcctctgagactcatcgtaccccaggagccttcatatggggtccaggagcccctgaaactgtgtctggccaggttcatttttctagggaaggggtgttgcttctagcaggtgtgtgatggccacacaggatccctgggtccccagcatgtcttctaaagtcctgggcttgcctcccagctctgcctgtgactggtgactccaggcacgtccctgaagcttgcttccctgatttcctaaaacaggaccactggtgccgcttcatggggtggttgtcagggtctggctgggttggagtggaagggtgtgagcatggttcccggcagactccaggggaccgtgtggaaggaaagggagactgacgaggaaatgagataccggcagcctccgagacttctgacgcggctgtcctgacggggccgctggccaggctgaaaggataggattccgcgtgggttcaggggtccacgagagccatgcgggaggactagctagtgggacacgtgacggcggagatctgaggttcgggagcccctctttggttgaaatggggagtgggtcaaatcagccctggacctggattctgtctccttcctcctccaactttttattttgggaaagcttcagatttacagaaaagttgaagcaatagcatgtgactacccatatgactttcactaagattcgccagtgctttttcttttttgtttttgttttttagacagctttttgagatgtaattcacctaccctacaattcacccaaagtgcacacttcagtgctttttagtctattcacggggtcgggcatttatgaccacattggttgtagaacattttcatcatcccccaacgaaaccctgcaaccgcatcacccttcgggatcctctagacgacctcagcatca

SEQ ID NO: 381659 - DNA, 2926 bp, Homo sapiens
ctgcgggcgggcggtgcgatgtccggagaggatggcccggcggctggcccgggggcggcggcggcggctgcccgggagcggcgacgggagcagctgcggcagtggggggcgcgggcgggcgccgagcctggccccggagagcgccgcgcccgcaccgtccgcttcgagcgcgccgccgagttcctggcggcctgtgcgggcggcgacctggacgaggcgcgtctgatgctgcgcgccgccgaccctggccccggcgccgagctcgaccccgccgcgccgccgcccgcccgcgccgtgctggactccaccaacgccgacggtatcagcgccctgcaccaggcctgcattgatgagaacctggaggtggtgcgcttcttggtggagcagggcgccactgtgaaccaggcagacaacgagggctggacgccactgcacgtggccgcctcctgtggctacctagatatcgccaggtacctcctgagccacggggccaacatcgccgccgtcaacagtgacggggacctgcccctggacctggccgagtcggacgccatggaggggctgctgaaggcggagatcgcccgccgaggtgtggatgtggaagcagccaagcgggcagaagaggaattgctccttcatgacacgaggtgctggctgaatgggggcgccatgccagaggcccggcacccccgcacaggcgcctctgccctgcacgtggctgctgccaagggctacattgaggtgatgaggttgctccttcaggctggctacgacccagagctccgggacggggacggctggactcccctgcacgcagcggcacactggggcgtggaggatgcctgccgcctgctggccgagcatggcgggggcatggactcactgacccatgcggggcagcgtccctgtgacctggccgatgaggaagtactgagcctgttggaggaactggcccggaaacaggaggaccttcggaaccaaaaagaagcttcccagagccggggccaggagccccaagcgccctctagcagcaaacacagaaggagctctgtgtgtcgtctgagcagtcgcgagaagatttccctccaggacttgtccaaggagcgccggcctggtggggctggggggccccccatccaggacgaggatgagggggaagaaggtcccaccgaaccaccccctgcagaacccagaaccctcaatggcgtctcctccccgccgcaccccagccctaagagtcccgtgcagcttgaagaggcccccttctccaggcgctttggcctcctgaagacagggagttctggtgccctgggtccccctgaaaggcggacagcggagggagcccctggggctgggctgcagcgctcggcttcctcctcctggctggaagggacctccactcaggccaaggagctccgtcttgccagaattaccccgaccccctccccgaagctgccggagccctctgtcctgtctgaggtcaccaagcctcctccttgcttggagaactcctcgcctccctccaggattccggagcctgaatccccagcgaagccaaacgtccccacagcctccacggcgcccccagcggactcccgggaccgacggaggtcctaccagatgcctgtgcgggatgaggagtcggaatcccagagaaaagctcgctcccgtctcatgcgccagtctcggaggtccacacagggtgtgactcttacagacctgaaggaggcagagaaggctgcagggaaggccccagagtcagagaagccggcgcagagcctggacccttcccgaaggccccgcgtccctggagtggagaactctgacagccctgcccagagagcagaggcgcccgacgggcagggtccgggaccgcaggcggccagggagcaccgcaaggtcggaaaggagtggagggggcctgcggagggggaggaggcggagccggctgaccgcagccaggagtccagcaccctggagggcggcccctcggcccgcaggcagcggtggcagcgggacctcaacccagaacctgagccagaatcggaagagccagacggaggctttaggacgctgtatgcagagctgcgcagggagaacgagcggcttcgcgaggccctgaccgagaccacgctgcggctggcgcagctcaaggtggagctggagcgggccacgcagaggcaagaacgcttcgctgagaggccagccctcctggaactggagagattcgagcgcagggccctggaacgcaaggccgcagagctggaggaggagctgaaggccctgtctgacctccgcgctgacaaccagcgcctcaaggatgagaatgcagcgttgatccgcgtcatcagcaaactctccaagtgacccggagggactttcccgcacccgtatttatacagctgcttctgccacacgcaccccttcccccgtgtgaacacgagtgacagggctccgggggaagtctcagagaagccatagcccccctgggacctccggactgggaggggagcagagtccccaggagccgagggggccacccgaggccaggatggaggtgggaggccgagccaagcagggggacgttgccagaggggaccagggccagagacgggaccaggaaggaactgaggaccaagaagtgcaaggatcagtagccaggaccagagtggccgcctggaggtccccatctcacgtgtgatgccaccccgtcacccctcccctcctgagcagggatccaagaatgtgccaagagtcccgccagcctcagccaggtgggcctgtatatagggtccatgtgcaatagggagggacgtcttctattttttgctgccccctccccgcccactgtctggggcagggggagaaggtattttcgagataaagcacaggcaccacaaataaaagtcgtgaagttgccactcaa

SEQ ID NO: 381660 - DNA, 2149 bp, Homo sapiens
caggtacctcctgagccacggggccaacatcgccgccgtcaacagtgacggggacctgcccctggccccggcgccgagctcgaccccgccgcgccgccgcccgcccgcgccgtgctggactccaccaacgccgacggtatcagcgccctgcaccaggagctctgtgtgtcgtctgagcagtcgcgagaagatttccctccaggacttgtccaaggagcgccggcctggtggggctggggggccccccatccaggacgaggatgagggggaagaaggtcccaccggtgaggggcctgaatctggactcctgggtccgagggaggaggggtcgggttctctgaatctagaggcaactggcatcttctgtgacctgcccggtgttcccacatcacagaaccaccccctgcagaacccagaaccctcaatggcgtctcctccccgccgcaccccagccctaagagtcccgtgcagcttgaagaggcccccttctccaggcgctttggcctcctgaagacagggagttctggtgccctgggtccccctgaaaggcggacagcggagggagcccctggggctgggctgcagcgctcggcttcctcctcctggctggaagggacctccactcaggccaaggagctccgtcttgccagaattaccccgaccccctccccgaagctgccggagccctctgtcctgtctgaggtcaccaagcctcctccttgcttggagaactcctcgcctccctccaggattccggagcctgaatccccagcgaagccaaacgtccccacagcctccacggcgcccccagcggactcccgggaccgacggaggtcctaccagatgcctgtgcgggatgaggagtcggaatcccagagaaaagctcgctcccgtctcatgcgccagtctcggaggtccacacagggtgtgactcttacagacctgaaggaggcagagaaggctgcagggaaggccccagagtcagagaagccggcgcagagcctggacccttcccgaaggccccgcgtccctggagtggagaactctgacagccctgcccagagagcagaggcgcccgacgggcagggtccgggaccgcaggcggccagggagcaccgcaaggtcggaaaggagtggagggggcctgcggagggggaggaggcggagccggctgaccgcagccaggagtccagcaccctggagggcggcccctcggcccgcaggcagcggtggcagcgggacctcaacccagaacctgagccagaatcggaagagccagacggaggctttaggacgctgtatgcagagctgcgcagggagaacgagcggcttcgcgaggccctgaccgagaccacgctgcggctggcgcagctcaaggtggagctggagcgggccacgcagaggcaagaacgcttcgctgagaggccagccctcctggaactggagagattcgagcgcagggccctggaacgcaaggccgcagagctggaggaggagctgaaggccctgtctgacctccgcgctgacaaccagcgcctcaaggatgagaatgcagcgttgatccgcgtcatcagcaaactctccaagtgacccggagggactttcccgcacccgtatttatacagctgcttctgccacacgcaccccttcccccgtgtgaacacgagtgacagggctccgggggaagtctcagagaagccatagcccccctgggacctccggactgggaggggagcagagtccccaggagccgagggggccacccgaggccaggatggaggtgggaggccgagccaagcagggggacgttgccagaggggaccagggccagagacgggaccaggaaggaactgaggaccaagaagtgcaaggatcagtagccaggaccagagtggccgcctggaggtccccatctcacgtgtgatgccaccccgtcacccctcccctcctgagcagggatccaagaatgtgccaagagtcccgccagcctcagccaggtgggcctgtatatagggtccatgtgcaatagggagggacgtcttctattttttgctgccccctccccgcccactgtctggggcagggggagaaggtattttcgagataaagcacaggcaccacaaataaaagtcgtgaagttgccactcaa

SEQ ID NO: 381661 - DNA, 1783 bp, Homo sapiens
ggtctgtgttgaaacgtcaccttctcccctatcttccccccaccccgaggtgcacactgaccaccctgctgccaccacggcgccgtccgcacacgcacaccctcccgctctcagttctcgcactgctgcttctgtccagagtcctttatccttctgaccggttgcgtagtgtgctggtcttttcatggcttttgtgggttttgtgtatttctgctcagctctgactctgttgtggcccagataatttgtttctttcactcacggctgcatctccagtgccggcacacaatgcacctgggtaatgtttgtggaatgaatgaattgatgcagtctgaggtcaccaagcctcctccttgcttggagaactcctcgcctccctccaggattccggagcctgaatccccagcgaagccaaacgtccccacagcctccacggcgcccccagcggactcccgggaccgacggaggtcctaccagatgcctgtgcgggatgaggagtcggaatcccagagaaaagctcgctcccgtctcatgcgccagtctcggaggtccacacagggtgtgactcttacagacctgaaggaggcagagaaggctgcagggaaggccccagagtcagagaagccggcgcagagcctggacccttcccgaaggccccgcgtccctggagtggagaactctgacagccctgcccagagagcagaggcgcccgacgggcagggtccgggaccgcaggcggccagggagcaccgcaaggtcggaaaggagtggagggggcctgcggagggggaggaggcggagccggctgaccgcagccaggagtccagcaccctggagggcggcccctcggcccgcaggcagcggtggcagcgggacctcaacccagaacctgagccagaatcggaagagccagacggaggctttaggacgctgtatgcagagctgcgcagggagaacgagcggcttcgcgaggccctgaccgagaccacgctgcggctggcgcagctcaaggtggagctggagcgggccacgcagaggcaagaacgcttcgctgagaggccagccctcctggaactggagagattcgagcgcagggccctggaacgcaaggccgcagagctggaggaggagctgaaggccctgtctgacctccgcgctgacaaccagcgcctcaaggatgagaatgcagcgttgatccgcgtcatcagcaaactctccaagtgacccggagggactttcccgcacccgtatttatacagctgcttctgccacacgcaccccttcccccgtgtgaacacgagtgacagggctccgggggaagtctcagagaagccatagcccccctgggacctccggactgggaggggagcagagtccccaggagccgagggggccacccgaggccaggatggaggtgggaggccgagccaagcagggggacgttgccagaggggaccagggccagagacgggaccaggaaggaactgaggaccaagaagtgcaaggatcagtagccaggaccagagtggccgcctggaggtccccatctcacgtgtgatgccaccccgtcacccctcccctcctgagcagggatccaagaatgtgccaagagtcccgccagcctcagccaggtgggcctgtatatagggtccatgtgcaatagggagggacgtcttctattttttgctgccccctccccgcccactgtctggggcagggggagaaggtattttcgagataaagcacaggcaccacaaataaaagtcgtgaagttgccactcaa

SEQ ID NO: 381662 - DNA, 3226 bp, Homo sapiens
caggtacctcctgagccacggggccaacatcgccgccgtcaacagtgacggggacctgcccctggccccggcgccgagctcgaccccgccgcgccgccgcccgcccgcgccgtgctggactccaccaacgccgacggtatcagcgccctgcaccaggcctgcattgatgagaacctggaggtggtgcgcttcttggtggagcagggcgccactgtgaaccaggcagacaacgagggctggacgccactgcacgtggccgcctcctgtggctacctagatatcgccaggtacctcctgagccacggggccaacatcgccgccgtcaacagtgacggggacctgcccctggacctggccgagtcggacgccatggaggggctgctgaaggcggagatcgcccgccgaggtgtggatgtggaagcagccaagcgggcagaagaggaattgctccttcatgacacgaggtgctggctgaatgggggcgccatgccagaggcccggcacccccgcacaggcgcctctgccctgcacgtggctgctgccaagggctacattgaggtgatgaggttgctccttcaggctggctacgacccagagctccgggacggggacggctggactcccctgcacgcagcggcacactggggcgtggaggatgcctgccgcctgctggccgagcatggcgggggcatggactcactgacccatgcggggcagcgtccctgtgacctggccgatgaggaagtactgagcctgttggaggaactggcccggaaacaggaggaccttcggaaccaaaaagaagcttcccagagccggggccaggagccccaagcgccctctagcagcaaacacagaaggagctctgtgtgtcgtctgagcagtcgcgagaagatttccctccaggacttgtccaaggagcgccggcctggtggggctggggggccccccatccaggacgaggatgagggggaagaaggtcccaccgaaccaccccctgcagaacccagaaccctcaatggcgtctcctccccgccgcaccccagccctaagagtcccgtgcagcttgaagaggcccccttctccaggcgctttggcctcctgaagacagggagttctggtgccctgggtccccctgaaaggcggacagcggagggagcccctggggctgggctgcagcgctcggcttcctcctcctggctggaagggacctccactcaggccaaggagctccgtcttgccagaattaccccgaccccctccccgaagctgccggagccctctgtcctgtctgaggtcaccaagcctcctccttgcttggagaactcctcgcctccctccaggattccggagcctgaatccccagcgaagccaaacgtccccacagcctccacggcgcccccagcggactcccgggaccgacggaggtcctaccagatgcctgtgcgggatgaggagtcggaatcccagagaaaagctcgctcccgtctcatgcgccagtctcggaggtccacacagggtgtgactcttacagacctgaaggaggcagagaaggctgcagggaaggccccagagtcagagaagccggcgcagagcctggacccttcccgaaggccccgcgtccctggagtggagaactctgacagccctgcccagagagcagaggcgcccgacgggcagggtccgggaccgcaggcggccagggagcaccgcaaggtcggaaaggagtggagggggcctgcggagggggaggaggcggagccggctgaccgcagccaggagtccagcaccctggagggcggcccctcggcccgcaggcagcggtggcagcgggacctcaacccagaacctgagccagaatcggaagagccagacggaggctttaggacgctgtatgcagagctgcgcagggagaacgagcggcttcgcgaggccctgaccgagaccacgctgcggctggcgcagctcaaggtggagctggagcgggccacgcagaggcaagaacgcttcgctgagaggccagccctcctggaactggagagattcgagcgcagggccctggaacgcaaggccgcagagctggaggaggagctgaaggccctgtctgacctccgcgctgacaaccagcgcctcaaggatgagaatgcagcgttgatccgcgtcatcagcaaactctccaagtgacccggagggactttcccgcacccgtatttatacagctgcttctgccacacgcaccccttcccccgtgtgaacacgagtgacagggctccgggggaagtctcagagaagccatagcccccctgggacctccggactgggaggggagcagagtccccaggagccgagggggccacccgaggccaggatggaggtgggaggccgagccaagcagggggacgttgccagaggggaccagggccagagacgggaccaggaaggaactgaggaccaagaagtgcaaggatcagtagccaggaccagagtggccgcctggaggtccccatctcacgtgtgatgccaccccgtcacccctcccctcctgagcagggatccaagaatgtgccaagagtcccgccagcctcagccaggtgggcctgtatatagggtccatgtgcaatagggagggacgtcttctattttttgctgccccctccccgcccactgtctggggcagggggagaaggtattttcgagataaagcacaggcaccacaaataaaagtcgtgaagttgccactcaaaacatacaaagcacaccacctcgcacggccagggtgggtccgccacggtccacgcaggccggcatagctacatctgggccgcgcactgtgcgacagcccgaaaataactccagggtccgccgtgatgttccgctgaggcagcgtggtggctcgtatgatctattgtgggggtaccggcagcggggaaaactaggtggattgccgggaaggatttttaggtgcgcatagtgggtcgtatatcctgatcacttacggcgcggttaaatggaccgtcgtggttttgcggtctagtagaggatagcttgtggacggccactcagtgataacgccacgcatgcatactagagaactgatcagggcactgtactggagactatacacccgatagtgaacacactataaaatcccctttacgaggatgcaccatattacgcattgagtcgaccattacgtctgtcccgtcgtagaaagcccttgacgctt

SEQ ID NO: 381663 - DNA, 1437 bp, Homo sapiens
caggtacctcctgagccacggggccaacatcgccgccgtcaacagtgacggggacctgcccctggccccggcgccgagctcgaccccgccgcgccgccgcccgcccgcgccgtgctggactccaccaacgccgacggtatcagcgccctgcaccaggcctgcattgatgagaacctggaggtggtgcgcttcttggtggagcagggcgccactgtgaaccaggcagacaacgagggctggacgccactgcacgtggccgcctcctgtggctacctagatatcgccaggtacctcctgagccacggggccaacatcgccgccgtcaacagtgacggggacctgcccctggacctggccgagtcggacgccatggaggggctgctgaaggcggagatcgcccgccgaggtgtggatgtggaagcagccaagcgggcagaagaggaattgctccttcatgacacgaggtgctggctgaatgggggcgccatgccagaggcccggcacccccgcacaggcgcctctgccctgcacgtggctgctgccaagggctacattgaggtgatgaggttgctccttcaggctggctacgacccagagctccgggacggggacggctggactcccctgcacgcagcggcacactggggcgtggaggatgcctgccgcctgctggccgagcatggcgggggcatggactcactgacccatgcggggcagcgtccctgtgacctggccgatgaggaagtactgagcctgttggaggaactggcccggaaacaggaggaccttcggaaccaaaaagaagcttcccagagccggggccaggagccccaagcgccctctagcagcaaacacagaaggagctctgtgtgtcgtctgagcagtcgcgagaagatttccctccaggacttgtccaaggagcgccggcctggtggggctggggggccccccatccaggacgaggatgagggggaagaaggtcccaccgaaccaccccctgcagaacccagaaccctcaatggcgtctcctccccgccgcaccccagccctaagagtcccgtgcagcttgaagaggcccccttctccaggcgctttggcctcctgaagacccagggccagagacgggaccaggaaggaactgaggaccaagaagtgcaaggatcagtagccaggaccagagtggccgcctggaggtccccatctcacgtgtgatgccaccccgtcacccctcccctcctgagcagggatccaagaatgtgccaagagtcccgccagcctcagccaggtgggcctgtatatagggtccatgtgcaatagggagggacgtcttctattttttgctgccccctccccgcccactgtctggggcagggggagaaggtattttcgagataaagcacaggcaccacaaataaaagtcgtgaagttgccactcaa

SEQ ID NO: 381664 - DNA, 1211 bp, Homo sapiens
tcccacagtctgaaattccccttctcccagtcctgtgggccgtctcctctccctcgcccctcttgggtcacacacccagaacgcccagccctagctctgctcctcagtaagccccacctctccctgctgtctttctctctggcagcagacctcgtaggccctcttctctccccaccccaggttttatgccgtgtgcttttacctgctgatgctggtcatggtggaaggctttggggggaaggaggcagtgctgaggacgctgagggacaccccgatgatggtccacacaggcccctgctgctgctgctgcccctgctgtccacggctgctgctcaccagatttctgaggggagcacagctctatggatcaacactttcctcggcgtgtccacactgctggctctctggaccctgggcatcatttcccgtcaagccaggctacacctgggtgagcagaacatgggagccaaatttgctctgttccaggttctcctcatcctgactgccctacagccctccatcttctcagtcttggccaacggtgggcagattgcttgttcgcctccctattcctctaaaaccaggtctcaagtgatgaattgccacctcctcatactggagacttttctaatgactgtgctgacacgaatgtactaccgaaggaaagaccacaaggttgggtatgaaactttctcttctccagacctggacttgaacctcaaagcctaaggtggatggcttggacaatgaaaggatgctgtactcattagaatacaagattcctttactgtccctcaaccttgaccaaatgggaagcattcccccttgtcaacacaagctggcagatacatttgactctacagatgaaggtgaacaatgttaggataaaattgctttggatcttgcctggaaggtgttttaagttttgtaataaacaagatgatgtctgaaaatgtgtaactgggcaccttgcctctgtccatgtcactattaacccttcaaggttgtatattgctggctaggtgcgacagctcatgcctgctatcccagcactttgggagcctgaggcgggaggatcacttgagcccaggaggttgaggctgcagtgagcaatggttgtgccatacactccagcctgggtgatacagccagaccctgcctctggaaaaaaaagaaagcttactgagctttcctaaagcagatgaaaagaa

SEQ ID NO: 381665 - DNA, 502 bp, Homo sapiens
  misc_feature (494)..(494): n is a, c, g, or t
agtgggagaccaagagggttcccagcactctcaacattctgcttttttcctctgtccccatccacttaacctggttggtgtttatgacagcagccgagcctcagcccaggagccctgtgaggagccggggcgtcttcctggggcagggggtttgtgggcccatgttcctaaccctcttccccactcaggaagaagcttcagctgctgatgttgggccctttccaatacgccttcttgaagataacgctgaccctggtgggcctgtttctcatccccgacggcatctatgacccagcagacatttctgaggggagcacagctctatggatcaacactttcctcggcgtgtccacactgctggctctctggaccctgggcatcatttcccgtcaagccaggctacacctgggtgagcagaacatgggagccaaatttgctatgttccaggttctcctcatctgactgccgacagccctcccacctcctaataaaancggggcca

SEQ ID NO: 381666 - DNA, 1453 bp, Homo sapiens
agattatggaggtgtgaagacaattacggatccctccagctagttctctcagcctcccacagcagcccaactcctagagagccctgggccctgtggaacttgccctcactagcatcctgaccttgctggcgctgggctccattgccatcttcctggaggatgccgtctacctgtacaagaacaccctttgccccatcaagaggcggactctgctctggaagagctcggcacccacggtggtgtctgtgctgtgctgctttggtctctggatccctcgttccctggtgctggtggaaatgaccatcacctcgttttatgccgtgtgcttttacctgctgatgctggtcatggtggaaggctttggggggaaggaggcagtgctgaggacgctgagggacaccccgatgatggtccacacaggcccctgctgctgctgctgcccctgctgtccacggctgctgctcaccaggaagaagcttcagctgctgatgttgggccctttccaatacgccttcttgaagataacgctgaccctggtgggcctgtttctcatccccgacggcatctatgacccagcagacatttctgaggggagcacagctctatggatcaacactttcctcggcgtgtccacactgctggctctctggaccctgggcatcatttcccgtcaagccaggctacacctgggtgagcagaacatgggagccaaatttgctctgttccaggttctcctcatcctgactgccctacagccctccatcttctcagtcttggccaacggtgggcagattgcttgttcgcctccctattcctctaaaaccaggtctcaagtgatgaattgccacctcctcatactggagacttttctaatgactgtgctgacacgaatgtactaccgaaggaaagaccacaaggttgggtatgaaactttctcttctccagacctggacttgaacctcaaagcctaaggtggatggcttggacaatgaaaggatgctgtactcattagaatacaagattcctttactgtccctcaaccttgaccaaatgggaagcattcccccttgtcaacacaagctggcagatacatttgactctacagatgaaggtgaacaatgttaggataaaattgctttggatcttgcctggaaggtgttttaagttttgtaataaacaagatgatgtctgaaaatgtgtaactgggcaccttgcctctgtccatgtcactattaacccttcaaggttgtatattgctggctaggtgcgacagctcatgcctgctatcccagcactttgggagcctgaggcgggaggatcacttgagcccaggaggttgaggctgcagtgagcaatggttgtgccatacactccagcctgggtgatacagccagaccctgcctctggaaaaaaaagaaagcttactgagctttcctaaagcagatgaaaagaa

SEQ ID NO: 381667 - DNA, 1147 bp, Homo sapiens
agattatggaggtgtgaagacaattacggatccctccagctagttctctcagcctcccacagcagcccaactcctagagagccctgggccctgtggaacttgccctcactagcatcctgaccttgctggcgctgggctccattgccatcttcctggaggatgccgtctacctgtacaagaacaccctttgccccatcaagaggcggactctgctctggaagagctcggcacccacggtggtgtctgtgctgtgctgctttggtctctggatccctcgttccctggtgctggtggaaatgaccatcacctcgttttatgccgtgtgcttttacctgctgatgctggtcatggtggaaggctttggggggaaggaggcagtgctgaggacgctgagggacaccccgatgatggtccacacaggcccctgctgctgctgctgcccctgctgtccacggctgctgctcaccaggaagaagcttcagctgctgatgttgggccctttccaatacgccttcttgaagataacgctgaccctggtgggcctgtttctcatccccgacggcatctatgacccagcagacatttctgaggggagcacagctctatggatcaacactttcctcggcgtgtccacactgctggctctctggaccctgggcatcatttcccgtcaagccaggctacacctgggtgagcagaacatgggagccaaatttgctctgttccaggttctcctcatcctgactgccctacagccctccatcttctcagtcttggccaacggtgggcagattgcttgttcgcctccctattcctctaaaaccaggtctcaagtgatgaattgccacctcctcatactggagacttttctaatgactgtgctgacacgaatgtactaccgaaggaaagaccacaaggttgggtatgaaactttctcttctccagacctggacttgaacctcaaagcctaaggtggatggcttggacaatgaaaggatgctgtactcattagaatacaagattcctttactgtccctcaaccttgaccaaatgggaagcattcccccttgtcaacacaagctggcagatacatttgactctacagatgaaggtgaacaatgttaggataaaattgctttggatcttg

SEQ ID NO: 381668 - DNA, 159 bp, Homo sapiens
aggcccggcagtgggctggctgcgttctgtgccgtgagggcaggcccagtccacccttgcctctcttttatgttccgcaggttctcctcatcctgactgccctacagccctccatcttctcagtcttggccaacggtgggcagattgcttgttcgcctc

SEQ ID NO: 381669 - DNA, 606 bp, Homo sapiens
cccccccattcccatcgatatgttatccaacaccccccacatttctgaggggagcacagctctatggatcaacactttcctcggcgtgtccacactgctggctctctggaccctgggcatcatttcccgtcaagccaggctacacctgggtgagcagaacatgggagccaaatttgctctgttccaggttctcctcatcctgactgccctacagccctccatcttctcagtcttggccaacggtgggcagattgcttgttcgcctccctattcctctaaaaccaggtctcaagtgatgaattgccacctcctcatactggagacttttctaatgactgtgctgacacgaatgtactaccgaaggaaagaccacaaggttgggtatgaaactttctcttctccagacctggacttgaacctcaaagcctaaggtggatggcttggacaatgaaaggatgctgtactcattagaatacaagattcctttactgtccctcaaccttgaccaaatgggaagcattcccccttgtcaacacaagctggcagatacatttgactctacagatgaaggtgaacaatgttaggataaaattgctttggatcttg

SEQ ID NO: 381670 - DNA, 1323 bp, Homo sapiens
tcccacagtctgaaattccccttctcccagtcctgtgggccgtctcctctccctcgcccctcttgggtcacacacccagaacgcccagccctagctctgctcctcagtaagccccacctctccctgctgtctttctctctggcagcagacctcgtaggccctcttctctccccaccccaggttttatgccgtgtgcttttacctgctgatgctggtcatggtggaaggctttggggggaaggaggcagtgctgaggacgctgagggacaccccgatgatggtccacacaggcccctgctgctgctgctgcccctgctgtccacggctgctgctcaccaggaagaagcttcagctgctgatgttgggccctttccaatacgccttcttgaagataacgctgaccctggtgggcctgtttctcatccccgacggcatctatgacccagcagacatttctgaggggagcacagctctatggatcaacactttcctcggcgtgtccacactgctggctctctggaccctgggcatcatttcccgtcaagccaggctacacctgggtgagcagaacatgggagccaaatttgctctgttccaggttctcctcatcctgactgccctacagccctccatcttctcagtcttggccaacggtgggcagattgcttgttcgcctccctattcctctaaaaccaggtctcaagtgatgaattgccacctcctcatactggagacttttctaatgactgtgctgacacgaatgtactaccgaaggaaagaccacaaggttgggtatgaaactttctcttctccagacctggacttgaacctcaaagcctaaggtggatggcttggacaatgaaaggatgctgtactcattagaatacaagattcctttactgtccctcaaccttgaccaaatgggaagcattcccccttgtcaacacaagctggcagatacatttgactctacagatgaaggtgaacaatgttaggataaaattgctttggatcttgcctggaaggtgttttaagttttgtaataaacaagatgatgtctgaaaatgtgtaactgggcaccttgcctctgtccatgtcactattaacccttcaaggttgtatattgctggctaggtgcgacagctcatgcctgctatcccagcactttgggagcctgaggcgggaggatcacttgagcccaggaggttgaggctgcagtgagcaatggttgtgccatacactccagcctgggtgatacagccagaccctgcctctggaaaaaaaagaaagcttactgagctttcctaaagcagatgaaaagaa

SEQ ID NO: 381671 - DNA, 1992 bp, Homo sapiens
agattatggaggtgtgaagacaattacggatccctccagctagttctctcagcctcccacagcagcccaactcctagagagccctgggccctgtggaacttgccctcactagcatcctgaccttgctggcgctgggctccattgccatcttcctggaggatgccgtctacctgtacaagaacaccctttgccccatcaagaggcggactctgctctggaagagctcggcacccacggtggtgtctgtgctgtgctgctttggtctctggatccctcgttccctggtgctggtggaaatgaccatcacctcgttttatgccgtgtgcttttacctgctgatgctggtcatggtggaaggctttggggggaaggaggcagtgctgaggacgctgagggacaccccgatgatggtccacacaggcccctgctgctgctgctgcccctgctgtccacggctgctgctcaccaggaagaagcttcagctgctgatgttgggccctttccaatacgccttcttgaagataacgctgaccctggtgggcctgtttctcatccccgacggcatctatgacccagcagacatttctgaggggagcacagctctatggatcaacactttcctcggcgtgtccacactgctggctctctggaccctgggcatcatttcccgtcaagccaggctacacctgggtgagcagaacatgggagccaaatttgctctgttccaggttctcctcatcctgactgccctacagccctccatcttctcagtcttggccaacggtgggcagattgcttgttcgcctccctattcctctaaaaccaggtctcaaggtgagcacgttaagcctcctgtcccatcgtgggatggatgagacggggagagtcaggaaagaaggggccccagaacagacattaggccagcctgacttctgctcagagtgttcagaagcggatcttcgggaaatcccaacagaggctttaaggaaactatgacctctctgatcacacagaagagaagtgaaaccccacagcttgaggccagccctgagggccaacccaggaagccatgggttcagtcctcagctcctgggagaggaatgggaatggttaaaaaacagaagcccatgttgattgaacacacataagaaatggactgtatgccagcctcagagcacagaagtagacagccaacttccggttctggctctaccattaacccgctgtgttatttatgacaatttcgtatccctaagtcctgatttggggataaactggagaaagtgttgctcaactcccgtgcccgggctgctagtaaaataccacctctgtaactcagcataacctacgctgtatttcaccctacactgcagtgatgaattgccacctcctcatactggagacttttctaatgactgtgctgacacgaatgtactaccgaaggaaagaccacaaggttgggtatgaaactttctcttctccagacctggacttgaacctcaaagcctaaggtggatggcttggacaatgaaaggatgctgtactcattagaatacaagattcctttactgtccctcaaccttgaccaaatgggaagcattcccccttgtcaacacaagctggcagatacatttgactctacagatgaaggtgaacaatgttaggataaaattgctttggatcttgcctggaaggtgttttaagttttgtaataaacaagatgatgtctgaaaatgtgtaactgggcaccttgcctctgtccatgtcactattaacccttcaaggttgtatattgctggctaggtgcgacagctcatgcctgctatcccagcactttgggagcctgaggcgggaggatcacttgagcccaggaggttgaggctgcagtgagcaatggttgtgccatacactccagcctgggtgatacagccagaccctgcctctggaaaaaaaagaaagcttactgagctttcctaaagcagatgaaaagaa

SEQ ID NO: 381672 - DNA, 1378 bp, Homo sapiens
agattatggaggtgtgaagacaattacggatccctccagctagttctctcagcctcccacagcagcccaactcctagagagccctgggccctgtggaacttgccctcactagcatcctgaccttgctggcgctgggctccattgccatcttcctggaggatgccgtctacctgtacaagaacaccctttgccccatcaagaggcggactctgctctggaagagctcggcacccacggtggtgtctgtgctgtgctgctttggtctctggatccctcgttccctggtgctggtggaaatgaccatcacctcgttttatgccgtgtgcttttacctgctgatgctggtcatggtggaaggctttggggggaaggaggcagtgctgaggacgctgagggacaccccgatgatggtccacacaggcccctgctgctgctgctgcccctgctgtccacggctgctgctcaccaggaagaagcttcagctgctgatgttgggccctttccaatacgccttcttgaagataacgctgaccctggtgggcctgtttctcatccccgacggcatctatgacccagcagacatttctgaggggagcacagctctatggatcaacactttcctcggcgtgtccacactgctggctctctggaccctgggcatcatttcccgtcaagccaggctacacctgggtgagcagaacatgggagccaaatttgctctgttccaggttctcctcatcctgactgccctacagccctccatcttctcagtcttggccaacggtgggcagattgcttgttcgcctccctattcctctaaaaccaggtctcaaggtgagcacgttaagcctcctgtcccatcgtgggatggatgagacggggagagtcaggaaagaaggggccccagaacagacattaggccagcctgacttctgctcagagtgttcagaagcggatcttcgggaaatcccaacagaggctttaaggaaactatgacctctctgatcacacagaagagaagtgaaaccccacagcttgaggccagccctgagggccaacccaggaagccatgggttcagtcctcagctcctgggagaggaatgggaatggttaaaaaacagaagcccatgttgattgaacacacataagaaatggactgtatgccagcctcagagcacagaagtagacagccaacttccggttctggctctaccattaacccgctgtgttatttatgacaatttcgtatccctaagtcctgatttggggataaactggagaaagtgttgctcaactcccgtgcccgggctgctagtaaaatacaaaaaagttaccggccgctgtgggtgcctgtagtcccagctactcaggatctaac

SEQ ID NO: 381673 - DNA, 1111 bp, Homo sapiens
gccaagatgcaccggggagtaggtccggcctttcgggtggtcaggaagatggcggcctctggggcggagccgcaggtcctggtacaatacttggtgttacgaaaggatctatcacaagctccgttctcctggccggcgggcgcactggtagcgcaggcttgtcacgcggccaccgcggccttgcacactcaccgcgaccacccgcacacagccgcttacctccaagagctggggcgcatgcgcaaagtggtcctcgaggccccagatgagaccaccctaaaggagctggccgagaccctgcaacagaagaacattgaccacatgctgtggcttgagcaaccagagaatatcgccacttgtattgctctccggccctaccccaaggaagaagtgggccagtatttgaagaagttccgattgttcaagtaactgctgctttgatgtgtttgaatacgcaggccacccattccaaagcatcatgtgttccttgcagtgtcagcttgctcccgtctttcagttgtgacaatttcttgagggttaagcacatgttcatattaaagttgtcattaataactacttcctcttattaataagttcaagtggggaaggtgggagagcagtattgtctggggatcattgctcaaatagaagatttggttagactctcctgtggggctcaaggaaactcccttccagtcactcgggtttgaaactttgcttttgaattccttcttattcacatccagttatcatatttcattgaatctaagataacatcaactttaagatgcggtagtattttatgtattgttaaaaaatatgccggcaaattaaacacttgtatttcaataacaaagatgttaaaatttggccagtgtggtggctcacatctgttaattccagggttttgggaagccaaggcaggaggatcgcttgagcccatgagttcaaggttacagtcagttctaatcatgccaccgcactccagcctgggcaacagagtgagacactgtctctataaagattaataacaagttaaaatttgtgtgtgtctatatatatgtacatacatacagatttattagattcaatgaaatctgtcaagtactac

SEQ ID NO: 381674 - DNA, 1103 bp, Homo sapiens
  misc_feature (34)..(34): n is a, c, g, or t
gcggcccctactactactaaattcgcggccgcgncggaagatggcggcctctggggcggagccgcaggtcctggtacaatacttggtgttacgaaaggatctatcacaagctccgttctcctggccggcgggcgcactggtagcgcaggcttgtcacgcggccaccgcggccttgcacactcaccgcgaccacccgcacacagccgcttacctccaagagctggggcgcatgcgcaaagtggtcctcgaggccccagatgagaccaccctaaaggagctggccgagaccctgcaacagaagaacattgaccacatgctgtggcttgagcaaccagagaatatcgccacttgtattgctctccggccctaccccaaggaagaagtgggccagtatttgaagaagttccgattgttcaagtaactgctgctttgatgtgtttgaatacgcaggccacccattccaaagcatcatgtgttccttgcagtgtcagcttgctcccgtctttcagttgtgacaatttcttgagggttaagcacatgttcatattaaagttgtcattaataactacttcctcttattaataagttcaagtggggaaggtgggagagcagtattgtctggggatcattgctcaaatagaagatttggttagactctcctgtggggctcaaggaaactcccttccagtcactcgggtttgaaactttgcttttgaattccttcttattcacatccagttatcatatttcattgaatctaagataacatcaactttaagatgcggtagtattttatgtattgttaaaaaatatgccggcaaattaaacacttgtatttcaataacaaagatgttaaaatttggccagtgtggtggctcacatctgttaattccagggttttgggaagccaaggcaggaggatcgcttgagcccatgagttcaaggttacagtcagttctaatcatgccaccgcactccagcctgggcaacagagtgagacactgtctctataaagattaataacaagttaaaatttgtgtgtgtctatatatatgtacatacatacagatttattagattcaatgaaatctgtcaagtactac

SEQ ID NO: 381675 - DNA, 1564 bp, Homo sapiens
agacatcgagggcggaagtgggtgtggtcttcggtccgaaggcctggctgcggggagtgggtgcggcgggagttggggtgatcgttaacatttagactggagctgtttccctggaggtgcgcccttgggaagggcctgactgtgtgaagagtggacagcagtcctccgccccctgctgggctcgcggtaaagtggtggctcctgtgtccccgctgttccgcctgtgcactggccgactttttaaagccatgccccaaagtgctgtcctcctgcaaaaccgagcccgaagggacagtgcaaagtgaagtcaaactgagtatttacctgggtaggacgccaaattatttgaaaataaatactaaaaacgttagtataaattgaacctagcttcagctagaccaggcaccaggtgtgtaaatcggtacaccttttaaaatagcagtcaggttctgtttgcagatgaccaaacaaatctcacccttaccctttgactctctatcctgctgctagagatgtagcctaagaaaataatcagatgcacccaaagagctttgcacaaggatattcatgggagcccttatggttttgaagcatatttagtggtcgggaagagtgctcatgatgcgaagctaactgaactatatatacagaatgatccagactttgaaaggaaaaactaaagaaatacatctacatattaagtagtgcatggccccagatgagaccaccctaaaggagctggccgagaccctgcaacagaagaacattgaccacatgctgtggcttgagcaaccagagaatatcgccacttgtattgctctccggccctaccccaaggaagaagtgggccagtatttgaagaagttccgattgttcaagtaactgctgctttgatgtgtttgaatacgcaggccacccattccaaagcatcatgtgttccttgcagtgtcagcttgctcccgtctttcagttgtgacaatttcttgagggttaagcacatgttcatattaaagttgtcattaataactacttcctcttattaataagttcaagtggggaaggtgggagagcagtattgtctggggatcattgctcaaatagaagatttggttagactctcctgtggggctcaaggaaactcccttccagtcactcgggtttgaaactttgcttttgaattccttcttattcacatccagttatcatatttcattgaatctaagataacatcaactttaagatgcggtagtattttatgtattgttaaaaaatatgccggcaaattaaacacttgtatttcaataacaaagatgttaaaatttggccagtgtggtggctcacatctgttaattccagggttttgggaagccaaggcaggaggatcgcttgagcccatgagttcaaggttacagtcagttctaatcatgccaccgcactccagcctgggcaacagagtgagacactgtctctataaagattaataacaagttaaaatttgtgtgtgtctatatatatgtacatacatacagatttattagattcaatgaaatctgtcaagtactac

SEQ ID NO: 381676 - DNA, 1341 bp, Homo sapiens
  misc_feature (20)..(20): n is a, c, g, or t
  misc_feature (168)..(168): n is a, c, g, or t
tctggctacagcgaccctgntcttaggcaaggggaacatttctccctggagagtcaggtcctatcctgtgctgccctgtctgcccagcccagggcgatgcctggaagccaactgacattgcagggagtcagcctcgcccccacccccaactggttttccaatgttttnactggagggcaaaattttactactactcatctttttggagaccagggctgccctgctggcagcctgccttctaagtgaaatcgactctgtttccccactttaaccccaaattggggcttggaccaagggaggtgagaccccctcccccaggtcccctcccctttcaaaatccatctcattttgccacttcatgcccctgccctaactgggtttttgttcattttttaaaaacagaccacccatcccatccgttttggcttcttgtcccctgtaaatagaccatgacttcgatcagtatttcttgtccccaccccttcctagccccagatgagaccaccctaaaggagctggccgagaccctgcaacagaagaacattgaccacatgctgtggcttgagcaaccagagaatatcgccacttgtattgctctccggccctaccccaaggaagaagtgggccagtatttgaagaagttccgattgttcaagtaactgctgctttgatgtgtttgaatacgcaggccacccattccaaagcatcatgtgttccttgcagtgtcagcttgctcccgtctttcagttgtgacaatttcttgagggttaagcacatgttcatattaaagttgtcattaataactacttcctcttattaataagttcaagtggggaaggtgggagagcagtattgtctggggatcattgctcaaatagaagatttggttagactctcctgtggggctcaaggaaactcccttccagtcactcgggtttgaaactttgcttttgaattccttcttattcacatccagttatcatatttcattgaatctaagataacatcaactttaagatgcggtagtattttatgtattgttaaaaaatatgccggcaaattaaacacttgtatttcaataacaaagatgttaaaatttggccagtgtggtggctcacatctgttaattccagggttttgggaagccaaggcaggaggatcgcttgagcccatgagttcaaggttacagtcagttctaatcatgccaccgcactccagcctgggcaacagagtgagacactgtctctataaagattaataacaagttaaaatttgtgtgtgtctatatatatgtacatacatacagatttattagattcaatgaaatctgtcaagtactac

SEQ ID NO: 381677 - DNA, 1181 bp, Homo sapiens
agacatcgagggcggaagtgggtgtggtcttcggtccgaaggcctggctgcggggagtgggtgcggcgggagttggggtgatcgttaacatttagactggagctgtttccctggaggtgcgcccttgggaagggcctgactgtgtgaagagtggacagcagtcctccgccccctgctgggctcgcggtaaagtggtggctcctgtgtccccgctgttccgcctgtgcactggccgactttttaaagccatgccccaaagtgctgtcctcctgcaaaaccgagcccgaagggacagtgcaaagtgaagtcaaactgagtatttacctgggccccagatgagaccaccctaaaggagctggccgagaccctgcaacagaagaacattgaccacatgctgtggcttgagcaaccagagaatatcgccacttgtattgctctccggccctaccccaaggaagaagtgggccagtatttgaagaagttccgattgttcaagtaactgctgctttgatgtgtttgaatacgcaggccacccattccaaagcatcatgtgttccttgcagtgtcagcttgctcccgtctttcagttgtgacaatttcttgagggttaagcacatgttcatattaaagttgtcattaataactacttcctcttattaataagttcaagtggggaaggtgggagagcagtattgtctggggatcattgctcaaatagaagatttggttagactctcctgtggggctcaaggaaactcccttccagtcactcgggtttgaaactttgcttttgaattccttcttattcacatccagttatcatatttcattgaatctaagataacatcaactttaagatgcggtagtattttatgtattgttaaaaaatatgccggcaaattaaacacttgtatttcaataacaaagatgttaaaatttggccagtgtggtggctcacatctgttaattccagggttttgggaagccaaggcaggaggatcgcttgagcccatgagttcaaggttacagtcagttctaatcatgccaccgcactccagcctgggcaacagagtgagacactgtctctataaagattaataacaagttaaaatttgtgtgtgtctatatatatgtacatacatacagatttattagattcaatgaaatctgtcaagtactac

SEQ ID NO: 381678 - DNA, 958 bp, Homo sapiens
cagagctctgccagaaggactcagcaggttaagagtcgcaatactggcattctctaatttattaaaacaagcctctgagtagcttagtggcttctgccttcataggccccagatgagaccaccctaaaggagctggccgagaccctgcaacagaagaacattgaccacatgctgtggcttgagcaaccagagaatatcgccacttgtattgctctccggccctaccccaaggaagaagtgggccagtatttgaagaagttccgattgttcaagtaactgctgctttgatgtgtttgaatacgcaggccacccattccaaagcatcatgtgttccttgcagtgtcagcttgctcccgtctttcagttgtgacaatttcttgagggttaagcacatgttcatattaaagttgtcattaataactacttcctcttattaataagttcaagtggggaaggtgggagagcagtattgtctggggatcattgctcaaatagaagatttggttagactctcctgtggggctcaaggaaactcccttccagtcactcgggtttgaaactttgcttttgaattccttcttattcacatccagttatcatatttcattgaatctaagataacatcaactttaagatgcggtagtattttatgtattgttaaaaaatatgccggcaaattaaacacttgtatttcaataacaaagatgttaaaatttggccagtgtggtggctcacatctgttaattccagggttttgggaagccaaggcaggaggatcgcttgagcccatgagttcaaggttacagtcagttctaatcatgccaccgcactccagcctgggcaacagagtgagacactgtctctataaagattaataacaagttaaaatttgtgtgtgtctatatatatgtacatacatacagatttattagattcaatgaaatctgtcaagtactac

SEQ ID NO: 381679 - DNA, 838 bp, Homo sapiens
  misc_feature (34)..(34): n is a, c, g, or t
gcggcccctactactactaaattcgcggccgcgncgaacattgaccacatgctgtggcttgagcaaccagagaatatcgccacttgtattgctctccggccctaccccaaggaagaagtgggccagtatttgaagaagttccgattgttcaagtaactgctgctttgatgtgtttgaatacgcaggccacccattccaaagcatcatgtgttccttgcagtgtcagcttgctcccgtctttcagttgtgacaatttcttgagggttaagcacatgttcatattaaagttgtcattaataactacttcctcttattaataagttcaagtggggaaggtgggagagcagtattgtctggggatcattgctcaaatagaagatttggttagactctcctgtggggctcaaggaaactcccttccagtcactcgggtttgaaactttgcttttgaattccttcttattcacatccagttatcatatttcattgaatctaagataacatcaactttaagatgcggtagtattttatgtattgttaaaaaatatgccggcaaattaaacacttgtatttcaataacaaagatgttaaaatttggccagtgtggtggctcacatctgttaattccagggttttgggaagccaaggcaggaggatcgcttgagcccatgagttcaaggttacagtcagttctaatcatgccaccgcactccagcctgggcaacagagtgagacactgtctctataaagattaataacaagttaaaatttgtgtgtgtctatatatatgtacatacatacagatttattagattcaatgaaatctgtcaagtactac

SEQ ID NO: 381680 - DNA, 1047 bp, Homo sapiens
gccaagatgcaccggggagtaggtccggcctttcgggtggtcaggaagatggcggcctctggggcggagccgcaggtcctggtacaatacttggtgttacgaaaggatctatcacaagctccgttctcctggccggcgggcgcactggtagcgcaggcttgtcacgcggccaccgcggccttgcacactcaccgcgaccacccgcacacagccgcttacctccaagagctggggcgcatgcgcaaagtggtcctcgaggccccagatgagaccaccctaaaggagctggccgagaccctgcaacagaagaacattgaccacatgctgtggcttgagcaaccagagaatatcgccacttgtattgctctccggccctaccccaaggaagaagtgggccagtatttgaagaagttccgattgttcaagtaactgctgctttgatgtgtttgaatacgcaggccacccattccaaagcatcatgtgttccttgcagtgtcagcttgctcccgtctttcagttgtgacaatttcttgagggttaagcacatgttcatattaaagttgtcattaataactacttcctcttattaataagttcaagtggggaaggtgggagagcagtattgtctggggatcattgctcaaatagaagatttggttagactctcctgtggggctcaaggaaactcccttccagtcactcgggtttgaaactttgcttttgaattccttcttattcacatccagttatcatatttcattgaatctaagataacatcaactttaagatgcggtagtattttatgtattgttaaaaaatatgccggcaaattaaacacttgtatttcaataacaaagatgttaaaatttggccagtgtggtggctcacatctgttaattccagggttttgggaagccaaggcaggaggatcgcttgagcccatgagttcaaggttacagtcagttctaatcatgccaccgccattcaagcttggccacaaaattaagccccggtttttttaaggtttattaccaggttaaaaaaaaa

SEQ ID NO: 381681 - DNA, 1298 bp, Homo sapiens
ctcgatctgcgcggcttcctgcctccatgccactccagactgcaccggcatggcactgactgcccacccctcctgcctcctggccctgttggtggcaggcctagcccaaggcatcagaggcccccttagggcccaggacctaggtccccagccgctagagctgaaagaggccttcaagttgttccagatccagttcaaccggagttacctgagcccagaagagcatgctcaccgcctggacatctttgcccacaacctggcccaggctcagaggctgcaggaggaggacttgggcacagctgagtttggggtgactccattcagtgacctcacagaggaggagtttggccagctctatggctatcggagggcagctggaggggtccccagcatgggcagagaaataaggtctgaagagccagaggagtcagtacctttcagctgtgactggcggaaggtggccggcgccatctcacccatcaaggaccagaaaaactgcaactgctgctgggccatggcagcggcaggcaacatagagaccctgtggcgcatcagtttctgggattttgtggacgtctccgtgcaggaactgctggactgtggccgctgtggggatggctgccacggtggcttcgtctgggacgcgttcataactgtcctcaacaacagcggcctggccagtgaaaaggactacccgttccagggcaaagtcagagcccacaggtgccaccccaagaagtaccagaaggtggcctggatccaggacttcatcatgctgcagaacaacgagcacagaattgcgcagtacctggccacttatggccccatcaccgtgaccatcaacatgaagccccttcagctataccggaaaggtgtgatcaaggccacacccaccacctgtgacccccagcttgtggaccactctgtcctgctggtgggttttggcagcgtcaagtcagaggaggggatatgggcagagacagtctcatcgcagtctcagcctcagcctccacaccccaccccatactggatcctgaagaactcctggggggcccaatggggagagaagggctatttccggctgcaccgagggagcaatacctgtggcatcaccaagttcccgctcactgcccgtgtgcagaaaccggatatgaagccccgagtctcctgccctccctgaacccacctggccccctcagctctgtcctgttaggccaactgcctccttgccagccccacccccaggtttttgcccatcctcccaatctcaatacagcctgaataaaccaagacaagac

SEQ ID NO: 381682 - DNA, 1381 bp, Homo sapiens
ctcgatctgcgcggcttcctgcctccatgccactccagactgcaccggcatggcactgactgcccacccctcctgcctcctggccctgttggtggcaggcctagcccaaggcatcagaggcccccttagggcccaggacctaggtccccagccgctagagctgaaagaggccttcaagttgttccagatccagttcaaccggagttacctgagcccagaagagcatgctcaccgcctggacatctttgcccacaacctggcccaggctcagaggctgcaggaggaggacttgggcacagctgagtttggggtgactccattcagtgacctcacagaggaggagtttggccagctctatggctatcggagggcagctggaggggtccccagcatgggcagagaaataaggtctgaagagccagaggagtcagtacctttcagctgtgactggcggaaggtggccggcgccatctcacccatcaaggaccagaaaaactgcaactgctgctgggccatggcagcggcaggcaacatagagaccctgtggcgcatcagtttctgggattttgtggacgtctccgtgcaggaactgctggactgtggccgctgtggggatggctgccacggtggcttcgtctgggacgcgttcataactgtcctcaacaacagcggcctggccagtgaaaaggactacccgttccagggcaaagtcagagcccacaggtgccaccccaagaagtaccagaaggtggcctggatccaggacttcatcatgctgcagaacaacgagcacagaattgcgcagtacctggccacttatggccccatcaccgtgaccatcaacatgaagccccttcagctataccggaaaggtgtgatcaaggccacacccaccacctgtgacccccagcttgtggaccactctgtcctgctggtgggttttggcagcgtcaagtcagaggaggggatatgggcagagacagtctcatcgcagtctcagcctcagcctccacaccccaccccatactggatcctgaagaactcctggggggcccaatggggagagaaggtgagtgtgatctattgggggagggggcaaggcagaacaggcctcttcccaccttcccgcccctatgtcccctaacctcctagggctatttccggctgcaccgagggagcaatacctgtggcatcaccaagttcccgctcactgcccgtgtgcagaaaccggatatgaagccccgagtctcctgccctccctgaacccacctggccccctcagctctgtcctgttaggccaactgcctccttgccagccccacccccaggtttttgcccatcctcccaatctcaatacagcctgaataaaccaagacaagac

SEQ ID NO: 381683 - DNA, 1217 bp, Homo sapiens
ctcgatctgcgcggcttcctgcctccatgccactccagactgcaccggcatggcactgactgcccacccctcctgcctcctggccctgttggtggcaggcctagcccaaggcatcagaggcccccttagggcccaggacctaggtccccagccgctagagctgaaagaggccttcaagttgttccagatccagttcaaccggagttacctgagcccagaagagcatgctcaccgcctggacatctttgcccacaacctggcccaggctcagaggctgcaggaggaggacttgggcacagctgagtttggggtgactccattcagtgacctcacagaggaggagtttggccagctctatggctatcggagggcagctggaggggtccccagcatgggcagagaaataaggtctgaagagccagaggagtcagtacctttcagctgtgactggcggaaggtggccggcgccatctcacccatcaaggaccagaaaaactgcaactgctgctgggccatggcagcggcaggcaacatagagaccctgtggcgcatcagtttctgggattttgtggacgtctccgtgcagggcggcctggccagtgaaaaggactacccgttccagggcaaagtcagagcccacaggtgccaccccaagaagtaccagaaggtggcctggatccaggacttcatcatgctgcagaacaacgagcacagaattgcgcagtacctggccacttatggccccatcaccgtgaccatcaacatgaagccccttcagctataccggaaaggtgtgatcaaggccacacccaccacctgtgacccccagcttgtggaccactctgtcctgctggtgggttttggcagcgtcaagtcagaggaggggatatgggcagagacagtctcatcgcagtctcagcctcagcctccacaccccaccccatactggatcctgaagaactcctggggggcccaatggggagagaagggctatttccggctgcaccgagggagcaatacctgtggcatcaccaagttcccgctcactgcccgtgtgcagaaaccggatatgaagccccgagtctcctgccctccctgaacccacctggccccctcagctctgtcctgttaggccaactgcctccttgccagccccacccccaggtttttgcccatcctcccaatctcaatacagcctgaataaaccaagacaagac

SEQ ID NO: 381684 - DNA, 898 bp, Homo sapiens
ctcgatctgcgcggcttcctgcctccatgccactccagactgcaccggcatggcactgactgcccacccctcctgcctcctggccctgttggtggcaggcctagcccaaggcatcagaggcccccttagggcccaggacctaggtccccagccgctagagctgaaagaggccttcaagttgttccagatccagttcaaccggagttacctgagcccagaagagcatgctcaccgcctggacatctttgcccacaacctggcccaggctcagaggctgcaggaggaggacttgggcacagctgagtttggggtgactccattcagtgacctcacagaggaggagtttggccagctctatggctatcggagggcagctggaggggtccccagcatgggcagagaaataaggtctgaagagccagaggagtcagtacctttcagctgtgactggcggaaggtggccggcgccatctcacccatcaaggaccagaaaaactgcaactgctgctgggccatggcagcggcaggcaacatagagaccctgtggcgcatcagtttctgggattttgtggacgtctccgtgcaggaactgctggactgtggccgctgtggggatggctgccacggtggcttcgtctgggacgcgttcataactgtcctcaacaacagcggcctggccagtgaaaaggactacccgttccagggcaaagtcagagcccacaggtgccaccccaagaagtaccagaaggtggcctggatccaggacttcatcatgctgcagaacaacgagcacagtgcgggcagggcagggacacgggcggatggcagggacagacaccggggcagaggcagacacgctgggctactgggctagaagacaagagggggtggggggagc

SEQ ID NO: 381685 - DNA, 437 bp, Homo sapiens
ctcgatctgcgcggcttcctgcctccatgccactccagactgcaccggcatggcactgactgcccacccctcctgcctcctggccctgttggtggcaggcctagcccaaggcatcagaggcccccttagggcccaggacctaggtccccagccgctagagctgaaagaggccttcaagttgttccagatccagttcaaccggagttacctgagcccagaagagcatgctcaccgcctggacatctttgcccacaacctggcccaggctcagaggctgcaggaggaggacttgggcacagctgagtttggggtgactccattcagtgacctcacagcagctctgtcctgttaggccaactgcctccttgccagccccacccccaggtttttgcccatcctcccaatctcaatacagcctgaataaaccaagacaagac

SEQ ID NO: 381686 - DNA, 127 bp, Homo sapiens
ctccattcagtgacctcacagccattaacccttctggctcgtaggtggtggttgggaagcgatctccccagggacactggcagctggacccagcggaccttcaatttttacttcccagggaaggaaa

SEQ ID NO: 381687 - DNA, 1618 bp, Homo sapiens
  misc_feature (1384)..(1384): n is a, c, g, or t
  misc_feature (1388)..(1388): n is a, c, g, or t
  misc_feature (1403)..(1403): n is a, c, g, or t
  misc_feature (1408)..(1408): n is a, c, g, or t
ctcgatctgcgcggcttcctgcctccatgccactccagactgcaccggcatggcactgactgcccacccctcctgcctcctggccctgttggtggcaggcctagcccaaggcatcagaggcccccttagggcccaggacctaggtccccagccgctagagctgaaagaggccttcaagttgttccagatccagttcaaccggagttacctgagcccagaagagcatgctcaccgcctggacatctttgcccacaacctggcccaggctcagaggctgcaggaggaggacttgggcacagctgagtttggggtgactccattcagtgacctcacagaggaggagtttggccagctctatggctatcggagggcagctggaggggtccccagcatgggcagagaaataaggtctgaagagccagaggagtcagtacctttcagctgtgactggcggaaggtggccggcgccatctcacccatcaaggaccagaaaaactgcaactgctgctgggccatggcagcggcaggcaacatagagaccctgtggcgcatcagtttctgggattttgtggacgtctccgtgcaggaactgctggactgtggccgctgtggggatggctgccacggtggcttcgtctgggacgcgttcataactgtcctcaacaacagcggcctggccagtgaaaaggactacccgttccagggcaaagtcagagcccacaggtgccaccccaagaagtaccagaaggtggcctggatccaggacttcatcatgctgcagaacaacgagcacagaattgcgcagtacctggccacttatggccccatcaccgtgaccatcaacatgaagccccttcagctataccggaaaggtgtgatcaaggccacacccaccacctgtgacccccagcttgtggaccactctgtcctgctggtgggttttggcagcgtcaagtcagaggaggggatatgggcagagacagtctcatcgcagtctcagcctcagcctccacaccccaccccatactggatcctgaagaactcctggggggcccaatggggagagaaggtgagtgtgatctattgggggagggggcaaggcagaacaggcctcttcccaccttcccgcccctatgtcccctaacctcctagggctatttccggctgcaccgagggagcaatacctgtggcatcaccaagttcccgctcactgcccgtgtgcagaaaccggatatgaagccccgagtctcctgccctccctgaacccacctggccccctcagctctgtcctgttaggccaactgcctccttgccagccccacccccaggtttttgcccatcctcccaatctcaatacagcctgaataaaccaagacaagacaanaaanaacaaaagaaaaaangaaanaaaaacgaacaaaaacagagggcgggccaaccctaacacgaggataacccaccgaacagggcgccaacacacgaacacagaagcgccacagacaagcacacaaagagaacaacaggaggccacaacaacacagagagagccaaaaacaaaagacaaaagactcgcgcgcaagagagaaaaaacagggaggaacaaagagaaacagacaag

SEQ ID NO: 381688 - DNA, 1248 bp, Homo sapiens
ctcgatctgcgcggcttcctgcctccatgccactccagactgcaccggcatggcactgactgcccacccctcctggtggcaggcctagcccaaggcatcagaggcccccttagggcccaggacctaggtccccagccgctagagctgaaagaggccttcaattcaaccggagttacctgagcccagaagagcatgctcaccgcctggacatctttgcccacaacctggcccaggctcagaggctgacagctgagtttggggtgactccattcagtgacctcacagaggaggagtttggccagctctatggctatcggagggcagctggaggggtccccagcatgggcagagaaataaggtctgaagagccagaggagtcagtacctttcagctgtgactggcggaaggtggccggcgccatctcacccatcaaggaccagaaaaactgcaactgctgctgggccatggcagcggcaggcaacatagagaccctgtggcgcatcagtttctgggattttgtggacgtctccgtgcaggaactgctggactgtggccgctgtggggatggctgccacggtggcttcgtctgggacgcgttcataactgtcctcaacaacagcggcctggccagtgaaaaggactacccgttccagggcaaagtcagagcccacaggtgccaccccaagaagtaccagaaggtggcctggatccaggacttcatcatgctgcagaacaacgagcacagaattgcgcagtacctggccacttatggccccatcaccgtgaccatcaacatgaagccccttcagctataccggaaaggtgtgatcaaggccacacccaccacctgtgacccccagcttgtggaccactctgtcctgctggtgggttttggcagcgtcaagtcagaggaggggatatgggcagagacagtctcatcgcagtctcagcctcagcctccacaccccaccccatactggatcctgaagaactcctggggggcccaatggggagagaagggctatttccggctgcaccgagggagcaatacctgtggcatcaccaagttcccgctcactgcccgtgtgcagaaaccggatatgaagccccgagtctcctgccctccctgaacccacctggccccctcagctctgtcctgttaggccaactgcctccttgccagccccacccccaggtttttgcccatcctcccaatctcaatacagcctgaataaaccaagacaagac

SEQ ID NO: 381689 - DNA, 676 bp, Homo sapiens
ctcgatctgcgcggcttcctgcctccatgccactccagactgcaccggcatggcactgactgcccacccctcctgcctcctggccctgttggtggcaggcctagcccaaggcatcagaggcccccttagggcccaggacctaggtccccagccgctagagctgaaagaggccttcaagttgttccagatccagttcaaccggagttacctgagcccagaagagcatgctcaccgcctggacatctttgcccacaacctggcccaggctcagaggctgcaggaggaggacttgggcacagctgagtttggggtgactccattcagtgacctcacagaggaggagtttggccagctctatggctatcggagggcagctggaggggtccccagcatgggcagagaaataaggtctgaagaaactcctggggggcccaatggggagagaagggctatttccggctgcaccgagggagcaatacctgtggcatcaccaagttcccgctcactgcccgtgtgcagaaaccggatatgaagccccgagtctcctgccctccctgaacccacctggccccctcagctctgtcctgttaggccaactgcctccttgccagccccacccccaggtttttgcccatcctcccaatctcaatacagcctgaataaaccaagacaagac

SEQ ID NO: 381690 - DNA, 1368 bp, Homo sapiens
gaagctcgttttcgcccgcttccgctctctggccgggcttgggctgcgtggagaatactttttgcgatgcctactggagactttgattcgaagcccagttgggccgaccaggtggaggaggagggggaggacgacaaatgtgtcaccagcgagctcctcaaggggatccctctggccacaggtgacaccagcccagagccagagctactgccgggagctccactgccgcctcccaaggaggtcatcaacggaaacataaagacagtgacagagtacaagatagatgaggatggcaagaagttcaagattgtccgcaccttcaggattgagacccggaaggcttcaaaggctgtcgcaaggaggaagaactggaagaagttcgggaactcagagtttgacccccccggacccaatgtggccaccaccactgtcagtgacgatgtctctatgacgttcatcaccagcaaagaggacctgaactgccaggaggaggaggaccctatgaacaaactcaagggccagaagatcgtgtcctgccgcatctgcaagggcgaccactggaccacccgctgcccctacaaggatacgctggggcccatgcagaaggagctggccgagcagctgggcctgtctactggcgagaaggagaagctgccgggagagctagagccggtgcaggccacgcagaacaagacagggaagtatgtgccgccgagcctgcgcgacggggccagccgccgcggggagtccatgcagcccaaccgcagagccgacgacaacgccaccatccgtgtcaccaacttgtcagaggacacgcgtgagaccgacctgcaggagctcttccggcctttcggctccatctcccgcatctacctggctaaggacaagaccactggccaatccaagggctttgccttcatcagcttccaccgccgcgaggatgctgcgcgtgccattgccggggtgtccggctttggctacgaccacctcatcctcaacgtcgagtgggccaagccgtccaccaactaagccagctgccactgtgtactcggtccgggacccttggcgacagaagacagcctccgagagcgcgggctccaagggcaataaagcagctccactctctcacacaacccacgatgcaacaacgcgagcaccacaccacacctatacacaaccccacaaacagcccaggcacccactcatacaaccctccccacacaccacaccccatacaaccaaccaccacgttatcatccctgttctttcacacccgcctctgtgcaacccaccccaccctacccagcccccccacttaaaaccacccacacccatacaccccacacacccactataaccccccccaca

SEQ ID NO: 381691 - DNA, 609 bp, Homo sapiens
  misc_feature (8)..(8): n is a, c, g, or t
  misc_feature (18)..(19): n is a, c, g, or t
ctcgtgcnaattcggcannagcgcatctgcaagggcgaccactggaccacccgctgcccctacaaggatacgctggggcccatgcagaaggagctggccgagcagctgggcctgtctactggcgagaaggagaagctgccgggagagctagagccggtgcaggccacgcagaacaagacagggaagtatgtgccgccgagcctgcgcgacggggccagccgccgcggggagtccatgcagcccaaccgcagagccgacgacaacgccaccatccgtgtcaccaacttgtcagaggacacgcgtgagaccgacctgcaggagctcttccggcctttcggctccatctcccgcatctacctggctaaggacaagaccactggccaatccaagggctttgccttcatcagcttccaccgccgcgaggatgctgcgcgtgccattgccggggtgtccggctttggctacgaccacctcatcctcaacgtcgagtgggccaagccgtccaccaactaagccagctgccactgtgtactcggtccgggacccttggcgacagaagacagcctccgagagcgcgggctccaagggcaataaagcagctccactctc

SEQ ID NO: 381692 - DNA, 327 bp, Homo sapiens
ttagccaggtagatgcgggagatggagccgaaaggccggaagagctcctgcaggtcggtctcacgcgtgtcctctgacaagttggtgacacggatggtggcgttgtagggctttgccttcatcagcttccaccgccgcgaggatgctgcgcgtgccattgccggggtgtccggctttggctacgaccacctcatcctcaacgtcgagtgggccaagccgtccaccaactaagccagctgccactgtgtactcggtccgggacccttggcgacagaagacagcctccgagagcgcgggctccaagggcaataaagcagctccactctc

SEQ ID NO: 381693 - DNA, 1183 bp, Homo sapiens
gaagctcgttttcgcccgcttccgctctctggccgggcttgggctgcgtggagaatactttttgcgatgcctactggagactttgattcgaagcccagttgggccgaccaggtggaggaggagggggaggacgacaaatgtgtcaccagcgagctcctcaaggggatccctctggccacaggtgacaccagcccagagccagagctactgccgggagctccactgccgcctcccaaggaggtcatcaacggaaacataaagacagtgacagagtacaagatagatgaggatggcaagaagttcaagattgtccgcaccttcaggattgagacccggaaggcttcaaaggctgtcgcaaggaggaagaactggaagaagttcgggaactcagagtttgacccccccggacccaatgtggccaccaccactgtcagtgacgatgtctctatgacgttcatcaccagcaaagaggacctgaactgccaggaggaggaggaccctatgaacaaactcaagggccagaagatcgtgtcctgccgcatctgcaagggcgaccactggaccacccgctgcccctacaaggatacgctggggcccatgcagaaggagctggccgagcagctgggcctgtctactggcgagaaggagaagctgccgggagagctagagccggtgcaggccacgcagaacaagacagggaagtatgtgccgccgagcctgcgcgacggggccagccgccgcggggagtccatgcagcccaaccgcagagccgacgacaacgccaccatccgtgtcaccaacttgtcagaggacacgcgtgagaccgacctgcaggagctcttccggcctttcggctccatctcccgcatctacctggctaaggacaagaccactggccaatccaagggctttgccttcatcagcttccaccgccgcgaggatgctgcgcgtgccattgccggggtgtccggctttggctacgaccacctcatcctcaacgtcgagtgggccaagccgtccaccaactaagccagctgccactgtgtactcggtccgggacccttggcgacagaagacagcctccgagagcgcgggctccaagggcaataaagcagctccactctcaaaaaaaaaaaaaaaaaaaaaaaaaaaaaaaaaaaaaaaaaaaaaaaaaaaaaaaaaa

SEQ ID NO: 381694 - DNA, 2406 bp, Homo sapiens
  misc_feature (2400)..(2401): n is a, c, g, or t
  misc_feature (2403)..(2403): n is a, c, g, or t
gaagctcgttttcgcccgcttccgctctctggccgggcttgggctgcgtggagaatactttttgcgatgcctactggagactttgattcgaagcccagttgggccgaccaggtggaggaggagggggaggacgacaaatgtgtcaccagcgagctcctcaaggggatccctctggccacaggtgacaccagcccagagccagagctactgccgggagctccactgccgcctcccaaggaggtcatcaacggaaacataaagacagtgacagagtacaagatagatgaggatggcaagaagttcaagattgtccgcaccttcaggattgagacccggaaggcttcaaaggctgtcgcaaggaggaagaactggaagaagttcgggaactcagagtttgacccccccggacccaatgtggccaccaccactgtcagtgacgatgtctctatgacgttcatcaccagcaaagaggacctgaactgccaggaggaggaggaccctatgaacaaactcaagggccagaagatcgtgtcctgccgcatctgcaagggcgaccactggaccacccgctgcccctacaaggatacgctggggcccatgcagaaggagctggccgagcagctgggcctgtctactggcgagaaggagaagctgccgggagagctagagccggtgcaggccacgcagaacaagacagggaagtatgtgccgccgagcctgcgcgacggggccagccgccgcggggagtccatgcagcccaaccgcagagccgacgacaacgccaccatccgtgtcaccaacttgtcagaggacacgcgtgagaccgacctgcaggagctcttccggcctttcggctccatctcccgcatctacctggctaaggacaagaccactggccaatccaagggctttgccttcatcagcttccaccgccgcgaggatgctgcgcgtgccattgccggggtgtccggctttggctacgaccacctcatcctcaacgtcgagtgggccaagccgtccaccaactaagccagctgccactgtgtactcggtccgggacccttggcgacagaagacagcctccgagagcgcgggctccaagggcaataaagcagctccactctctctacttggttctttttgttcttgcgtctccagtcctgtggcgggggccagtgcctcccctcctctgggcgtggtctggtccctgaccctgcagggagccctgtggccagcgctgtgggtgggaaaggcgactgctcctgcctgggctgcagctgggcctgacctggctgcaagcacaggtgttgctttttgggggaagggatgtgtcggggctcgggccctgccctcagggttctccagcaacacctagggtgaggaggcagcttccgctaggccacatcattggctcagctcacgggactggggctctgacggtttaggggcggctgtggcattgaggggcagggcttggccagtgctcttggcgtcctctgggttccagctgtccctgtagccggggcagtgtcggcagcagcagcccaggctgggcactgcggccatgtagagtagagggtggacacagaaggccaggggcatgaggtaggcggccagcgggggcagcgtcagggcgcagagcaggtcgctgactgccagctggacagagaagaccacggcggggtgccatgggcgctgcttccggatgctgaagcggtacagggccaggccattgctggccacggccaccaggaactcaaccaccagtatgggccacaggaagtccccctggaacccactgagtttgtcgtcggcagctgccaagaagttggcagggcaggacttggcacctgtgggcagaaggtgtcaccagctgagccctattcccccataaggcggctcctgctaccccaagagcccacgtctgccatggcgtggatccctggacacgagttctttcccctccctggagggggaccgggctccactcctttatgtggacaggattgaggctcagagccagggttatgcattgggccccaatggaccagcttaggcgggccaggcagtcttggagctcaaggtccactggtaacacagacagcggccaccctactcccccaccacacctggccccactagaggcctcctccccaaagtccagccccagcaaggcctgccggctccacttcagatctgtgccgtccaaagccccgtgggggtccagcccccactctgccctgaccttggcacccgccgccgcccaaagcctcttctccccgtggccaccagagagcacccgcgagcgctggagtcctgccccatccttttgcttccaggtgctcacacttggccagggagttgccgccaaaaagccagactcaccccacaaggtccccnngngcc

SEQ ID NO: 381695 - DNA, 1074 bp, Homo sapiens
gaagctcgttttcgcccgcttccgctctctggccgggcttgggctgcgtggagaatactttttgcgatgcctactggagactttgattcgaagcccagttgggccgaccaggtggaggaggagggggaggacgacaaatgtgtcaccagcgagctcctcaaggggatccctctggccacaggtgacaccagcccagagccagagctactgccgggagctccactgccgcctcccaaggaggtcatcaacggaaacataaagacagtgacagagtacaagatagatgaggatggcaagaagttcaagattgtccgcaccttcaggattgagacccggaaggcttcaaaggctgtcgcaaggaggaagaactggaagaagttcgggaactcagagtttgacccccccggacccaatgtggccaccaccactgtcagtgacgatgtctctatgacgttcatcaccagcaaagaggacctgaactgccaggaggaggaggaccctatgaacaaactcaagggccagaagatcgtgtcctgccgcatctgcaagggcgaccactggaccacccgctgcccctacaaggatacgctggggcccatgcagaaggagctggccgagcagctgggcctgtctactggcgagaaggagaagctgccgggagagctagagccggtgcaggccacgcagaacaagacagggaagtatgtgccgccgagcctgcgcgacggggccagccgccgcggggagtccatgcaggaggacacgcgtgagaccgacctgcaggagctcttccggcctttcggctccatctcccgcatctacctggctaaggacaagaccactggccaatccaagggctttgccttcatcagcttccaccgccgcgaggatgctgcgcgtgccattgccggggtgtccggctttggctacgaccacctcatcctcaacgtcgagtgggccaagccgtccaccaactaagccagctgccactgtgtactcggtccgggacccttggcgacagaagacagcctccgagagcgcgggctccaagggcaataaagcagctccactctc

SEQ ID NO: 381696 - DNA, 1103 bp, Homo sapiens
gaagctcgttttcgcccgcttccgctctctggccgggcttgggctgcgtggagaatactttttgcgatgcctactggagactttgattcgaagcccagttgggccgaccaggtggaggaggagggggaggacgacaaatgtgtcaccagcgagctcctcaaggggatccctctggccacaggtgacaccagcccagagccagagctactgccgggagctccactgccgcctcccaaggaggtcatcaacggaaacataaagacagtgacagagtacaagatagatgaggatggcaagaagttcaagattgtccgcaccttcaggattgagacccggaaggcttcaaaggctgtcgcaaggaggaagaactggaagaagttcgggaactcagagtttgacccccccggacccaatgtggccaccaccactgtcagtgacgatgtctctatgacgttcatcaccagcaaagaggacctgaactgccaggaggaggaggaccctatgaacaaactcaagggccagaagatcgtgtcctgccgcatctgcaagggcgaccactggaccacccgctgcccctacaaggatacgctggggcccatgcagaaggagctggccgagcagctgggcctgtctactgagagctagagccggtgcaggccacgcagaacaagacagggaagtatgtgccgccgagcctgcgcgacggggccagccgccgcggggagtccatgcagcccaaccgcagagccgacgacaacgccaccatccgtgtcaccaacttgtcagaggacacgcgtgagaccgacctgcaggagctcttccggcctttcggctccatctcccgcatctacctggctaaggacaagaccactggccaatccaagggctttgccttcatcagcttccaccgccgcgaggatgctgcgcgtgccattgccggggtgtccggctttggctacgaccacctcatcctcaacgtcgagtgggccaagccgtccaccaactaagccagctgccactgtgtactcggtccgggacccttggcgacagaagacagcctccgagagcgcgggctccaagggcaataaagcagctccactctc

SEQ ID NO: 381697 - DNA, 1319 bp, Homo sapiens
gaagctcgttttcgcccgcttccgctctctggccgggcttgggctgcgtggagaatactttttgcgatgcctactggagactttgattcgaagcccagttgggccgaccaggtggaggaggagggggaggacgacaaatgtgtcaccagcgagctcctcaaggggatccctctggccacaggtgacaccagcccagagccagagctactgccgggagctccactgccgcctcccaaggaggtcatcaacggaaacataaagacagtgacagagtacaagatagatgaggatggcaagaagttcaagattgtccgcaccttcaggattgagacccggaaggcttcaaaggctgtcgcaaggaggaagaactggaagaagttcgggaactcagagtttgacccccccggacccaatgtggccaccaccactgtcagtgacgatgtctctatgacgttcatcaccagcaaagaggacctgaactgccaggaggaggaggaccctatgaacaaactcaagggccagaagatcgtgtcctgccgcatctgcaagggcgaccactggaccacccgctgcccctacaaggatacgctggggcccatgcagaaggagctggccgagcagctgggcctgtctactggcgagaaggagaagctgccgggaggtgtgggggtgggagggtcctgctgtcagtgcacgggttctgtccccactgctgccttcgtgctgtcatctcccgcacgacagtgcagcgggtttgatggtgccagactctcctcggggcgtctgtgccttcctaattggctgtacctcctatggttgggagacgggcgtctcccatatatgtgcgacttggcagctgtgactttgctggtggccctgtgactgtcctgatgagctgctgtctgtcggccccagggtgctgaccaccccacatcgtgtgtgcgcactgtgtgtatagtgtctccgttgcatgcctgtggctgtaccgtccgaattctttggtgggatttgctggtggcgagtgtgagagtgcagacgtgcacttgtcgcctgccacgcgagggggacctgggcgctgttcctgttgtgtgtcccatgtctgccgttgctgtgcatgtgaggctgccgcccctgttgtcctcccgccctctctgaggaggagggggaggacgacaaatgtgtcaccagcgagctcctctaaggggatccctctggccacaagttgacaccagcccagagccagagctactgccgggaggtgagtgaggactgccgggaggtgagtgaggactgccactcggtgtccggctgcctctccc

SEQ ID NO: 381698 - DNA, 2603 bp, Homo sapiens
gaagctcgttttcgcccgcttccgctctctggccgggcttgggctgcgtggagaatactttttgcgatgcctactggagactttgattcgaagcccagttgggccgaccaggtggaggaggagggggaggacgacaaatgtgtcaccagcgagctcctcaaggggatccctctggccacaggtgacaccagcccagagccagagctactgccgggagctccactgccgcctcccaaggaggtcatcaacggaaacataaagacagtgacagagtacaagatagatgaggatggcaagaagttcaagattgtccgcaccttcaggattgagacccggaaggcttcaaaggctgtcgcaaggaggaaggtgaggctcttcttccccagggctaacctagaggaattggaaaaccgtgctcccggactttgtgtttagagatggggcttaactcttttttttttttttttttgagacagagtgttgctctgtcccccaggctgaagtgcagtggcacgatctcgactcactgcaacctccgcctcctgggttcaagtgattctcctgcctcagcctcccgagtagctggggttacaggcatgtgccaccacgccagctaatttttgtacttttagtagagacggggttttgccatgttggccaggctggtctcgaactcctgacctcacatgatctgcgcacctaggcctcccaaagtgttgggattacaggtgtgagccatcgcacccggccaggcttacctctttgtacctattttgttgaagctgaactgaggcctggggtgcttgcactgtcttggggccctgaaaagtccaaggcacagcagtcgataaatagcaactaaataaatgatgataaatatctaatcaaagttcgatgatagatatcaaattatattaataaatatcaaataacatcgattgtaaattcgaataaaaattagattcttttaatttttttaaagacacagtgtccagttctgttgcccaggctggagtacagtggcacgatcatagcttactgcagccttgaactcccaggctcaagccatcctcccaccccaccctcctgagtagctgagattacaggtgtgcactgccacaccggctaattttaattgtttgtagagatggggtttcactatgttgcccaggctggtctccagctcctgggcttgagagatctcccaccttcgcctctcaaagtgctgggattacaggagggagccactgcgcccagccacggttagattcttattcctcttggcctgtcaacctgcaggaacggaagcaggaggtggtcgcagcagtttttggaagaagcgttagcaataagtatacttagaacagcttgctgtgcacttaattgtaacataccccatgccaagcaccttgcacgaagtgtttctcattcagtctccttaggagcccagggaggcaggaagcttttgtggttcccgttttataagggaggaagctgaggctcaggttgtctagctcaagggcccggaggtctaggtggacccctgcacatccctgagtattgcgccctggtgggagctggtccgccagactgcgcaggccccacgctgtgtagctgtcacctggacccggaggctgacagctgccctgcctcctggagctcaggcctggcgtgtactcaggaaacaactgtcgccaggactgttcagggagtgcttgaggaggatgaagatggggtttgaggcccagacactctgggggtggctgttgtaggtctagggcaccccactgtggaacccagcctgcccctgccctcaactgtcccccatccctccctgagcccagaactggaagaagttcgggaactcagagtttgacccccccggacccaatgtggccaccaccactgtcagtgacgatgtctctatgacgttcatcaccagcaaagaggacctgaactgccaggaggaggaggaccctatgaacaaactcaagggccagaagatcgtgtcctgccgcatctgcaagggcgaccactggaccacccgctgcccctacaaggatacgctggggcccatgcagaaggagctggccgagcagctgggcctgtctactggcgagaaggagaagctgccgggagagctagagccggtgcaggccacgcagaacaagacagggaagtatgtgccgccgagcctgcgcgacggggccagccgccgcggggagtccatgcagcccaaccgcagagccgacgacaacgccaccatccgtgtcaccaacttgtcagaggacacgcgtgagaccgacctgcaggagctcttccggcctttcggctccatctcccgcatctacctggctaaggacaagaccactggccaatccaagggctttgccttcatcagcttccaccgccgcgaggatgctgcgcgtgccattgccggggtgtccggctttggctacgaccacctcatcctcaacgtcgagtgggccaagccgtccaccaactaagccagctgccactgtgtactcggtccgggacccttggcgacagaagacagcctccgagagcgcgggctccaagggcaataaagcagctccactctc

SEQ ID NO: 381699 - DNA, 906 bp, Homo sapiens
gaagctcgttttcgcccgcttccgctctctggccgggcttgggctgcgtggagaatactttttgcgatgcctactggagactttgattcgaagcccagttgggccgaccaggtggaggaggagggggaggacgacaaatgtgtcaccagcgagctcctcaaggggatccctctggccacaggtgacaccagcccagagccagagctactgccgggagctccactgccgcctcccaaggaggtcatcaacggaaacataaagacagtgacagagtacaagatagatgaggatggcaagaagttcaagattgtccgcaccttcaggattgagacccggaaggcttcaaaggctgtcgcaaggaggaagaactggaagaagttcgggaactcagagtttgacccccccggacccaatgtggccaccaccactgtcagtgacgatgtctctatgacgttcatcaccagcaaagaggacctgaactgccaggaggaggaggaccctatgaacaaactcaagggccagaagatcgtgtcctgccccaaccgcagagccgacgacaacgccaccatccgtgtcaccaacttgtcagaggacacgcgtgagaccgacctgcaggagctcttccggcctttcggctccatctcccgcatctacctggctaaggacaagaccactggccaatccaagggctttgccttcatcagcttccaccgccgcgaggatgctgcgcgtgccattgccggggtgtccggctttggctacgaccacctcatcctcaacgtcgagtgggccaagccgtccaccaactaagccagctgccactgtgtactcggtccgggacccttggcgacagaagacagcctccgagagcgcgggctccaagggcaataaagcagctccactctc

SEQ ID NO: 381700 - DNA, 2379 bp, Homo sapiens
  misc_feature (2373)..(2374): n is a, c, g, or t
  misc_feature (2376)..(2376): n is a, c, g, or t
ccctttttttatgatggattatttggtgtattgacgatgtgtgatttgatgtagtgttttgttgtttttaacagtcccccggctggttttgaggggacagtcctttattgtttttttccaaaaccgggcagaggggtggcagctcttgtgcctggggtccctgccagtccgtggaccaggcctggagactggccatctggctccgtgcccgcttcgtcctcacattaccccgtcctctgcccacccacccccaagatgccacttgggtgtctggggtcttggggtgcccccagaagtcttatacctgccaccctcccctaccccaggccgtccaccaactaagccagctgccactgtgtactcggtccgggacccttggcgacagaagacagcctccgagagcgcgggctccaagggcaataaagcagctccactctctctacttggttctttttgttcttgcgtctccagtcctgtggcgggggccagtgcctcccctcctctgggcgtggtctggtccctgaccctgcagggagccctgtggccagcgctgtgggtgggaaaggcgactgctcctgcctgggctgcagctgggcctgacctggctgcaagcacaggtgttgctttttgggggaagggatgtgtcggggctcgggccctgccctcagggttctccagcaacacctagggtgaggaggcagcttccgctaggccacatcattggctcagctcacgggactggggctctgacggtttaggggcggctgtggcattgaggggcagggcttggccagtgctcttggcgtcctctgggttccagctgtccctgtagccggggcagtgtcggcagcagcagcccaggctgggcactgcggccatgtagagtagagggtggacacagaaggccaggggcatgaggccccgcatcacctggtagcccacgtagggccccagctccagggctgctgtggcctgggctatgtctgcaaagctcgggcagcgggtgctccagcgccgccgagcatccacgttgagcacccgcatgatgtggtagggcacataggagctggcgtagagggccacaccactggccaccaacgctgccacacgcagcttctcggccacagtcatgcctgggctgcgtagcacggcccgcccgagggcgccgtaggctgccagcgtgagcagcagcggcaggccgcagcccaaccccgccagcaccaggctatacgctctgtaggccgccagcccgtggtctgctgtccccagacacttgatgcaggcctcgggcctggccacgctgcagttgcccgccccctgctgcggcctcttcaggtgggagaagctgagtgtgggcatggccagcagggcggccaggacccagccggcagcgctcacggcccaggcgtgcttgggtcgcaggtggcttcgggcgaagaaggggtgcacgatgcccaggtagcggttgaggctgatgcaggtgatgaagatgacgctgcccagcaggttgcaggtgaagaggaagcgctccaggcggcacgcggcctccccatagcgccagtgcttggggggatagaggtaggcggccagcgggggcagcgtcagggcgcagagcaggtcgctgactgccagctggacagagaagaccacggcggggtgccatgggcgctgcttccggatgctgaagcggtacagggccaggccattgctggccacggccaccaggaactcaaccaccagtatgggccacaggaagtccccctggaacccactgagtttgtcgtcggcagctgccaagaagttggcagggcaggacttggcacctgtgggcagaaggtgtcaccagctgagccctattcccccataaggcggctcctgctaccccaagagcccacgtctgccatggcgtggatccctggacacgagttctttcccctccctggagggggaccgggctccactcctttatgtggacaggattgaggctcagagccagggttatgcattgggccccaatggaccagcttaggcgggccaggcagtcttggagctcaaggtccactggtaacacagacagcggccaccctactcccccaccacacctggccccactagaggcctcctccccaaagtccagccccagcaaggcctgccggctccacttcagatctgtgccgtccaaagccccgtgggggtccagcccccactctgccctgaccttggcacccgccgccgcccaaagcctcttctccccgtggccaccagagagcacccgcgagcgctggagtcctgccccatccttttgcttccaggtgctcacacttggccagggagttgccgccaaaaagccagactcaccccacaaggtccccnngngcc

SEQ ID NO: 381701 - DNA, 1313 bp, Homo sapiens
gtcgttttcgcccgcttccgctctctggccgggcttgggctgcgtggagaatactttttgcgatgcctactggagactttgattcgaagcccagttgggccgaccaggtggaggaggagggggaggacgacaaatgtgtcaccagcgagctcctcaaggggatccctctggccacaggtgacaccagcccagagccagagctactgccgggagctccactgccgcctcccaaggaggtcatcaacggaaacataaagacagtgacacgcacgcctacacacgcatacgcactgcacgcgactgcgcacacgcacaccctcccacgccactctgctccgccaccctctcagcgcactctgaccaccccgcgcacccgcctccaccaccgcgccgcctccccaccgcgcacccaccccacactgcgcaaccaccctctccgggcaactcacgccagctctctgcaccccacccgcgcacccacactgcctgcgcccacccacccactgcctcccctgcacccacctgctctcctacctgcacgctccactcacccacccccccgccacgcgaccctgcacaccctgccacccaccgaggcacggacccctctgcaacacacacctcaacgcggccccgcacgcactcgtgctccatgcccgcactctgcccccggccccaccccctggcaccaccccgcctgcccccttacaccggcattacgcctgcggcgccccctgccccccacgcgcagccttgccccgccccccgcctgcggccctgctctccctgcgccccgcaccgcccccccctccccggccgcaaccctcccccccgccgcccggccacccccccccaccccccacccacccctgctccccccccccccctgcccccaccgcccccagcccgccgcgccgcacctccccgtcagccccaccgccccacccgccacccaccccaccaccccccggtcccccacttcgccacacccacacccccgtcaccaccgccccctccccgcagcccctccccgccctctccggaccccccctcccgcccactccccgcgccctccgcgcccccaccccccggcccctccccccccccgccctcccccctccccgccccccaccccccccccaccccccccccctgccccaccccccccccccccccccccccccccccccccccctcccccctccccccccccccccccccccccccacccccccccccccacccccccccccccccccccccccccccccccccccccccccccccccccccccccccccccccccccccct

SEQ ID NO: 381702 - DNA, 438 bp, Homo sapiens
ccctttttttatgatggattatttggtgtattgacgatgtgtgatttgatgtagtgttttgttgtttttaacagtcccccggctggttttgaggggacagtcctttattgtttttttccaaaaccgggcagaggggtggcagctcttgtgcctggggtccctgccagtccgtggaccaggcctggagactggccatctggctccgtgcccgcttcgtcctcacattaccccgtcctctgcccacccacccccaagatgccacttgggtgtctggggtcttggggtgcccccagaagtcttatacctgccaccctcccctaccccaggccgtccaccaactaagccagctgccactgtgtactcggtccgggacccttggcgacagaagacagcctccgagagcgcgggctccaagggcaataaagcagctccactctc

SEQ ID NO: 381703 - DNA, 640 bp, Homo sapiens
tgtaacataccccatgccaagcaccttgcacgaagtgtttctcattcagtctccttaggagcccagggaggcaggaagcttttgtggttcccgttttataagggaggaagctgaggctcaggttgtctagctcaagggcccggaggtctaggtggacccctgcacatccctgagtattgcgccctggtgggagctggtccgccagactgcgcaggccccacgctgtgtagctgtcacctggacccggaggctgacagctgccctgcctcctggagctcaggcctggcgtgtactcaggaaacaactgtcgccaggactgttcagggagtgcttgaggaggatgaagatggggtttgaggcccagacactctgggggtggctgttgtaggtctagggcaccccactgtggaacccagcctgcccctgccctcaactgtcccccatccctccctgagcccagaactggaagaagttcgggaactcagagtttgacccccccggacccaatgtggccaccaccactgtcagtgacgatgtctctatgacgttcatcaccagcaaagaggtaagcggggcaatcaggtggggctggcatcctggggtggggcaaagggggtgccttagccgcctctgagctccc

SEQ ID NO: 381704 - DNA, 427 bp, Homo sapiens
ccctccagggaggaagttgtaatctcccgtctcctgtttctctactggcgcctggttggcttcatggcctggcacccaccttcctacgagggatctcccatccttgccactccgagtccccacagggccatcccagtgcgttgcctggccagccctctgcccttggcctgcctttctccgcttttgctgtaggcgtcatcccaaaagcccttccatcgcagctggggagctcctgcccctggagctgactcctccttcctacgctgccttttgcagacaaatgtgtcaccagcgagctcctcaaggggatccctctggccacaggtgacaccagcccagagccagagctactgccgggaggtgagtgaggactgccgggaggtgagtgaggactgccactcggtgtccgggctgcctctccctccag

SEQ ID NO: 381705 - DNA, 1125 bp, Homo sapiens
gaagctcgttttcgcccgcttccgctctctggccgggcttgggctgcgtggagaatactttttgcgatgcctactggagactttgattcgaagcccagttgggccgaccaggtggaggaggagggggaggacgacaaatgtgtcaccagcgagctcctcaaggggatccctctggccacaggtgacaccagcccagagccagagctactgccgggagctccactgccgcctcccaaggaggtcatcaacggaaacataaagacagtgacagagtacaagatagatgaggatggcaagaagttcaagattgtccgcaccttcaggattgagacccggaaggcttcaaaggctgtcgcaaggaggaagaactggaagaagttcgggaactcagagtttgacccccccggacccaatgtggccaccaccactgtcagtgacgatgtctctatgacgttcatcaccagcaaagaggacctgaactgccaggaggaggaggaccctatgaacaaactcaagggccagaagatcgtgtcctgccgcatctgcaagggcgaccactggaccacccgctgcccctacaaggatacgctggggcccatgcagaaggagctggccgagcagctgggcctgtctactggcgagaaggagaagctgccgggagagctagagccggtgcaggccacgcagaacaagacagggaagtatgtgccgccgagcctgcgcgacggggccagccgccgcggggagtccatgcagcccaaccgcagagccgacgacaacgccaccatccgtgtcaccaacttgtcagaggacacgcgtgagaccgacctgcaggagctcttccggcctttcggctccatctcccgcatctacctggctaaggacaagaccactggccaatccaagggctttgccttcatcagcttccaccgccgcgaggatgctgcgcgtgccattgccggggtgtccggctttggctacgaccacctcatcctcaacgtcgagtgggccaagccgtccaccaactaagccagctgccactgtgtactcggtccgggacccttggcgacagaagacagcctccgagagcgcgggctccaagggcaataaagcagctccactctc

SEQ ID NO: 381706 - DNA, 718 bp, Homo sapiens
gtgcgcagtgtaccaccacgttctgttttctcggttaggaagtccggttttcgggttttggtttcagtcataggggcaacacgtaaggggtttcaaggtacctcacaggtaaaataaagtattagctcagttccctgaagacatttgccaaaagaaggtttaaaaaatcaagtgagggaactatattaagcctctgtgccgcctggccgagcatctgggcccgtttactggcgagaaggagaaacttccgggagagctagagccggtgcaggccacgcagaacaagacagggaagtatgtgccgccgagcctgcgcgacggggccagccgccgcggggagtccatgcagcccaaccgcagagccgacgacaacgccaccatccgtgtcaccaacttgtcagaggacacgcgtgagaccgacctgcaggagctcttccggcctttcggctccatctcccgcatctacctggctaaggacaagaccactggccaatccaagggctttgccttcatcagcttccaccgccgcgaggatgctgcgcgtgccattgccggggtgtccggctttggctacgaccacctcatcctcaacgtcgagtgggccaagccgtccaccaactaagccagctgccactgtgtactcggtccgggacccttggcgacagaagacagcctccgagagcgcgggctccaagggcaataaagcagctccactctc

SEQ ID NO: 381707 - DNA, 850 bp, Homo sapiens
gaagctcgttttcgcccgcttccgctctctggccgggcttgggctgcgtggagaatactttttgcgatgcctactggagactttgattcgaagcccagttgggccgaccaggtggaggaggagggggaggacaccgaattcgaatcaccctaacaagccgcaacgtaaaatccttggaaaaggtgtgtgctgacttgataagaggcgcaaaagaaaagaatctcaaagtgaaaggaccagttcgaatgcctaccaagactttgagaatcactacaagaaaaactccttgtggtgaaggttctaagacgtgggatcgtttccagatgagaattcacaagcgactcattgacttgcacagtccttctgagattgttaagcagattacttccatcagtattgagccaggagttgaggtggaagtcaccattgcagatgcttaagtcaactattttaataaattgatgaccagtggcttagaaaaaaacaacaacacaacacaaacaaaaaaaaatgtttgcgggccgactggggccccggaaaagcgcttcctgaaacaattcggcgtgtggggcccgggggccccgtgggtctaccggtgcacaggtggcacaacaggcggtccccgaggagaaaaaccggggcgcagaaacaaaaggcgggcacggaaagtgcccacaccaaggtagaaagaacgaccgcccggggggggacaccagaggagcggtttctgagacaacaacactcgaacggcggcgaaccctccagagggagacactagagcggggcagacaaatcaccgcggggggaggctcacaagcagaaggcgtggaaattacaaaattagccgggg

SEQ ID NO: 381708 - DNA, 3066 bp, Homo sapiens
  misc_feature (3060)..(3061): n is a, c, g, or t
  misc_feature (3063)..(3063): n is a, c, g, or t
gaagctcgttttcgcccgcttccgctctctggccgggcttgggctgcgtggagaatactttttgcgatgcctactggagactttgattcgaagcccagttgggccgaccaggtggaggaggagggggaggacgacaaatgtgtcaccagcgagctcctcaaggggatccctctggccacaggtgacaccagcccagagccagagctactgccgggagctccactgccgcctcccaaggaggtcatcaacggaaacataaagacagtgacagagtacaagatagatgaggatggcaagaagttcaagattgtccgcaccttcaggattgagacccggaaggcttcaaaggctgtcgcaaggaggaagaactggaagaagttcgggaactcagagtttgacccccccggacccaatgtggccaccaccactgtcagtgacgatgtctctatgacgttcatcaccagcaaagaggacctgaactgccaggaggaggaggaccctatgaacaaactcaagggccagaagatcgtgtcctgccgcatctgcaagggcgaccactggaccacccgctgcccctacaaggatacgctggggcccatgcagaaggagctggccgagcagctgggcctgtctactggcgagaaggagaagctgccgggagagctagagccggtgcaggccacgcagaacaagacagggaagtatgtgccgccgagcctgcgcgacggggccagccgccgcggggagtccatgcagcccaaccgcagagccgacgacaacgccaccatccgtgtcaccaacttgtcagaggacacgcgtgagaccgacctgcaggagctcttccggcctttcggctccatctcccgcatctacctggctaaggacaagaccactggccaatccaagggctttgccttcatcagcttccaccgccgcgaggatgctgcgcgtgccattgccggggtgtccggctttggctacgaccacctcatcctcaacgtcgagtgggccaagccgtccaccaactaagccagctgccactgtgtactcggtccgggacccttggcgacagaagacagcctccgagagcgcgggctccaagggcaataaagcagctccactctctctacttggttctttttgttcttgcgtctccagtcctgtggcgggggccagtgcctcccctcctctgggcgtggtctggtccctgaccctgcagggagccctgtggccagcgctgtgggtgggaaaggcgactgctcctgcctgggctgcagctgggcctgacctggctgcaagcacaggtgttgctttttgggggaagggatgtgtcggggctcgggccctgccctcagggttctccagcaacacctagggtgaggaggcagcttccgctaggccacatcattggctcagctcacgggactggggctctgacggtttaggggcggctgtggcattgaggggcagggcttggccagtgctcttggcgtcctctgggttccagctgtccctgtagccggggcagtgtcggcagcagcagcccaggctgggcactgcggccatgtagagtagagggtggacacagaaggccaggggcatgaggccccgcatcacctggtagcccacgtagggccccagctccagggctgctgtggcctgggctatgtctgcaaagctcgggcagcgggtgctccagcgccgccgagcatccacgttgagcacccgcatgatgtggtagggcacataggagctggcgtagagggccacaccactggccaccaacgctgccacacgcagcttctcggccacagtcatgcctgggctgcgtagcacggcccgcccgagggcgccgtaggctgccagcgtgagcagcagcggcaggccgcagcccaaccccgccagcaccaggctatacgctctgtaggccgccagcccgtggtctgctgtccccagacacttgatgcaggcctcgggcctggccacgctgcagttgcccgccccctgctgcggcctcttcaggtgggagaagctgagtgtgggcatggccagcagggcggccaggacccagccggcagcgctcacggcccaggcgtgcttgggtcgcaggtggcttcgggcgaagaaggggtgcacgatgcccaggtagcggttgaggctgatgcaggtgatgaagatgacgctgcccagcaggttgcaggtgaagaggaagcgctccaggcggcacgcggcctccccatagcgccagtgcttggggggatagaggtaggcggccagcgggggcagcgtcagggcgcagagcaggtcgctgactgccagctggacagagaagaccacggcggggtgccatgggcgctgcttccggatgctgaagcggtacagggccaggccattgctggccacggccaccaggaactcaaccaccagtatgggccacaggaagtccccctggaacccactgagtttgtcgtcggcagctgccaagaagttggcagggcaggacttggcacctgtgggcagaaggtgtcaccagctgagccctattcccccataaggcggctcctgctaccccaagagcccacgtctgccatggcgtggatccctggacacgagttctttcccctccctggagggggaccgggctccactcctttatgtggacaggattgaggctcagagccagggttatgcattgggccccaatggaccagcttaggcgggccaggcagtcttggagctcaaggtccactggtaacacagacagcggccaccctactcccccaccacacctggccccactagaggcctcctccccaaagtccagccccagcaaggcctgccggctccacttcagatctgtgccgtccaaagccccgtgggggtccagcccccactctgccctgaccttggcacccgccgccgcccaaagcctcttctccccgtggccaccagagagcacccgcgagcgctggagtcctgccccatccttttgcttccaggtgctcacacttggccagggagttgccgccaaaaagccagactcaccccacaaggtccccnngngcc

SEQ ID NO: 381709 - DNA, 1850 bp, Homo sapiens
gaagctcgttttcgcccgcttccgctctctggccgggcttgggctgcgtggagaatactttttgcgatgcctactggagactttgattcgaagcccagttgggccgaccaggtggaggaggagggggaggacgacaaatgtgtcaccagcgagctcctcaaggggatccctctggccacaggtgacaccagcccagagccagagctactgccgggagctccactgccgcctcccaaggaggtcatcaacggaaacataaagacagtgacagagtacaagatagatgaggatggcaagaagttcaagattgtccgcaccttcaggattgagacccggaaggcttcaaaggctgtcgcaaggaggaagaactggaagaagttcgggaactcagagtttgacccccccggacccaatgtggccaccaccactgtcagtgacgatgtctctatgacgttcatcaccagcaaagaggacctgaactgccaggaggaggaggaccctatgaacaaactcaagggccagaagatcgtgtcctgccgcatctgcaagggcgaccactggaccacccgctgcccctacaaggatacgctggggcccatgcagaaggagctggccgagcagctgggcctgtctactggcgagaaggagaagctgccgggaggtgtgggggtgggagggtcctgctgtcagtgcacgggttctgtccccactgctgccttcgtgctgtcatctcccgcacgacagtgcagcgggtttgatggtgccagactctcctcggggcgtctgtgccttcctaattggctgtacctcctatggttgggagacgggcgtctcccatatatgtgcgacttggcagctgtgactttgctggtggccctgtgactgtcctgatgagctgctgtctgtcggccccagggtgctgaccaccccacatcgtgtgtgcgcactgtgtgtatagtgtctccgttgcatgcctgtggctgtaccgtccgaattctttggtgggatttgctggtggcgagtgtgagagtgcagacgtgcacttgtcgcctgccacgcgagggggacctgggcgctgttcctgttgtgtgtcccatgtctgccgttgctgtgcatgtgaggctgccgcccctgttgtcctcccgccctctctggggtggggtcggggctcctcctcctcctcctccaccagtgtcgctggctgggagctcaaatggtgtcagcttctcaggtgtcaccttggtgtcctcgtggccaactggctgcctgtggtttggcacacagtgcctgcgctggctcaacactgaagcccgagcttcctggggcggctctgtccccacgcctgcgccacagtgaggttgaacttgactgtcttttggtccccagagctagagccggtgcaggccacgcagaacaagacagggaagtatgtgccgccgagcctgcgcgacggggccagccgccgcggggagtccatgcagcccaaccgcagagccgacgacaacgccaccatccgtgtcaccaacttgtcagaggacacgcgtgagaccgacctgcaggagctcttccggcctttcggctccatctcccgcatctacctggctaaggacaagaccactggccaatccaagggctttgccttcatcagcttccaccgccgcgaggatgctgcgcgtgccattgccggggtgtccggctttggctacgaccacctcatcctcaacgtcgagtgggccaagccgtccaccaactaagccagctgccactgtgtactcggtccgggacccttggcgacagaagacagcctccgagagcgcgggctccaagggcaataaagcagctccactctc

SEQ ID NO: 381710 - DNA, 2489 bp, Homo sapiens
gtcgttttcgcccgcttccgctctctggccgggcttgggctgcgtggagaatactttttgcgatgcctactggagactttgattcgaagcccagttgggccgaccaggtggaggaggagggggaggacgacaaatgtgtcaccagcgagctcctcaaggggatccctctggccacaggtgacaccagcccagagccagagctactgccgggagctccactgccgcctcccaaggaggtcatcaacggaaacataaagacagtgacagagtacaagatagatgaggatggcaagaagttcaagattgtccgcaccttcaggattgagacccggaaggcttcaaaggctgtcgcaaggaggaagagtgttgctctgtcccccaggctgaagtgcagtggcacgatctcgactcactgcaacctccgcctcctgggttcaagtgattctcctgcctcagcctcccgagtagctggggttacaggcatgtgccaccacgccagctaatttttgtacttttagtagagacggggttttgccatgttggccaggctggtctcgaactcctgacctcacatgatctgcgcacctaggcctcccaaagtgttgggattacaggtgtgagccatcgcacccggccaggcttacctctttgtacctattttgttgaagctgaactgaggcctggggtgcttgcactgtcttggggccctgaaaagtccaaggcacagcagtcgataaatagcaactaaataaatgatgataaatatctaatcaaagttcgatgatagatatcaaattatattaataaatatcaaataacatcgattgtaaattcgaataaaaattagattcttttaatttttttaaagacacagtgtccagttctgttgcccaggctggagtacagtggcacgatcatagcttactgcagccttgaactcccaggctcaagccatcctcccaccccaccctcctgagtagctgagattacaggtgtgcactgccacaccggctaattttaattgtttgtagagatggggtttcactatgttgcccaggctggtctccagctcctgggcttgagagatctcccaccttcgcctctcaaagtgctgggattacaggagggagccactgcgcccagccacggttagattcttattcctcttggcctgtcaacctgcaggaacggaagcaggaggtggtcgcagcagtttttggaagaagcgttagcaataagtatacttagaacagcttgctgtgcacttaattgtaacataccccatgccaagcaccttgcacgaagtgtttctcattcagtctccttaggagcccagggaggcaggaagcttttgtggttcccgttttataagggaggaagctgaggctcaggttgtctagctcaagggcccggaggtctaggtggacccctgcacatccctgagtattgcgccctggtgggagctggtccgccagactgcgcaggccccacgctgtgtagctgtcacctggacccggaggctgacagctgccctgcctcctggagctcaggcctggcgtgtactcaggaaacaactgtcgccaggactgttcagggagtgcttgaggaggatgaagatggggtttgaggcccagacactctgggggtggctgttgtaggtctagggcaccccactgtggaacccagcctgcccctgccctcaactgtcccccatccctccctgagcccagaactggaagaagttcgggaactcagagtttgacccccccggacccaatgtggccaccaccactgtcagtgacgatgtctctatgacgttcatcaccagcaaagaggacctgaactgccaggaggaggaggaccctatgaacaaactcaagggccagaagatcgtgtcctgccgcatctgcaagggcgaccactggaccacccgctgcccctacaaggatacgctggggcccatgcagaaggagctggccgagcagctgggcctgtctactggcgagaaggagaagctgccgggagagctagagccggtgcaggccacgcagaacaagacagggaagtatgtgccgccgagcctgcgcgacggggccagccgccgcggggagtccatgcagcccaaccgcagagccgacgacaacgccaccatccgtgtcaccaacttgtcagaggacacgcgtgagaccgacctgcaggagctcttccggcctttcggctccatctcccgcatctacctggctaaggacaagaccactggccaatccaagggctttgccttcatcagcttccaccgccgcgaggatgctgcgcgtgccattgccggggtgtccggctttggctacgaccacctcatcctcaacgtcgagtgggccaagccgtccaccaactaagccagctgccactgtgtactcggtccgggacccttggcgacagaagacagcctccgagagcgcgggctccaagggcaataaagcagctccactctc

SEQ ID NO: 381711 - DNA, 2473 bp, Homo sapiens
gaagctcgttttcgcccgcttccgctctctggccgggcttgggctgcgtggagaatactttttgcgatgcctactggagactttgattcgaagcccagttgggccgaccaggtggaggaggagggggaggacgacaaatgtgtcaccagcgagctcctcaaggggatccctctggccacaggtgacaccagcccagagccagagctactgccgggagctccactgccgcctcccaaggaggtcatcaacggaaacataaagacagtgacagagtacaagatagatgaggatggcaagaagttcaagattgtccgcaccttcaggattgagacccggaaggcttcaaaggctgtcgcaaggaggaaggctgaagtgcagtggcacgatctcgactcactgcaacctccgcctcctgggttcaagtgattctcctgcctcagcctcccgagtagctggggttacaggcatgtgccaccacgccagctaatttttgtacttttagtagagacggggttttgccatgttggccaggctggtctcgaactcctgacctcacatgatctgcgcacctaggcctcccaaagtgttgggattacaggtgtgagccatcgcacccggccaggcttacctctttgtacctattttgttgaagctgaactgaggcctggggtgcttgcactgtcttggggccctgaaaagtccaaggcacagcagtcgataaatagcaactaaataaatgatgataaatatctaatcaaagttcgatgatagatatcaaattatattaataaatatcaaataacatcgattgtaaattcgaataaaaattagattcttttaatttttttaaagacacagtgtccagttctgttgcccaggctggagtacagtggcacgatcatagcttactgcagccttgaactcccaggctcaagccatcctcccaccccaccctcctgagtagctgagattacaggtgtgcactgccacaccggctaattttaattgtttgtagagatggggtttcactatgttgcccaggctggtctccagctcctgggcttgagagatctcccaccttcgcctctcaaagtgctgggattacaggagggagccactgcgcccagccacggttagattcttattcctcttggcctgtcaacctgcaggaacggaagcaggaggtggtcgcagcagtttttggaagaagcgttagcaataagtatacttagaacagcttgctgtgcacttaattgtaacataccccatgccaagcaccttgcacgaagtgtttctcattcagtctccttaggagcccagggaggcaggaagcttttgtggttcccgttttataagggaggaagctgaggctcaggttgtctagctcaagggcccggaggtctaggtggacccctgcacatccctgagtattgcgccctggtgggagctggtccgccagactgcgcaggccccacgctgtgtagctgtcacctggacccggaggctgacagctgccctgcctcctggagctcaggcctggcgtgtactcaggaaacaactgtcgccaggactgttcagggagtgcttgaggaggatgaagatggggtttgaggcccagacactctgggggtggctgttgtaggtctagggcaccccactgtggaacccagcctgcccctgccctcaactgtcccccatccctccctgagcccagaactggaagaagttcgggaactcagagtttgacccccccggacccaatgtggccaccaccactgtcagtgacgatgtctctatgacgttcatcaccagcaaagaggacctgaactgccaggaggaggaggaccctatgaacaaactcaagggccagaagatcgtgtcctgccgcatctgcaagggcgaccactggaccacccgctgcccctacaaggatacgctggggcccatgcagaaggagctggccgagcagctgggcctgtctactggcgagaaggagaagctgccgggagagctagagccggtgcaggccacgcagaacaagacagggaagtatgtgccgccgagcctgcgcgacggggccagccgccgcggggagtccatgcagcccaaccgcagagccgacgacaacgccaccatccgtgtcaccaacttgtcagaggacacgcgtgagaccgacctgcaggagctcttccggcctttcggctccatctcccgcatctacctggctaaggacaagaccactggccaatccaagggctttgccttcatcagcttccaccgccgcgaggatgctgcgcgtgccattgccggggtgtccggctttggctacgaccacctcatcctcaacgtcgagtgggccaagccgtccaccaactaagccagctgccactgtgtactcggtccgggacccttggcgacagaagacagcctccgagagcgcgggctccaagggcaataaagcagctccactctc

SEQ ID NO: 381712 - DNA, 2270 bp, Homo sapiens
gtcgttttcgcccgcttccgctctctggccgggcttgggctgcgtggagaatactttttgcgatgcctactggagactttgattcgaagcccagttgggccgaccaggtggaggaggagggggaggacgacaaatgtgtcaccagcgagctcctcaaggggatccctctggccacaggtgacaccagcccagagccagagctactgccgggagctccactgccgcctcccaaggaggtcatcaacggaaacataaagacagtgacagagtacaagatagatgaggatggcaagaagttcaagattgtccgcaccttcaggattgagacccggaaggcttcaaaggctgtcgcaaggaggaagagtgttgctctgtcccccaggctgaagtgcagtggcacgatctcgactcactgcaacctccgcctcctgggttcaagtgattctcctgcctcagcctcccgagtagctggggttacaggcatgtgccaccacgccagctaatttttgtacttttagtagagacggggttttgccatgttggccaggctggtctcgaactcctgacctcacatgatctgcgcacctaggcctcccaaagtgttgggattacaggtgtgagccatcgcacccggccaggcttacctctttgtacctattttgttgaagctgaactgaggcctggggtgcttgcactgtcttggggccctgaaaagtccaaggcacagcagtcgataaatagcaactaaataaatgatgataaatatctaatcaaagttcgatgatagatatcaaattatattaataaatatcaaataacatcgattgtaaattcgaataaaaattagattcttttaatttttttaaagacacagtgtccagttctgttgcccaggctggagtacagtggcacgatcatagcttactgcagccttgaactcccaggctcaagccatcctcccaccccaccctcctgagtagctgagattacaggtgtgcactgccacaccggctaattttaattgtttgtagagatggggtttcactatgttgcccaggctggtctccagctcctgggcttgagagatctcccaccttcgcctctcaaagtgctgggattacaggagggagccactgcgcccagccacggttagattcttattcctcttggcctgtcaacctgcaggaacggaagcaggaggtggtcgcagcagtttttggaagaagcgttagcaataagtatacttagaacagcttgctgtgcacttaattgtaacataccccatgccaagcaccttgcacgaagtgtttctcattcagtctccttaggagcccagggaggcaggaagcttttgtggttcccgttttataagggaggaagctgaggctcaggttgtctagctcaagggcccggaggtctaggtggacccctgcacatccctgagtattgcgccctggtgggagctggtccgccagactgcgcaggccccacgctgtgtagctgtcacctggacccggaggctgacagctgccctgcctcctggagctcaggcctggcgtgtactcaggaaacaactgtcgccaggactgttcagggagtgcttgaggaggatgaagatggggtttgaggcccagacactctgggggtggctgttgtaggtctagggcaccccactgtggaacccagcctgcccctgccctcaactgtcccccatccctccctgagcccagaactggaagaagttcgggaactcagagtttgacccccccggacccaatgtggccaccaccactgtcagtgacgatgtctctatgacgttcatcaccagcaaagaggacctgaactgccaggaggaggaggaccctatgaacaaactcaagggccagaagatcgtgtcctgccccaaccgcagagccgacgacaacgccaccatccgtgtcaccaacttgtcagaggacacgcgtgagaccgacctgcaggagctcttccggcctttcggctccatctcccgcatctacctggctaaggacaagaccactggccaatccaagggctttgccttcatcagcttccaccgccgcgaggatgctgcgcgtgccattgccggggtgtccggctttggctacgaccacctcatcctcaacgtcgagtgggccaagccgtccaccaactaagccagctgccactgtgtactcggtccgggacccttggcgacagaagacagcctccgagagcgcgggctccaagggcaataaagcagctccactctc

SEQ ID NO: 381713 - DNA, 768 bp, Homo sapiens
gaagctcgttttcgcccgcttccgctctctggccgggcttgggctgcgtggagaatactttttgcgatgcctactggagactttgattcgaagcccagttgggccgaccaggtggaggaggagggggaggacgacaaatgtgtcaccagcgagctcctcaaggggatccctctggccacaggtgacaccagcccagagccagagctactgccgggagctccactgccgcctcccaaggaggtcatcaacggaaacataaagacagtgacagagtacaagatagatgaggatggcaagaagttcaagattgtccgcaccttcaggattgagacccggaaggcttcaaaggctgtcgcaaggaggaagaactggaagaagttcgggaactcagagtttgaccccaaccgcagagccgacgacaacgccaccatccgtgtcaccaacttgtcagaggacacgcgtgagaccgacctgcaggagctcttccggcctttcggctccatctcccgcatctacctggctaaggacaagaccactggccaatccaagggctttgccttcatcagcttccaccgccgcgaggatgctgcgcgtgccattgccggggtgtccggctttggctacgaccacctcatcctcaacgtcgagtgggccaagccgtccaccaactaagccagctgccactgtgtactcggtccgggacccttggcgacagaagacagcctccgagagcgcgggctccaagggcaataaagcagctccactctc

SEQ ID NO: 381714 - DNA, 290 bp, Homo sapiens
gttgctagggagtatacctttcctttggtaaaatatgaatttgtttcttactgtttagaataggtaaggtttcttaattgctgataattatattatgtagaacgtctttttggcaagggctgtatttattcactatttgattatacttaaacttcaggctgggcatggtggctcatgcttgtaatcccagcactttgagaggctgaggtgctgaggtgggaggattgcttgagctcaagagttcaagaccggcctgggcaacatagcaagtgagaccccatctcaaaaaa

SEQ ID NO: 381715 - DNA, 432 bp, Homo sapiens
gactataggttaatggtggcgagagggtcagcaggaaaacatgtgaacaaaggactctgtgtcaaaaataagtttaaggaaaggtgctgtgcctggatgtgcacataggccagatttatgtttaactttacacaaacatctcaatgcagtaaagagcagtattgtctccagcatgtctcacctccagccataaggcagttttctcctatctcagttaatagaatgtatgatcgggttttacaccgagacattccattcccagggatgagcaagagacagatgccttcctcttatctcaactgcaaagaggccttcctctttcactaatcttcctcagcacagaccctttatgtgtgtcgggctgggggaaggtcagggctttcccttcccatgaggccatatctcaggctctctcggtggggagaaaccttg

SEQ ID NO: 381716 - DNA, 440 bp, Homo sapiens
gaattcccaacaaacaactctctgtccccctttttcgtctttaaaaacctgcctgtaataaaggccgaatagggctcctatccaagctgcttcagtccgagtcttccaggcagctgccctcacctcagctcaagtcaatctttcagctacattttatgcctcagcctcttccttttaggtggtcaccagcatccctgcagatgggagccagctgcggctgtgtcccgaggcaagggcaggcagtgccttcaggctgggtgagaggggacatctccaggcaggctcctgctctcaggccgagctggccagcatggctggaatgctgatgaggagagcaggagctggactcactgaatgctaatgagaggcagacagcacctccgtgcatggcaggcccgcgccaggccgctctgagggataccctggtcagtaccccagag

SEQ ID NO: 381717 - DNA, 194 bp, Homo sapiens
gtgaaagccaccactggaaaactgcctgaatgtctgctcatcttcatcgccaagaaaataactttaagatctaatgggctggacagttttgtaacagaagttactctgatggcctgttcctaccagtggaagctttactaacaatgtgttgtgttcatgccataaagccgacatgggacctgtgaactcttttc

SEQ ID NO: 381718 - DNA, 383 bp, Homo sapiens
gagagctgagaggctaaaactgggtgaagacttctgcagagaaaatatttttaaagtcataaaaccatgaaaataacaactactgtacgttttattttatagaaatcaagtagtatctaatagacaagggaagacattgatccataaactttttaaagaaaatttggtaatctcttaaagtatttgtatggctttgaatgggtgtgcttttctaactttgttttaatttttatgatacacttataattgtttcaaataggcatttgttcattttaaaactactagaagttacactgaagaaaagcattcaaaagaagacttttgaacaaaaaaattgttgaatgagtgaaatgcctgaagtagctcaatttaccaaacagaaa

SEQ ID NO: 381719 - DNA, 392 bp, Homo sapiens
gctagagtttctcaggaagaataaaggaataactccaggaaaaaatgtgtctgagataatgaacgtattcagtgttaaaaggcaggcaaatagaagaacatgttgcaataaagaaagtagaagaaaactctacaaaatggagctgtagaaaaagtagcaggtgtgtctcagagagaatgagtccattgttgagcagtttcaccccagtgttctacgaagcataaatgaggcctgggcatcaccaggcagctagcacagaagctcattgaaatcaagcagggttgggttcctactctcatgcagacaagtgtgcaaagcatccagccaaatatctgaatttgctttcaggtcaaggcacggatgttcttagataccagatggcccaatactga

SEQ ID NO: 381720 - DNA, 391 bp, Homo sapiens
agaatgttcagtaagatcccatcctgggaagaaaaccctatttaaaaatatatcatatagaatatataaaacatatacacatacagatatagactgtgtgtgttttctatttccatgtagcaaattaccccaaaactgagcagtgtaaaacaacaaaccttcattatcttacagtttcagaggctccaggatttggaagaagcccagtggggtggctgtggctcaggatctggcacgaggttgccgccaggacggcaacacctgcacgtgcgactgggctgggggatccgtttccaaggaagcttgctcacatggctgctggggagaggcctccagtcctcacaaggccattggtggaggctgcagctcctcacaggctattggcgggagg

SEQ ID NO: 381721 - DNA, 468 bp, Homo sapiens
tcggaaattaaaatgcccctgcagcaacctcaacgagttttcttttgctcttagcactctgacagccctaaacacagcacagtatcttccttcccacttctgtcagatacaaggactccaggagcgtgttagttctccttcattcactttcaggtttatgcagaactgaagatgccataattcagaagtgtctgtgtttggcgacggattttagtatcgacattaaactgagaacttccttctttccctgaaggttacccaacaagtgctaatcaaaacctctccatgttctgcctgatttttaccagcttgttcttatttggaccctctgaggcccactttaacaattctgatgtctttattttagaaactcttttacctaaattagatcatgactctctgggggtgtaaccaaattaaaatgttttgccacacagtaagagggtcacaatggaggaaaaaaaggaa

SEQ ID NO: 381722 - DNA, 407 bp, Homo sapiens
attgaattgtaagagttctttatgcattttggatattaggtccttctcagatatatatttgcaaaattttccccccattctgtttttggcttcactttcttgaagatgacttttgaagcacaaaagtttttaattgtgatgatgtccaatctattttttttctttcataacttgtctttttggttttgtaccttaagaaaccattgtctagggtgggcgcagtggctcacgcctgtaatcccagcactttgggaggccaaggtgggcagatcacctgaggtcaggagttctagaccagccttgccaacatggtgaaaccccatctctactgaaaatacaaaaattaacctggcgtggtggcaggcacctgtaatcccagctatttgggaggctaaggcaggagaatc

SEQ ID NO: 381723 - DNA, 640 bp, Homo sapiens
tttttttaagaggggctcctgctctgttaccctggctggagtgcagtggtgcaatcacagctcaccgcagctgtaaactcctgggcttaatcaatcctcagcctcccaattatctgagaccacagctatgtgccaccatgcccagataattaaaaaaaaaaaaaatctttttgtagatacagagtcttgctctgttgcccaggctggttcttgaactcctggcttggagagatcttcccatctcaggctcccaaagtgctggaatttaaggaggaagccactatgcctggccaaatattcacttttatatttaccaaattgatagcacaatttttttgtttttttgagatgcagtcttgctctgtcgccaggctggagtgcagtggcgcaatctcagctcactgcaacctccacctcccgggttcaagcaattctcctgtgatggcacaaattttaaaaaatcagagaaaatcaaattttgatgaggatgctacattacttgtgctctcttacacactactgatggaaatataaattagcatacctgctctgaaaataatttggccttctctaatgaagaaggaggatgtgcagacagactctgtgatacaagaattctaagtatatatatttaagaaac

SEQ ID NO: 381724 - DNA, 346 bp, Homo sapiens
gaggccttggaaataacccaaatgtccaataagggagaattgattaaattacatattatgaatcagtgatgtagataaatatctgacatgaaaatattttacagtgttgtgttagtagtaaaagcaggttttgaaacaatacatgaattaatgtcacaaaaagttattaatatataatatgcttaatattgtattctataatacctaggtattaggtagctttttcttgaaaaggaaggtagaaaaagtttttttgaagttgtcataacagtattagactgcatcatgagatactgtttccttctggcttttggtgaaggtatttgctttttactagttttgtaac

SEQ ID NO: 381725 - DNA, 282 bp, Homo sapiens
atgtcaaagataactttacaagagaccgcgtgaacatagatatataaaggagagcctagtgctctcaatgcccatatctgcaggcctcaaaattgcttatgaagtctagaaaccatggccatctgccagccggaggcagcatcaccacaatggaattcacagtcactctgttaagactttataaatacagtgagggtccaggagccaggaccttcaggcgcatgaggcttgtctggtctggtctggccgactgagcaaggaaaccctgtccttgaatgagga

SEQ ID NO: 381726 - DNA, 465 bp, Homo sapiens
tgtatttttagtagagacgggttttcaccgtgttagccaggatggtctggatctcctgacctcgtgatccgcccgcctcggcctcccaaagttctgggattacaggcgtgagctaccgtgcccggcgtccaaatttttttatatttcttgaaaaatatctgctaacaagagcacccatgcagttcacactatgtcattcgagggtcaattgcatttgtaactcctgtctctgacagtaacctgtctcctttcatgcttagtatgtagtaagtccttacttaacgtggtcaataggtcttggaactgagcttaagtgaaagacgtataataaaaccacttttaccataggctaactgacataaataagagtgacattcctatgatgtatttctggtcacagaaacatcactgaacttctaagtaaggacccaaaacacttgtaacaaacagtaaacattgaaatca

SEQ ID NO: 381727 - DNA, 1846 bp, Homo sapiens
gttaaaaatgaacattttcaggccccactcagacctgagtcagcgctcagtgggagcggagccccgcagtcacgttgtgaccagctcttcaggtgttaggccggttgtcccttcgcgtccttcatagaatctgatccaggaccacacgttgcatttaattggcgtgctctttagtttcctttcttctgtacccccattttcaaggggtgcaggcaagttatcttgagaatgttcgtcaatgtgatgtcgcagccccaccgttgggagtgtacagatggcaacatattttcacacagtgtgtttatgaatgttcagagcaagccttcataatggccaaaaacgaaataattcacagtacatgaactgctagtaaatactatagattaagagatatttagaatttaaaaggaataaatgatatctactacactgtgtatgaacattgaaaacactgtgctaagtgaacgaagcaagacacaagactacgtattattatatgtaattccactcggataaactgtcctttgaaaggcacatttagagacacagagcgggtcaggggctgcacagggctggaggtggcagcgggagcttcggagaagtggagcgacccaaaaccggattgtgggggtcgctgcggaactctgtaaatttgctaaaatcattggattgtacatttaaagggataatcttatagtaagtcaagtacacctcaattaagctgttcttaaaaattgactataaactaacacagcatctcagttagtgccctcagaactggagttgggacccagtagagaggtggaaagaagtgaggcctaagtgcagtgagtttgtttcaaataggtcaatcatcgacgccgttatgttctggaagtaatgaataataaagacgtataaacttaaacgtgttagtgaataccatcactcaatgatatcagtagaaatgataatcttccaaattgttggagagaaaaaataaccatgcaaataaaacaggacaaacagaaccaactctgtttaccagatatggggggtgggggtgggaagtaacattcagaatcgtaaaatagaaaacatagaatgagagaagcctgaatgttacaacagtgagtgcggagaaactgacgtaatgaaagaaaaagactttgagacagggccaggaaaacgctgccgcctacaagcaacacacctaaacggagtgacccagaagggtttagtggcacgtccaggttcgtgtgtgaagaaatagatgggtccccttcagagtttgaagcatgacccatgtgaccagataggagaatctctcgagcgcagggaaagctgggtgctgcctgtgtggtggcagagtctggagggcttgctgtgctggggactaaagagcaggaggactgcaggtgaggcgtgcagacgactttttatcggtaaagattttaatgccatttggtaattttgtcattaacatttattatgatagacaaggcttctagtatctttgtttcaaaactggtttgttccaaagctagagataagaaaattatgcatctcatctagtttcataaaaggaagtttggaggacctgctcccatcaaaacactggaagatgcagagacttttgtcagctcctggctaattagataatgctaatcatgtgagtagcaataaaaattcgaagtcctgccagacgtaggttctagacattctgacagccaactaaagagccagcaataacgtgtgcctaggagtgcgagagccttctccacctccgtgatgcctccgggttcgtgcatggccacttgtgctgcgtgagcgtcgtaggtttaggggaacagaagtagagggattt

SEQ ID NO: 381728 - DNA, 284 bp, Homo sapiens
cttcagtgtcctgagagagattattgggcagtctttaataatgaaaactttaccttgaattacacacacacacacacacacacacacacacacacactcacacacacacacaaagagagagagagagagagagagacagagagagaggagagagtcaagttctagggtgttaagtccaacattatcagctggggcttgggaaccttcaaggttttatgaatgatgaggtctatttgctttcaatactacaagggggaggaatctggatatttatccatgtttta

SEQ ID NO: 381729 - DNA, 1029 bp, Homo sapiens
ctttgcagggccagtgaagcagatactatcaatatgttctactctgtcacattgaattcctttatcattttgaggcacaccagagttcctgatgtcttttctctctcaacactcagcacctcagcctctttgttggagggctgtcctgagactgctagattgttctccttgagtgtgcagtactggaagtgcttggagaaatccttaccagtgactgacacacagcaagggttgcttctggaggacctgacctaagattggcatcttactcagtccagaaggtcagggaagacttcttggaagacatgccatctaaaacaatgactgatggaggaatggaatcatccaagtgtacggggagtggatggaagacaagagcattctaggaaccaaacaagatgctccacaacacccagagtctggaacatccgctactactctatttctgaaggtgccttcagaagattaccacagccttcatcttgtcaagaccccaaaatggtggctttcatcataatcttgcccttcaaacatcgtctctcccccaaaatggcccatttctctctcagatgcacttctagctgattcccacctctatgcatttactcatttgccccttaggccagtttctgtttctacatgcatcttaaaaaattaaaacctccttctcttctccctttccctatggatgtgggctacagtagcttgttcctacgtgcccttgggctcctcctgtaacttcacgctttgcctctttaaatagattgttggtccctcaggggatgtttttatgattcatacttaaaaactgctaaccacaatgtaagaactttctcattttttccctctttactgttaatttaaaacttttgttaccatcacttttatttaaaaatgaaaaatatagaaaacagatgacaaaaataaaaagaaggaaaaaagaaccccaaccgaagaaacgaaaacaagaagtcacgccggccaccttatatacaacaaaaaatggagcctcattggcctaaagcggag

SEQ ID NO: 381730 - DNA, 573 bp, Homo sapiens
ctaggttacatcgtgaggtcagaagatggtaagatcacccagatattcactctgcttcctactggggctccttctcattcctggccctctccccgccggcctgctcttctttccctcagctgtgagctgggtgcacacagctgttgtgtcttgttcacacctatattcctgacagttagcatcatgcctggctgagagttggtgcatatcttaaatgttttcttgaaatttcaagtaagacaaaaaatatcaaataccaaatagtgtataaatttggaagattagattcactgttgcacctgtcatggtggaatttgtcccatgtggctcctgtgggtcaggaatacattgtatcaaaaaatgcagatcctggctaacaaggtgaaaccccgtctctattaaaaatacaaaaaattagccggctgtggtggcgggtgcctgtagtcccagatactcgggaggctgaggcaggagaatggcgtgaacctgggaggtggagcttgcagtgagctgagatcacaccactgcactccaacctgggcaacagagctagtcttaaaaaaaaaaaaaaaa

SEQ ID NO: 381731 - DNA, 431 bp, Homo sapiens
ctaggttacatcgtgaggtcagaagatggtaagatcacccagatattcactctgcttcctactggggctccttctcattcctggccctctccccgccggcctgctcttctttccctcagctgtgagctgggtgcacacagctgttgtgtcttgttcacacctgtaatctcagcacttcgggaggccaaggtgggcagatcacttgaggtcaggagttcaagaccatcctggctaacaaggtgaaaccccgtctctattaaaaatacaaaaaattagccggctgtggtggcgggtgcctgtagtcccagatactcgggaggctgaggcaggagaatggcgtgaacctgggaggtggagcttgcagtgagctgagatcacaccactgcactccaacctgggcaacagagctagtcttaaaaaaaaaaaaaaaa

SEQ ID NO: 381732 - DNA, 404 bp, Homo sapiens
gacacaaactagaaaatttagcggttatttttgcttagctaaaatgtctacataaggcaaagaaaacacatctcttgtgattcatgatttgtaattttcataatttacattagtaactatttgtaacccagttgctttttgagattacaaaacgatacttcaatataaccagtaacagtgtgtacaacacctacaaacagaggttaaaatatagtgaaatatttagaattttttgactaaattaaaagatatataaatattttaggtttggagttttaaaagaagctcgtttttactttttagaaaactaacgcataagctatgacaataatttcactatgtgtgctttgcattccaggatagccttttgtgtcaaaaagcagcaagataggaattaatgctaa

SEQ ID NO: 381733 - DNA, 440 bp, Homo sapiens
gtctttctctcaagtaggccaggcacagtggctcacgtctgtaatcccaacactttgggaggccaaggcaggaggatcagttgagcccaggagtttaagaccagcctggacaacatagtaagaccctgtctctacaaaaatagaaaaattagccaggtgtgtgcctgtagtcccaggtgcttgggaggctgggtgggaggtggccaagaggttgaggctgcagtgagccatgattttgccactgcacttcagcctgggcaacagagcaagatcctgtctcaaaaaaaaaatactgagaatagacacatgaactattcagaaattcaaaagaggcagagcaggctggctcatgcctgtaatttgagcactgtgggagcccgaggtgggggcatcgcttcagttgaggagttctagagtagcctgggcaacacagagaaacc

SEQ ID NO: 381734 - DNA, 4136 bp, Homo sapiens
cgtcgcgcgccgtgtggggcgcgcacgcagggctgggcgtgagggggcgtgcgcgtgcgcaggcgacgcgccgaggtactaggcagagccgtggaaccgccgccaggtcgctgttggtccacgccgcccgtcgcgccgcccgcccgctcagcgtccgccgccgccatgggagtgcaggtggaaaccatctccccaggagacgggcgcaccttccccaagcgcggccagacctgcgtggtgcactacaccgggatgcttgaagatggaaagaaatttgattcctcccgggacagaaacaagccctttaagtttatgctaggcaagcaggaggtgatccgaggctgggaagaaggggttgcccagatgagtgtgggtcagagagccaaactgactatatctccagattatgcctatggtgccactgggcacccaggcatcatcccaccacatgccactctcgtcttcgatgtggagcttctaaaactggaatgacaggaatggcctcctcccttagctccctgttcttggatctgccatggagggatctggtgcctccagacatgtgcacatgaatccatatggagcttttcctgatgttccactccactttgtatagacatctgccctgactgaatgtgttctgtcactcagctttgcttccgacacctctgtttcctcttcccctttctcctcgtatgtgtgtttacctaaactatatgccataaacctcaagttactcattttattttgttttcattttggggtgaagattcagtttcagtcttttggatataggtttccaattaagtacatggtcaagtattaacagcacaagtggtaggttaacattagaataggaattggtgtggggggggggtttgcaagaatattttattttaattttttggatgaaatttttatctattatatattaaacattcttgctgctgcgctgcaaagccatagcagatttgaggcgctgttgaggactgaattactctccaagttgagagatgtctttgggttaaattaaaagccctacctaaaactgaggtggggatggggagagcctttgcctccaccattcccacccaccctccccttaaaccctctgcctttgaaagtagatcatgttcactgcaatgctggacactacaggtatctgtccctgggccagcagggacctctgaagccttctttgtggccttttttttttttcatcctgtggtttttctaatggactttcaggaattttgtaatctcataactttccaagctccaccacttcctaaatcttaagaactttaattgacagtttcaattgaaggtgctgtttgtagacttaacacccagtgaaagcccagccatcatgacaaatccttgaatgttctcttaagaaaatgatgctggtcatcgcagcttcagcatctcctgttttttgatgcttggctccctctgctgatctcagtttcctggcttttcctccctcagccccttctcacccctttgctgtcctgtgtagtgatttggtgagaaatcgttgctgcacccttcccccagcaccatttatgagtctcaagttttattattgcaataaaagtgctttatgccggcttttctcaaaaaaaaaaaaaaaaaaaaaaactcgagactagttctccgctgctccagcctctggggcgcattccaaccttccagcctgcgacctgcggagaaaaaaaaattacttattttcttgccccatacataccttgaggcgagcaaaaaaattaaattttaaccatgagggaaatcgtgcacatccaggctggtcagtgtggcaaccagatcggtgccaagttctgggaggtgatcagtgatgaacatggcatcgaccccaccggcacctaccacggggacagcgacctgcagctggaccgcatctctgtgtactacaatgaagccacaggtggcaaatatgttcctcgtgccatcctggtggatctagaacctgggaccatggactctgttcgctcaggtccttttggccagatctttagaccagacaactttgtatttggtcagtctggggcaggtaacaactgggccaaaggccactacacagagggcgccgagctggttgattctgtcctggatgtggtacggaaggaggcagagagctgtgactgcctgcagggcttccagctgacccactcactgggcgggggcacaggctctggaatgggcactctccttatcagcaagatccgagaagaataccctgatcgcatcatgaataccttcagtgtggtgccttcacccaaagtgtctgacaccgtggtcgagccctacaatgccaccctctccgtccatcagttggtagagaatactgatgagacctattgcattgacaacgaggccctctatgatatctgcttccgcactctgaagctgaccacaccaacctacggggatctgaaccaccttgtctcagccaccatgagtggtgtcaccacctgcctccgtttccctggccagctcaatgctgacctccgcaagttggcagtcaacatggtccccttcccacgtctccatttctttatgcctggctttgcccctctcaccagccgtggaagccagcagtatcgagctctcacagtgccggaactcacccagcaggtcttcgatgccaagaacatgatggctgcctgtgacccccgccacggccgatacctcaccgtggctgctgtcttccgtggtcggatgtccatgaaggaggtcgatgagcagatgcttaacgtgcagaacaagaacagcagctactttgtggaatggatccccaacaatgtcaagacagccgtctgtgacatcccacctcgtggcctcaagatggcagtcaccttcattggcaatagcacagccatccaggagctcttcaagcgcatctcggagcagttcactgccatgttccgccggaaggccttcctccactggtacacaggcgagggcatggacgagatggagttcaccgaggctgagagcaacatgaacgacctcgtctctgagtatcagcagtaccaggatgccaccgcagaagaggaggaggatttcggtgaggaggccgaagaggaggcctaaggcagagcccccatcacctcaggcttctcagttcccttagccgtcttactcaactgcccctttcctctccctcagaatttgtgtttgctgcctctatcttgttttttgttttttcttctggggggggtctagaacagtgcctggcacatagtaggcgctcaataaatacttgtttgttgaatgtctcctctctctttccactctgggaaacctaggtttctgccattctgggtgaccctgtatttctttctggtgcccattccatttgtccagttaatacttcctcttaaaaatctccaagaagctgggtctccagatcccatttagaaccaaccaggtgctgaaaacacatgtagataatggccatcatcctaagcccaaagtagaaaatggtagaaggtagtgggtagaagtcactatataaggaaggggatgggattttccattctaaaagttttggagagggaaatccaggctattaaagtcactaaatttctaagtatgtccatttcccatctcagcttcaagggaggtgtcagcagtattatctccactttcaatctccctccaagctctactctggaggagtctgtcccactctgtcaagtggaatccttccctttccaactctacctccctcactcagctcctttcccctgatcagagaaagggatcaagggggttgggaggggggaaagagaccagccttggtccctaagcctccagaaacgtcttcttaatccccaccttttcttactcccaaaaaagaatgaacacccctgactctggagtggtgtatactgccacatcagtgtttgagtcagtccccagaggagaggggaaccctcctccatcttttttgcaacatctcatttcttccttttgctgttgcttcccccctcacacacttggttttgttctatcctacatttgagatttctattttatgttgaacttgctgctttttttcatattgaaaagatgacatcgccccaagagccaaaaataaatgggaattg

SEQ ID NO: 381735 - DNA, 406 bp, Homo sapiens
tttgtagacttaacaccttcaattgaaactgtcaattaaagttcttaagatttaggaagtggtggagcttggaaagttatgagattacaaaatcttaagaactttaattgacagtttcaattgaaggtgctgtttgtagacttaacacccagtgaaagcccagccatcatgacaaatccttgaatgttctcttaagaaaatgatgctggtcatcgcagcttcagcatctcctgttttttgatgcttggctccctctgctgatctcagtttcctggcttttcctccctcagccccttctcacccctttgctgtcctgtgtagtgatttggtgagaaatcgttgctgcacccttcccccagcacccggatttgccgagtgagcgtggggtcctctagagtcacctacg

SEQ ID NO: 381736 - DNA, 308 bp, Homo sapiens
cctaggttttcgcagtttcaatagcagtttcaattgaaggtgctgtttgtagacttaacacccagtgaaagcccagccatcatgacaaatccttgaatgttctcttaagaaaatgatgctggtcatcgcagcttcagcatctcctgttttttgatgcttggctccctctgctgatctcagtttcctggcttttcctccctcagccccttctcacccctttgctgtcctgtgtagtgatttggtgagaaatcgttgctgcacccttcccccagcgcagcaatgtgctattgaaatcttctaaaactagg

SEQ ID NO: 381737 - DNA, 407 bp, Homo sapiens
cttgcgaagctaattttaaagaactttttctcttcatcattatacgcaatcgccagtcagtgctatcggggattctccacttccctaatcataaagaggccattggcagtctcaatccaacctttcgtttgagcacttggcaaccagtgtcagcccagcaatcatgacaaatccttgaatgttctcttaagaaaatgatgctggtcatcgcagcttcagcatctcctgttttttgatgcttggctccctctgctgatctcagtttcctggcttttcctccctcagccccttctcacccctttgctgtcctgtgtagtgatttggtgagaaatcgttgctgcacccttcccccagcaccatttatgagtctcaagttttattattgcaataaaagtgctttatgccgg

SEQ ID NO: 381738 - DNA, 147 bp, Homo sapiens
cgttgctgcacccttcccccagcaccgatttctcaccaaatcactacacaggacagcaaaggggtgagaaatcgttgctgcacccttcccccagcaccatttatgagtctcaagttttattattgcaataaaagtgctttatgccgg

SEQ ID NO: 381739 - DNA, 1835 bp, Homo sapiens
cgtcgcgcgccgtgtggggcgcgcacgcagggctgggcgtgagggggcgtgcgcgtgcgcaggcgacgcgccgaggtactaggcagagccgtggaaccgccgccaggtcgctgttggtccacgccgcccgtcgcgccgcccgcccgctcagcgtccgccgccgccatgggagtgcaggtggaaaccatctccccaggagacgggcgcaccttccccaagcgcggccagacctgcgtggtgcactacaccgggatgcttgaagatggaaagaaatttgattcctcccgggacagaaacaagccctttaagtttatgctaggcaagcaggaggtgatccgaggctgggaagaaggggttgcccagatgagtgtgggtcagagagccaaactgactatatctccagattatgcctatggtgccactgggcacccaggcatcatcccaccacatgccactctcgtcttcgatgtggagcttctaaaactggaatgacaggaatggcctcctcccttagctccctgttcttggatctgccatggagggatctggtgcctccagacatgtgcacatgaatccatatggagcttttcctgatgttccactccactttgtatagacatctgccctgactgaatgtgttctgtcactcagctttgcttccgacacctctgtttcctcttcccctttctcctcgtatgtgtgtttacctaaactatatgccataaacctcaagttactcattttattttgttttcattttggggtgaagattcagtttcagtcttttggatataggtttccaattaagtacatggtcaagtattaacagcacaagtggtaggttaacattagaataggaattggtgtggggggggggtttgcaagaatattttattttaattttttggatgaaatttttatctattatatattaaacattcttgctgctgcgctgcaaagccatagcagatttgaggcgctgttgaggactgaattactctccaagttgagagatgtctttgggttaaattaaaagccctacctaaaactgaggtggggatggggagagcctttgcctccaccattcccacccaccctccccttaaaccctctgcctttgaaagtagatcatgttcactgcaatgctggacactacaggtatctgtccctgggccagcagggacctctgaagccttctttgtggccttttttttttttcatcctgtggtttttctaatggactttcaggaattttgtaatctcataactttccaagctccaccacttcctaaatcttaagaactttaattgacagtttcaattgaaggtgctgtttgtagacttaacacccagtgaaagcccagccatcatgacaaatccttgaatgttctcttaagaaaatgatgctggtcatcgcagcttcagcatctcctgttttttgatgcttggctccctctgctgatctcagtttcctggcttttcctccctcagccccttctcacccctttgctgtcctgtgtagtgatttggtgagaaatcgttgctgcacccttcccccagcaccatttatgagtctcaagttttattattgcaataaaagtgctttatgccggcttttctcaaaaaaaaaaaaaaaaaaaaaaaaaaaaaaaaaaaaaaaaaaaaaaagaaaaaaaaaaaagaagaaaaaaaaagaaaaaaaaaaaagaaaaaaaaaaaaaaagtcgggaggacaacaagaaatccatccaacgcaagagaacagagacggcactgcgagcacaccatagctacccgcggcgtaccactctagcgcgtctcacagacgaggcgag

SEQ ID NO: 381740 - DNA, 1834 bp, Homo sapiens
cgtcgcgcgccgtgtggggcgcgcacgcagggctgggcgtgagggggcgtgcgcgtgcgcaggcgacgcgccgaggtactaggcagagccgtggaaccgccgccaggtcgctgttggtccacgccgcccgtcgcgccgcccgcccgctcagcgtccgccgccgccatgggagtgcaggtggaaaccatctccccaggagacgggcgcaccttccccaagcgcggccagacctgcgtggtgcactacaccgggatgcttgaagatggaaagaaatttgattcctcccgggacagaaacaagccctttaagtttatgctaggcaagcaggaggtgatccgaggctgggaagaaggggttgcccagatgagtgtgggtcagagagccaaactgactatatctccagattatgcctatggtgccactgggcacccaggcatcatcccaccacatgccactctcgtcttcgatgtggagcttctaaaactggaatgacaggaatggcctcctcccttagctccctgttcttggatctgccatggagggatctggtgcctccagacatgtgcacatgaatccatatggagcttttcctgatgttccactccactttgtatagacatctgccctgactgaatgtgttctgtcactcagctttgcttccgacacctctgtttcctcttcccctttctcctcgtatgtgtgtttacctaaactatatgccataaacctcaagttactcattttattttgttttcattttggggtgaagattcagtttcagtcttttggatataggtttccaattaagtacatggtcaagtattaacagcacaagtggtaggttaacattagaataggaattggtgttggggggggggtttgcaagaatatttaatttaattttttggatgaaattttatctattatatattaaacattcttgctgctgcgctgcaaagccatagcagatttgaggcgctgttgaggactgaattactctccaagttgagagatgtctttgggttaaattaaaagccctacctaaaactgaggtggggatggggagagcctttgcctccaccattcccacccaccctccccttaaaccctctgcctttgaaagtagatcatgttcactgcaatgctggacactacaggtatctgtccctgggccagcagggacctctgaagccttctttgtggccttttttttttttcatcctgtggtttttctaatggactttcaggaattttgtaatctcataactttccaagctccaccacttcctaaatcttaagaactttaattgacagtttcaattgaaggtgctgtttgtagacttaacacccagtgaaagcccagccatcatgacaaatccttgaatgttctcttaagaaaatgatgctggtcatcgcagcttcagcatctcctgttttttgatgcttggctccctctgctgatctcagtttcctggcttttcctccctcagccccttctcacccctttgctgtcctgtgtagtgatttggtgagaaatcgttgctgcacccttcccccagcaccatttatgagtctcaagttttattattgcaataaaagtgctttatgccggcttttctcaaaaaaaaaaaaaaaaaaaaaaaaaaaaaaaaaaaaaaaaaaaaaaagaaaaaaaaaaaagaagaaaaaaaaagaaaaaaaaaaaagaaaaaaaaaaaaaaagtcgggaggacaacaagaaatccatccaacgcaagagaacagagacggcactgcgagcacaccatagctacccgcggcgtaccactctagcgcgtctcacagacgaggcgag

SEQ ID NO: 381741 - DNA, 1613 bp, Homo sapiens
cgtcgcgcgccgtgtggggcgcgcacgcagggctgggcgtgagggggcgtgcgcgtgcgcaggcgacgcgccgaggtactaggcagagccgtggaaccgccgccaggtcgctgttggtccacgccgcccgtcgcgccgcccgcccgctcagcgtccgccgccgccatgggagtgcaggtggaaaccatctccccaggagacgggcgcaccttccccaagcgcggccagacctgcgtggtgcactacaccgggatgcttgaagatggaaagaaatttgattcctcccgggacagaaacaagccctttaagtttatgctaggcaagcaggaggtgatccgaggctgggaagaaggggttgcccagatgagtgtgggtcagagagccaaactgactatatctccagattatgcctatggtgccactgggcacccaggcatcatcccaccacatgccactctcgtcttcgatgtggagcttctaaaactggaatgacaggaatggcctcctcccttagctccctgttcttggatctgccatggagggatctggtgcctccagacatgtgcacatgaatccatatggagcttttcctgatgttccactccactttgtatagacatctgccctgactgaatgtgttctgtcactcagctttgcttccgacacctctgtttcctcttcccctttctcctcgtatgtgtgtttacctaaactatatgccataaacctcaagttactcattttattttgttttcattttggggtgaagattcagtttcagtcttttggatataggtttccaattaagtacatggtcaagtattaacagcacaagtggtaggttaacattagaataggaattggtgtggggggggggtttgcaagaatattttattttaattttttggatgaaatttttatctattatatattaaacattcttgctgctgcgctgcaaagccatagcagatttgaggcgctgttgaggactgaattactctccaagttgagagatgtctttgggttaaattaaaagccctacctaaaactgaggtggggatggggagagcctttgcctccaccattcccacccaccctccccttaaaccctctgcctttgaaagtagatcatgttcactgcaatgctggacactacaggtatctgtccctgggccagcagggacctctgaagccttctttgtggccttttttttttttcatcctgtggtttttctaatggactttcaggaattttgtaatctcataactttccaagctccaccacttcctaaatcttaagaactttaattgacagtttcaattgaaggtgctgtttgtagacttaacacccagtgaaagcccagccatcatgacaaatccttgaatgttctcttaagaaaatgatgctggtcatcgcagcttcagcatctcctgttttttgatgcttggctccctctgctgatctcagtttcctggcttttcctccctcagccccttctcacccctttgctgtcctgtgtagtgatttggtgagaaatcgttgctgcacccttcccccagcaccatttatgagtctcaagttttattattgcaataaaagtgctttatgccgg

SEQ ID NO: 381742 - DNA, 1691 bp, Homo sapiens
cgtcgcgcgccgtgtggggcgcgcacgcagggctgggcgtgagggggcgtgcgcgtgcgcaggcgacgcgccgaggtactaggcagagccgtggaaccgccgccaggtcgctgttggtccacgccgcccgtcgcgccgcccgcccgctcagcgtccgccgccgccatgggagtgcaggtggaaaccatctccccaggagacgggcgcaccttccccaagcgcggccagacctgcgtggtgcactacaccgggatgcttgaagatggaaagaaatttgattcctcccgggacagaaacaagccctttaagtttatgctaggcaagcaggaggtgatccgaggctgggaagaaggggttgcccagatgagtgtgggtcagagagccaaactgactatatctccagattatgcctatggtgccactgggcacccaggcatcatcccaccacatgccactctcgtcttcgatgtggagcttctaaaactggaatgacaggaatggcctcctcccttagctccctgttcttggatctgccatggagggatctggtgcctccagacatgtgcacatgaatccatatggagcttttcctgatgttccactccactttgtatagacatctgccctgactgaatgtgttctgtcactcagctttgcttccgacacctctgtttcctcttcccctttctcctcgtatgtgtgtttacctaaactatatgccataaacctcaagttactcattttattttgttttcattttggggtgaagattcagtttcagtcttttggatataggtttccaattaagtacatggtcaagtattaacagcacaagtggtaggttaacattagaataggaattggtgtggggggggggtttgcaagaatattttattttaattttttggatgaaatttttatctattatatattaaacattcttgctgctgcgctgcaaagccatagcagatttgaggcgctgttgaggactgaattactctccaagttgagagatgtctttgggttaaattaaaagccctacctaaaactgaggtggggatggggagagcctttgcctccaccattcccacccaccctccccttaaaccctctgcctttgaaagtagatcatgttcactgcaatgctggacactacaggtatctgtccctgggccagcagggacctctgaagccttctttgtggccttttttttttttcatcctgtggtttttctaatggactttcaggaattttgtaatctcataactttccaagctccaccacttcctaaatcttaagaactttaattgacagtttcaattgaaggtgctgtttgtagacttaacacccagtgaaagcccagccatcatgacaaatccttgaatgttctcttaagaaaatgatgctggtcatcgcagcttcagcatctcctgttttttgatgcttggctccctctgctgatctcagtttcctggcttttcctccctcagccccttctcacccctttgctgtcctgtgtagtgatttggtgagaaatcgttgctgcacccttcccccagcaccatttatgagtctcaagttttattattgcaataaaagtgctttatgccgggttcttccgctacacaccacatcacaactctgcggttttctgtggcgaaaggttgctgggctgtcttgctttctgcct

SEQ ID NO: 381743 - DNA, 1607 bp, Homo sapiens
cgtcgcgcgccgtgtggggcgcgcacgcagggctgggcgtgagggggcgtgcgcgtgcgcaggcgacgcgccgaggtactaggcagagccgtggaaccgccgccaggtcgctgttggtccacgccgcccgtcgcgccgcccgcccgctcagcgtccgccgccgccatgggagtgcaggtggaaaccatctccccaggagacgggcgcaccttccccaagcgcggccagacctgcgtggtgcactacaccgggatgcttgaagatggaaagaaatttgattcctcccgggacagaaacaagccctttaagtttatgctaggcaagcaggaggtgatccgaggctgggaagaaggggttgcccagatgagtgtgggtcagagagccaaactgactatatctccagattatgcctatggtgccactgggcacccaggcatcatcccaccacatgccactctcgtcttcgatgtggagcttctaaaactggaatgacaggaatggcctcctcccttagctccctgttcttggatctgccatggagggatctggtgcctccagacatgtgcacatgaatccatatggagcttttcctgatgttccactccactttgtatagacatctgccctgactgaatgtgttctgtcactcagctttgcttccgacacctctgtttcctcttcccctttctcctcgtatgtgtgtttacctaaactatatgccataaacctcaagttactcattttattttgttttcattttggggtgaagattcagtttcagtcttttggatataggtttccaattaagtacatggtcaagtattaacagcacaagtggtaggttaacattagaataggaattggtgtggggggggggtttgcaagaatattttattttaattttttggatgaaatttttatctattatatattaaacattcttgctgctgcgctgcaaagccatagcagatttgaggcgctgttgaggactgaattactctccaagttgagagatgtctttgggttaaattaaaagccctacctaaaactgaggtggggatggggagagcctttgcctccaccattcccacccaccctccccttaaaccctctgcctttgaaagtagatcatgttcactgcaatgctggacactacaggtatctgtccctgggccagcagggacctctgaagccttctttgtggccttttttttttttcatcctgtggtttttctaatggactttcaggaattttgtaatctcataactttccaagctccaccacttcctaaatcttaagaactttaattgacagtttcaattgaaggtgctgtttgtagacttaacacccagtgaaagcccagccatcatgacaaatccttgaatgttctcttaagaaaatgatgctggtcatcgcagcttcagcatctcctgttttttgatgcttggctccctctgctgatctcagtttcctggcttttcctccctcagccccttctcacccctttgctgtcctgtgtagtgatttggtgagaaatcgttgctgcacccttcccccagcacccggatttgccgagtgagcgtggggtcctctagagtcacctacg

SEQ ID NO: 381744 - DNA, 2889 bp, Homo sapiens
cgtcgcgcgccgtgtggggcgcgcacgcagggctgggcgtgagggggcgtgcgcgtgcgcaggcgacgcgccgaggtactaggcagagccgtggaaccgccgccaggtcgctgttggtccacgccgcccgtcgcgccgcccgcccgctcagcgtccgccgccgccatgggagtgcaggtggaaaccatctccccaggagacgggcgcaccttccccaagcgcggccagacctgcgtggtgcactacaccgggatgcttgaagatggaaagaaatttgattcctcccgggacagaaacaagccctttaagtttatgctaggcaagcaggaggtgatccgaggctgggaagaaggggttgcccagatgagtgtgggtcagagagccaaactgactatatctccagattatgcctatggtgccactgggcacccaggcatcatcccaccacatgccactctcgtcttcgatgtggagcttctaaaactggaatgacaggaatggcctcctcccttagctccctgttcttgggtaaggaaatggaatactgaagggcccttcactgcctttgctcctcccatgttatgcccagcgtttgatgggtagcagagagaacaaaaaacaccacaaggctatttttccccctgcattctttctgtattgagtatcctttcagtgttattagtgtatgctttgaatgtaaaaattggtcaccctaaggaaaggaattggcatgtgtatgttcccagttcaactcatggagatggcagctgtttaaatgtttttctatgtagtttataaattaaaactgaattgaggactatggaaatgtaggccaaatttgtagtgccaacattttagttctttggaaataagactcttaatgaatgactttgttctaccctgtgtttctagaagctagagggggaaaaaaaaagccctttggatatgaatatcatgtcctagcttctgcggctctctcttcactgtggtttgtggttactgcctattagatggtatgagggaggcattcctgcatcggtccacctgctcagggtccacacccaggacacttgaggcccccaggccagcttatcagtgagtgaagtggaaaaatgaagccagaggatgcttgtgaagttgaaaggatgctcttagatcagacagttctaggaagggatcttaggggcctctgcatcagctttattgtgcaacagtaaggaaacagggccagagagaaaggccttactcaaggtcacatccaggcagtggcaaagtaggaccagagcccctgtttgttgattttcccctcttccaccctcatttcttaggaactaaactcagtatcctagtagcacgtaacttttcatgtaagtgttagaatcattaagtacatgaatgctactggcttccttccaactggccccagacctttttatttgctcccctcctgccataggaaccagagggtcacagccaaggcctgggtgaggacacttttgtttgaaagccacaacaaatggctgccatcctatttgtgatggcagtcagagctacttgtaacctggtcctgttgtgcacatctatctgccatggagggatctggtgcctccagacatgtgcacatgaatccatatggagcttttcctgatgttccactccactttgtatagacatctgccctgactgaatgtgttctgtcactcagctttgcttccgacacctctgtttcctcttcccctttctcctcgtatgtgtgtttacctaaactatatgccataaacctcaagttactcattttattttgttttcattttggggtgaagattcagtttcagtcttttggatataggtttccaattaagtacatggtcaagtattaacagcacaagtggtaggttaacattagaataggaattggtgtggggggggggtttgcaagaatattttattttaattttttggatgaaatttttatctattatatattaaacattcttgctgctgcgctgcaaagccatagcagatttgaggcgctgttgaggactgaattactctccaagttgagagatgtctttgggttaaattaaaagccctacctaaaactgaggtggggatggggagagcctttgcctccaccattcccacccaccctccccttaaaccctctgcctttgaaagtagatcatgttcactgcaatgctggacactacaggtatctgtccctgggccagcagggacctctgaagccttctttgtggccttttttttttttcatcctgtggtttttctaatggactttcaggaattttgtaatctcataactttccaagctccaccacttcctaaatcttaagaactttaattgacagtttcaattgaaggtgctgtttgtagacttaacacccagtgaaagcccagccatcatgacaaatccttgaatgttctcttaagaaaatgatgctggtcatcgcagcttcagcatctcctgttttttgatgcttggctccctctgctgatctcagtttcctggcttttcctccctcagccccttctcacccctttgctgtcctgtgtagtgatttggtgagaaatcgttgctgcacccttcccccagcaccatttatgagtctcaagttttattattgcaataaaagtgctttatgccggcttttctcaaaaaaaaaaaaaaaaaaaaaaaaaaaaaaaaaaaaaaaaaaaaaaagaaaaaaaaaaaagaagaaaaaaaaagaaaaaaaaaaaagaaaaaaaaaaaaaaagtcgggaggacaacaagaaatccatccaacgcaagagaacagagacggcactgcgagcacaccatagctacccgcggcgtaccactctagcgcgtctcacagacgaggcgag

SEQ ID NO: 381745 - DNA, 1502 bp, Homo sapiens
aggagaaagtttgtttcacctgggacccagcccaagtctttctggctgtctccagctggaacagaagtggcttggtctcagactgctcagctgttggggaagggatttggcgtggcagatggcatcgtggctgtcgccactgcacacaaagaacactgagttgctggaaactcacagattttctgtccccaacagatctgccatggagggatctggtgcctccagacatgtgcacatgaatccatatggagcttttcctgatgttccactccactttgtatagacatctgccctgactgaatgtgttctgtcactcagctttgcttccgacacctctgtttcctcttcccctttctcctcgtatgtgtgtttacctaaactatatgccataaacctcaagttactcattttattttgttttcattttggggtgaagattcagtttcagtcttttggatataggtttccaattaagtacatggtcaagtattaacagcacaagtggtaggttaacattagaataggaattggtgtggggggggggtttgcaagaatattttattttaattttttggatgaaatttttatctattatatattaaacattcttgctgctgcgctgcaaagccatagcagatttgaggcgctgttgaggactgaattactctccaagttgagagatgtctttgggttaaattaaaagccctacctaaaactgaggtggggatggggagagcctttgcctccaccattcccacccaccctccccttaaaccctctgcctttgaaagtagatcatgttcactgcaatgctggacactacaggtatctgtccctgggccagcagggacctctgaagccttctttgtggccttttttttttttcatcctgtggtttttctaatggactttcaggaattttgtaatctcataactttccaagctccaccacttcctaaatcttaagaactttaattgacagtttcaattgaaggtgctgtttgtagacttaacacccagtgaaagcccagccatcatgacaaatccttgaatgttctcttaagaaaatgatgctggtcatcgcagcttcagcatctcctgttttttgatgcttggctccctctgctgatctcagtttcctggcttttcctccctcagccccttctcacccctttgctgtcctgtgtagtgatttggtgagaaatcgttgctgcacccttcccccagcaccatttatgagtctcaagttttattattgcaataaaagtgctttatgccggcttttctcaaaaaaaaaaaaaaaaaaaaaaaaaaaaaaaaaaaaaaaaaaaaaaagaaaaaaaaaaaagaagaaaaaaaaagaaaaaaaaaaaagaaaaaaaaaaaaaaagtcgggaggacaacaagaaatccatccaacgcaagagaacagagacggcactgcgagcacaccatagctacccgcggcgtaccactctagcgcgtctcacagacgaggcgag

SEQ ID NO: 381746 - DNA, 1961 bp, Homo sapiens
  misc_feature (1007)..(1007): n is a, c, g, or t
  misc_feature (1010)..(1010): n is a, c, g, or t
  misc_feature (1018)..(1018): n is a, c, g, or t
  misc_feature (1027)..(1027): n is a, c, g, or t
  misc_feature (1030)..(1032): n is a, c, g, or t
  misc_feature (1039)..(1039): n is a, c, g, or t
cgtcgcgcgccgtgtggggcgcgcacgcagggctgggcgtgagggggcgtgcgcgtgcgcaggcgacgcgccgaggtactaggcagagccgtggaaccgccgccaggtcgctgttggtccacgccgcccgtcgcgccgcccgcccgctcagcgtccgccgccgccatgggagtgcaggtggaaaccatctccccaggagacgggcgcaccttccccaagcgcggccagacctgcgtggtgcactacaccgggatgcttgaagatggaaagaaatttgattcctcccgggacagaaacaagccctttaagtttatgctaggcaagcaggaggtgatccgaggctgggaagaaggggttgcccagatgagtgtgggtcagagagccaaactgactatatctccagattatgcctatggtgccactgggcacccaggcatcatcccaccacatgccactctcgtcttcgatgtggagcttctaaaactggaatgacaggaatggcctcctcccttagctccctgttcttggggaaccagagggtcacagccaaggcctgggtgaggacacttttgtttgaaagccacaacaaatggctgccatcctatttgtgatggcagtcagagctacttgtaacctggtcctgttgtgcacatctatctgccatggagggatctggtgcctccagacatgtgcacatgaatccatatggagcttttcctgatgttccactccactttgtatagacatctgccctgactgaatgtgttctgtcactcagctttgcttccgacacctctgtttcctcttcccctttctcctcgtatgtgtgtttacctaaactatatgccataaacctcaagttactcattttattttgttttcattttggggtgaagattcagtttcagtcttttggatataggtttccaattaagtacatggtcaagtattaacagcacaagtggtaggttaacattagaataggaattggtgtaggggggggggtntgnaagaatanttatttaanttnnnggatganatttttatctattatatattaaacattcttgctgctgcgctgcaaagccatagcagatttgaggcgctgttgaggactgaattactctccaagttgagagatgtctttgggttaaattaaaagccctacctaaaactgaggtggggatggggagagcctttgcctccaccattcccacccaccctccccttaaaccctctgcctttgaaagtagatcatgttcactgcaatgctggacactacaggtatctgtccctgggccagcagggacctctgaagccttctttgtggccttttttttttttcatcctgtggtttttctaatggactttcaggaattttgtaatctcataactttccaagctccaccacttcctaaatcttaagaactttaattgacagtttcaattgaaggtgctgtttgtagacttaacacccagtgaaagcccagccatcatgacaaatccttgaatgttctcttaagaaaatgatgctggtcatcgcagcttcagcatctcctgttttttgatgcttggctccctctgctgatctcagtttcctggcttttcctccctcagccccttctcacccctttgctgtcctgtgtagtgatttggtgagaaatcgttgctgcacccttcccccagcaccatttatgagtctcaagttttattattgcaataaaagtgctttatgccggcttttctcaaaaaaaaaaaaaaaaaaaaaaaaaaaaaaaaaaaaaaaaaaaaaaagaaaaaaaaaaaagaagaaaaaaaaagaaaaaaaaaaaagaaaaaaaaaaaaaaagtcgggaggacaacaagaaatccatccaacgcaagagaacagagacggcactgcgagcacaccatagctacccgcggcgtaccactctagcgcgtctcacagacgaggcgag

SEQ ID NO: 381747 - DNA, 1472 bp, Homo sapiens
  misc_feature (1152)..(1152): n is a, c, g, or t
  misc_feature (1155)..(1158): n is a, c, g, or t
  misc_feature (1161)..(1161): n is a, c, g, or t
  misc_feature (1167)..(1167): n is a, c, g, or t
  misc_feature (1172)..(1172): n is a, c, g, or t
  misc_feature (1174)..(1174): n is a, c, g, or t
  misc_feature (1179)..(1179): n is a, c, g, or t
  misc_feature (1228)..(1228): n is a, c, g, or t
  misc_feature (1230)..(1231): n is a, c, g, or t
  misc_feature (1234)..(1234): n is a, c, g, or t
  misc_feature (1237)..(1238): n is a, c, g, or t
  misc_feature (1250)..(1251): n is a, c, g, or t
  misc_feature (1253)..(1253): n is a, c, g, or t
  misc_feature (1258)..(1258): n is a, c, g, or t
  misc_feature (1306)..(1306): n is a, c, g, or t
  misc_feature (1312)..(1312): n is a, c, g, or t
  misc_feature (1353)..(1353): n is a, c, g, or t
  misc_feature (1378)..(1378): n is a, c, g, or t
  misc_feature (1405)..(1406): n is a, c, g, or t
  misc_feature (1441)..(1441): n is a, c, g, or t
cgtcgcgcgccgtgtggggcgcgcacgcagggctgggcgtgagggggcgtgcgcgtgcgcaggcgacgcgccgaggtactaggcagagccgtggaaccgccgccaggtcgctgttggtccacgccgcccgtcgcgccgcccgcccgctcagcgtccgccgccgccatgggagtgcaggtggaaaccatctccccaggagacgggcgcaccttccccaagcgcggccagacctgcgtggtgcactacaccgggatgcttgaagatggaaagaaatttgattcctcccgggacagaaacaagccctttaagtttatgctaggcaagcaggaggtgatccgaggctgggaagaaggggttgcccagatgagtgtgggtcagagagccaaactgactatatctccagattatgcctatggtgccactgggcacccaggcatcatcccaccacatgccactctcgtcttcgatgtggagcttctaaaactggaatgacaggaatggcctcctcccttagctccctgttcttggatctgccatggagggatctggtgcctccagacatgtgcacatgaatccatatggagcttttcctgatgttccactccactttgtatagacatctgccctgactgaatgtgttctgtcactcagctttgcttccgacacctctgtttcctcttcccctttctcctcgtatgtgtgtttacctaaactatatgccataaacctcaagttactcattttattttgttttcattttggggtgaagattcagtttcagtcttttggatataggtttccaattaagtacatggtcaagtattaacagcacaagtggtaggttaacattagaataggaattggtgttggggggggggtttgcaagaatatttaatttaattttttggatgaaattttatctattatatattaaacattcttgctgctgcgctgcaaagccatagcagatttgaggcgctgttgaggactgaattactctccaagttgagagatgtctttgggttaaattaaaagccctacctaaaactgaggtggggatggggagagcctttgcctccaccattcccacccaccctccccttaaaccctctgcctttgaaagtagatcatgttcactgcaaaacaaaaaanaannnnaanaaacancgaancngaagngacctatgaagcctacactatagcatcatattttttatcaaaacaagcngnntgncanngggccggaaagnncnggagnaatcccacaactccaaaagctccaccacgtccgctaaactacttaagnaacttnaatctacaaatctaacaagtctgaaagggagactggttctntaagaactccaacatccacagtcgnaagaccacacgccagttaaaagagcanngtcacgatgaaggggactcgataaagaaaatcgantgacgaggatgcaatccgcagcttcagcccc

SEQ ID NO: 381748 - DNA, 973 bp, Homo sapiens
cgtcgcgcgccgtgtggggcgcgcacgcagggctgggcgtgagggggcgtgcgcgtgcgcaggcgacgcgccgaggtactaggcagagccgtggaaccgccgccaggtcgctgttggtccacgccgcccgtcgcgccgcccgcccgctcagcgtccgccgccgccatgggagtgcaggtggaaaccatctccccaggagacgggcgcaccttccccaagcgcggccagacctgcgtggtgcactacaccgggatgcttgaagatggaaagaaatttgattcctcccgggacagaaacaagccctttaagtttatgctaggcaagcaggaggtgatccgaggctgggaagaaggggttgcccagatgagtgtgggtcagagagccaaactgactatatctccagattatgcctatggtgccactgggcacccaggcatcatcccaccacatgccactctcgtcttcgatgtggagcttctaaaactggaatgacaggaatggcctcctcccttagctccctgttcttggatctgccatggagggatctggtgcctccagacatgtgcacatgaatccatatggagcttttcctgatgttccactccactttgtatagacatctgccctgactgaatgtgttctgtcactcagctttgcttccgacacctctgtttcctcttcccctttctcctcgtatgtgtgtttacctaaactatatgccataaacctcaagttactcattttattttgttttcattttggggtgaagattcagtttcagtcttttggatataggtttccaattaagtacatggtcaagtattaacagcacaagtggtaggttaacattagaataggaattggtgtggggggggggttggagaaatttatttacttttggtggaattatcgtttttttaacgttttgggtgtgcgaaactaagattgggggtggggcggaatcccatgggag

SEQ ID NO: 381749 - DNA, 1430 bp, Homo sapiens
ctgcctgcctgcctgcctgcctgcctgcctctgcctgcctgcctgcctgcctgcctgcctctgcctgcctgcctgcctgcctgcctgcctctgcctgcctgcctgcctgcctgcctgcctctgcctgcctgcctgcctgcctgcctgcctctgcctgcctgcctgcctgcctgcctgcctctgcctgcctgcctgcctgcctgcctgcctctgcctgcctgcctgcctgcctgcctgcctctgcctgcctgcctgcctgcctgcctgcctctgcctgcctgcctgcctgcctgcctgcctctgcctgcctgcctgcctgcctgcctgcctctgcctgcctgcctgcctgcctgcctgcctctgcctgcctgcctgcctgcctgcctgcctctgcctgcctgcctgcctgcctgcctgcctctgcctgcctgcctgcctgcctgcctgcctctgcctgcctgcctgcctgcctgcctgcctctgcctgcctgcctgcctgcctgcctgcctctgcctgcctgcctgcctgcctgcctgcctctgcctgcctgcctgcctgcctgcctgcctctgcctgcctgcctgcctgcctgcctgcctctgcctgcctgcctgcctgcctgcctgcctctgcctgcctgcctgcctgcctgcctgcctctgcctgcctgcctgcctgcctgcctgcctctgcctgcctgcctgcctgcctttgaaagtagatcatgttcactgcaatgctggacactacaggtatctgtccctgggccagcagggacctctgaagccttctttgtggccttttttttttttcatcctgtggtttttctaatggactttcaggaattttgtaatctcataactttccaagctccaccacttcctaaatcttaagaactttaattgacagtttcaattgaaggtgctgtttgtagacttaacacccagtgaaagcccagccatcatgacaaatccttgaatgttctcttaagaaaatgatgctggtcatcgcagcttcagcatctcctgttttttgatgcttggctccctctgctgatctcagtttcctggcttttcctccctcagccccttctcacccctttgctgtcctgtgtagtgatttggtgagaaatcgttgctgcacccttcccccagcaccatttatgagtctcaagttttattattgcaataaaagtgctttatgccggcttttctcaaaaaaaaaaaaaaaaaaaaaaaaaaaaaaaaaaaaaaaaaaaaaaagaaaaaaaaaaaagaagaaaaaaaaagaaaaaaaaaaaagaaaaaaaaaaaaaaagtcgggaggacaacaagaaatccatccaacgcaagagaacagagacggcactgcgagcacaccatagctacccgcggcgtaccactctagcgcgtctcacagacgaggcgag

SEQ ID NO: 381750 - DNA, 2378 bp, Homo sapiens
cgtcgcgcgccgtgtggggcgcgcacgcagggctgggcgtgagggggcgtgcgcgtgcgcaggcgacgcgccgaggtactaggcagagccgtggaaccgccgccaggtcgctgttggtccacgccgcccgtcgcgccgcccgcccgctcagcgtccgccgccgccatgggagtgcaggtggaaaccatctccccaggagacgggcgcaccttccccaagcgcggccagacctgcgtggtgcactacaccgggatgcttgaagatggaaagaaatttgattcctcccgggacagaaacaagccctttaagtttatgctaggcaagcaggaggtgatccgaggctgggaagaaggggttgcccagatgagtgtgggtcagagagccaaactgactatatctccagattatgcctatggtgccactgggcacccaggcatcatcccaccacatgccactctcgtcttcgatgtggagcttctaaaactggaatgacaggaatggcctcctcccttagctccctgttcttgggtaaggaaatggaatactgaagggcccttcactgcctttgctcctcccatgttatgcccagcgtttgatgggtagcagagagaacaaaaaacaccacaaggctatttttccccctgcattctttctgtattgagtatcctttcagtgttattagtgtatgctttgaatgtaaaaattggtcaccctaaggaaaggaattggcatgtgtatgttcccagttcaactcatggagatggcagctgtttaaatgtttttctatgtagtttataaattaaaactgaattgaggactatggaaatgtaggccaaatttgtagtgccaacattttagttctttggaaataagactcttaatgaatgactttgttctaccctgtgtttctagaagctagagggggaaaaaaaaagccctttggatatgaatatcatgtcctagcttctgcggctctctcttcactgtggtttgtggttactgcctattagatggtatgagggaggcattcctgcatcggtccacctgctcagggtccacacccaggacacttgaggcccccaggccagcttatcagtgagtgaagtggaaaaatgaagccagaggatgcttgtgaagttgaaaggatgctcttagatcagacagttctaggaagggatcttaggggcctctgcatcagctttattgtgcaacagtaaggaaacagggccagagagaaaggccttactcaaggtcacatccaggcagtggcaaagtaggaccagagcccctgtttgttgattttcccctcttccaccctcatttcttaggaactaaactcagtatcctagtagcacgtaacttttcatgtaagtgttagaatcattaagtacatgaatgctactggcttccttccaactggccccagacctttttatttgctcccctcctgccataggaaccagagggtcacagccaaggcctgggtgaggacacttttgtttgaaagccacaacaaatggctgccatcctatttgtgatggcagtcagagctacttgtaacctggtcctgttgtgcacatctatctgccatggagggatctggtgcctccagacatgtgcacatgaatccatatggagcttttcctgatgttccactccactttgtatagacatctgccctgactgtgctggacactacaggtatctgtccctgggccagcagggacctctgaagccttctttgtggccttttttttttttcatcctgtggtttttctaatggactttcaggaattttgtaatctcataactttccaagctccaccacttcctaaatcttaagaactttaattgacagtttcaattgaaggtgctgtttgtagacttaacacccagtgaaagcccagccatcatgacaaatccttgaatgttctcttaagaaaatgatgctggtcatcgcagcttcagcatctcctgttttttgatgcttggctccctctgctgatctcagtttcctggcttttcctccctcagccccttctcacccctttgctgtcctgtgtagtgatttggtgagaaatcgttgctgcacccttcccccagcaccatttatgagtctcaagttttattattgcaataaaagtgctttatgccggcttttctcaaaaaaaaaaaaaaaaaaaaaaaaaaaaaaaaaaaaaaaaaaaaaaagaaaaaaaaaaaagaagaaaaaaaaagaaaaaaaaaaaagaaaaaaaaaaaaaaagtcgggaggacaacaagaaatccatccaacgcaagagaacagagacggcactgcgagcacaccatagctacccgcggcgtaccactctagcgcgtctcacagacgaggcgag

SEQ ID NO: 381751 - DNA, 1943 bp, Homo sapiens
cgtcgcgcgccgtgtggggcgcgcacgcagggctgggcgtgagggggcgtgcgcgtgcgcaggcgacgcgccgaggtactaggcagagccgtggaaccgccgccaggtcgctgttggtccacgccgcccgtcgcgccgcccgcccgctcagcgtccgccgccgccatgggagtgcaggtggaaaccatctccccaggagacgggcgcaccttccccaagcgcggccagacctgcgtggtgcactacaccgggatgcttgaagatggaaagaaatttgattcctcccgggacagaaacaagccctttaagtttatgctaggcaagcaggaggtgatccgaggctgggaagaaggggttgcccagatgagtgtgggtcagagagccaaactgactatatctccagattatgcctatggtgccactgggcacccaggcatcatcccaccacatgccactctcgtcttcgatgtggagcttctaaaactggaatgacaggaatggcctcctcccttagctccctgttcttgggtaaggaaatggaatactgaagggcccttcactgcctttgctcctcccatgttatgcccagcgtttgatgggtagcagagagaacaaaaaacaccacaaggctatttttccccctgcattctttctgtattgagtatcctttcagtgttattagtgtatgctttgaatgtaaaaattggtcaccctaaggaaaggaattggcatgtgtatgttcccagttcaactcatggagatggcagctgtttaaatgtttttctatgtagtttataaattaaaactgaattgaggactatggaaatgtaggccaaatttgtagtgccaacattttagttctttggaaataagactcttaatgaatgactttgttctaccctgtgtttctagaagctagagggggaaaaaaaaagccctttggatatgaatatcatgtcctagcttctgcggctctctcttcactgtggtttgtggttactgcctattagatggtatgagggaggcattcctgcatcggtccacctgctcagggtccacacccaggacacttgaggcccccaggccagcttatcagtgagtgaagtggaaaaatgaagccagaggatgcttgtgaagttgaaaggatgctcttagatcagacagttctaggaagggatcttaggggcctctgcatcagctttattgtgcaacagtaaggaaacagggccagagagaaaggccttactcaaggtcacatccaggcagtggcaaagtaggaccagagcccctgtttgttgattttcccctcttccaccctcatttcttaggaactaaactcagtatcctagtagcacgtaacttttcatgtaagtgttagaatcattaagtacatgaatgctactggcttccttccaactggccccagacctttttatttgctcccctcctgccataggaaccagagggtcacagccaaggcctgggtgaggacacttttgtttgaaagccacaacaaatggctgccatcctatttgtgatggcagtcagagctacttgtaacctggtcctgttgtgcacatctgtaagtggaggggctttttaaactctctgtttgaaccacacacaccttggtaatacaggcctggttaagtttgataactggtttcttcacctgtcattgctactgggagggaatccctggcactttacagggcctttgtctgcccagaggtctgcacctaggccaaaatccctttcctgttctttgagagctgagtcattttttgaacataactgtactcgagggagccttggaattattttcctggttgggaacaggctttctgtaaacttgatgaggtagagggaggataataattcattatggctaactattctcttcatttatattctttctattgtactactataattgtttatta

SEQ ID NO: 381752 - DNA, 826 bp, Homo sapiens
cgtcgcgcgccgtgtggggcgcgcacgcagggctgggcgtgagggggcgtgcgcgtgcgcaggcgacgcgccgaggtactaggcagagccgtggaaccgccgccaggtcgctgttggtccacgccgcccgtcgcgccgcccgcccgctcagcgtccgccgccgccatgggagtgcaggtggaaaccatctccccaggagacgggcgcaccttccccaagcgcggccagacctgcgtggtgcactacaccgggatgcttgaagatggaaagaaatttgattcctcccgggacagaaacaagccctttaagtttatgctaggcaagcaggaggtgatccgaggctgggaagaaggggttgcccagatgagtgtgggtcagagagccaaactgactatatctccagattatgcctatggtgccactgggcacccaggcatcatcccaccacatgccactctcgtcttcgatgtggagcttctaaaactggaatgacaggaatggcctcctcccttagctccctgttcttgggtaaggaaatggaatactgaagggcccttcactgcctttgctcctcccatgttatgcccagcgtttgatgggtagcagagagaacaaaaaacaccacaaggctatttttccccctgcattctttctgtattgagtatcctttcagtgttattagtgtatgctttgaatgtaaaaattggtcaccctaaggaaaggaattggcatgtgtatgttcccagttcaactcatggagatggcagctgtttaaatgtttttctatgtagtttataaattaaaactgaattgaggactatggaaa

SEQ ID NO: 381753 - DNA, 793 bp, Homo sapiens
gcggccgcctactactactactactgctcgaattcaagcttctaacgatgtacggggacatgacaaatccttgaatgttctcttaagaaaatgatgctggtcatcgcagcttcagcatctcctgttttttgatgcttggctccctctgctgatctcagtttcctggcttttcctccctcagccccttctcacccctttgctgtcctgtgtagtgatttggtgagaaatcgttgctgcacccttcccccagcaccatttatgagtctcaagttttattattgcaataaaagtgctttatgccggcttttctcaaaaaaaaaaaaaaaaaaaaaaaaaacaatgaaaacagcagagaaacacacacgaaaagcaaaacaaacacaaaaacaacgagaaaccgaggggcacccaaggcccacagcaaaaaaggccacaacacgcgagacacacaagcaaagacccagggagaaggagacaaacagcgcggacaaggagcccagcgcgacgcaaaaatgcggactaccgggcagaaggagagaggaacacggcgacggaagaacgcaagcaacaacagagaacagaagggcgaaccacagcgggacgaccaagcatacaccaggggaacaacaccaccataaacgcacaggacagaaacgtggcaacaagaaagcaccaacacccgccagcccgctcccgccagacaggtagcagagccacaccaaacccaacggagaacaaagaacaagaaagaagaggcgcaaaacacacgacccaacacgacaaaagcaaacac

SEQ ID NO: 381754 - DNA, 1270 bp, Homo sapiens
cgtcgcgcgccgtgtggggcgcgcacgcagggctgggcgtgagggggcgtgcgcgtgcgcaggcgacgcgccgaggtactaggcagagccgtggaaccgccgccaggtcgctgttggtccacgccgcccgtcgcgccgcccgcccgctcagcgtccgccgccgccatgggagtgcaggtggaaaccatctccccaggagacgggcgcaccttccccaagcgcggccagacctgcgtggtgcactacaccgggatgcttgaagatggaaagaaatttgattcctcccgggacagaaacaagccctttaagtttatgctaggcaagcaggaggtgatccgaggctgggaagaaggggttgcccagatgagtgtgggtcagagagccaaactgactatatctccagattatgcctatggtgccactgggcacccaggcatcatcccaccacatgccactctcgtcttcgatgtggagcttctaaaactggaatgacaggaatggcctcctcccttagctccctgttcttggatctgccatggagggatctggtgcctccagacatgtgcacatgaatccatatggagcttttcctgatgttccactccactttgtatagacatctgccctgactgaatgtgttctgtcactcagctttgcttccgacacctctgtttcctcttcccctttctcctcgtatgtgtgtttacctaaactatatgccataaacctcaagttatccaaaaaaaaaaaaaaaaaaaaaaaaaacttgggggggggcccgggccccggaacacgcgtttacaagcccactgcgggggggcgcgcgcggggcccacaagagcacaagctgcacacttggcgcacacaaggcggagcccacagaggagaaccccgggggccagagaacaacgcgggcggggagatctctcacaccaatattaaaacacggccccggggcgacacacccgcgggcttctctggaaacaaacatcccaaagggggcatccacgagggcagccacaaaggggggacctcactcaccacacaggggggaggtcccaaaggcgggacagccgcagcggagaaattcccacaaataagacccccccgcggctgtgggcgcaggtggaggagaaaatagcgacgagccgcacgcgagcagaagacacgaacgccggcaactaacagggagagagtatgagacgatcacacaacacgagcgtacggacgaacagagacacaagacgccgagaagaatagcagaactcaa

SEQ ID NO: 381755 - DNA, 2103 bp, Homo sapiens
cgtcgcgcgccgtgtggggcgcgcacgcagggctgggcgtgagggggcgtgcgcgtgcgcaggcgacgcgccgaggtactaggcagagccgtggaaccgccgccaggtcgctgttggtccacgccgcccgtcgcgccgcccgcccgctcagcgtccgccgccgccatgggagtgcaggtggaaaccatctccccaggagacgggcgcaccttccccaagcgcggccagacctgcgtggtgcactacaccgggatgcttgaagatggaaagaaatttgattcctcccgggacagaaacaagccctttaagtttatgctaggcaagcaggaggtgatccgaggctgggaagaaggggttgcccagatgagtgtgggtcagagagccaaactgactatatctccagattatgcctatggtgccactgggcacccaggcatcatcccaccacatgccactctcgtcttcgatgtggagcttctaaaactggaatgacaggaatggcctcctcccttagctccctgttcttggatctgccatggagggatctggtgcctccagacatgtgcacatgaatccatatggagcttttcctgatgttccactccactttgtatagacatctgccctgactgaatgtgttctgtcactcagctttgcttccgacacctctgtttcctcttcccctttctcctcgtatgtgtgtttacctaaactatatgccataaacctcaagttactcattttattttgttttcattttggggtgaagattcagtttcagtcttttggatataggtttccaattaagtacatggtcaagtattaacagcacaagtggtaggttaacattagaataggaattggtgtggggggggggtttgcaagaatattttattttaattttttggatgaaatttttatctattatatattaaacattcttgctgctgcgctgcaaagccatagcagatttgaggcgctgttgaggactgaattactctccaagttgagagatgtctttgggttaaattaaaagccctacctaaaactgaggtggggatggggagagcctttgcctccaccattcccacccaccctccccttaaaccctctgcctttgaaagtagatcatgttcactgcaatgctggacactacaggtatctgtccctgggccagcagggacctctgaagccttctttgtggccttttttttttttcatcctgtggtttttctaatggactttcaggaattttgtaatctcataactttccaagctccaccacttcctaaatcttaagaactttaattgacagtttcaattgaaggtgctgtttgtagacttaacacccagtgaaagcccagccatcatgacaaatccttgaatgttctcttaagaaaatgatgctggtcatcgcagcttcagcatctcctgttttttgatgcttggctccctctgctgatctcagtttcctggcttttcctccctcagccccttctcacccctttgctgtcctgtgtagtgatttggtgagaaatcgttgctgcacccttcccccagcaccatttatgagtctcaagttttattattgcaataaaagtgctttatgccggcttttctcaaaaaaaaaaaaaaaaaaaaaaaaaacaatgaaaacagcagagaaacacacacgaaaagcaaaacaaacacaaaaacaacgagaaaccgaggggcacccaaggcccacagcaaaaaaggccacaacacgcgagacacacaagcaaagacccagggagaaggagacaaacagcgcggacaaggagcccagcgcgacgcaaaaatgcggactaccgggcagaaggagagaggaacacggcgacggaagaacgcaagcaacaacagagaacagaagggcgaaccacagcgggacgaccaagcatacaccaggggaacaacaccaccataaacgcacaggacagaaacgtggcaacaagaaagcaccaacacccgccagcccgctcccgccagacaggtagcagagccacaccaaacccaacggagaacaaagaacaagaaagaagaggcgcaaaacacacgacccaacacgacaaaagcaaacac

SEQ ID NO: 381756 - DNA, 1886 bp, Homo sapiens
  misc_feature (137)..(137): n is a, c, g, or t
  misc_feature (140)..(140): n is a, c, g, or t
gaacttggacttagaacttcaataataggggcgcacatctgggcgatgtcaaccggcgagtggcgtactcttactacatatacgagttagtaaggcatggcgatcatctcgaacggtgcgcagcgacgcgatctagnagncgtggaaccgccgccaggtcgctgttggtccacgccgcccgtcgcgccgcccgcccgctcagcgtccgccgccgccatgggagtgcaggtggaaaccatctccccaggagacgggcgcaccttccccaagcgcggccagacctgcgtggtgcactacaccgggatgcttgaagatggaaagaaatttgattcctcccgggacagaaacaagccctttaagtttatgctaggcaagcaggaggtgatccgaggctgggaagaaggggttgcccagatgagtgtgggtcagagagccaaactgactatatctccagattatgcctatggtgccactgggcacccaggcatcatcccaccacatgccactctcgtcttcgatgtggagcttctaaaactggaatgacaggaatggcctcctcccttagctccctgttcttggatctgccatggagggatctggtgcctccagacatgtgcacatgaatccatatggagcttttcctgatgttccactccactttgtatagacatctgccctgactgaatgtgttctgtcactcagctttgcttccgacacctctgtttcctcttcccctttctcctcgtatgtgtgtttacctaaactatatgccataaacctcaagttactcattttattttgttttcattttggggtgaagattcagtttcagtcttttggatataggtttccaattaagtacatggtcaagtattaacagcacaagtggtaggttaacattagaataggaattggtgtggggggggggtttgcaagaatattttattttaattttttggatgaaatttttatctattatatattaaacattcttgctgctgcgctgcaaagccatagcagatttgaggcgctgttgaggactgaattactctccaagttgagagatgtctttgggttaaattaaaagccctacctaaaactgaggtggggatggggagagcctttgcctccaccattcccacccaccctccccttaaaccctctgcctttgaaagtagatcatgttcactgcaatgctggacactacaggtatctgtccctgggccagcagggacctctgaagccttctttgtggccttttttttttttcatcctgtggtttttctaatggactttcaggaattttgtaatctcataactttccaagctccaccacttcctaaatcttaagaactttaattgacagtttcaattgaaggtgctgtttgtagacttaacacccagtgaaagcccagccatcatgacaaatccttgaatgttctcttaagaaaatgatgctggtcatcgcagcttcagcatctcctgttttttgatgcttggctccctctgctgatctcagtttcctggcttttcctccctcagccccttctcacccctttgctgtcctgtgtagtgatttggtgagaaatcgttgctgcacccttcccccagcaccatttatgagtctcaagttttattattgcaataaaagtgctttatgccggcttttctcaaaaaaaaaaaaaaaaaaaaaaaaaaaaaaaaaaaaaaaaaaaaaaagaaaaaaaaaaaagaagaaaaaaaaagaaaaaaaaaaaagaaaaaaaaaaaaaaagtcgggaggacaacaagaaatccatccaacgcaagagaacagagacggcactgcgagcacaccatagctacccgcggcgtaccactctagcgcgtctcacagacgaggcgag

SEQ ID NO: 381757 - DNA, 1834 bp, Homo sapiens
  misc_feature (880)..(880): n is a, c, g, or t
  misc_feature (883)..(883): n is a, c, g, or t
  misc_feature (891)..(891): n is a, c, g, or t
  misc_feature (900)..(900): n is a, c, g, or t
  misc_feature (903)..(905): n is a, c, g, or t
  misc_feature (912)..(912): n is a, c, g, or t
cgtcgcgcgccgtgtggggcgcgcacgcagggctgggcgtgagggggcgtgcgcgtgcgcaggcgacgcgccgaggtactaggcagagccgtggaaccgccgccaggtcgctgttggtccacgccgcccgtcgcgccgcccgcccgctcagcgtccgccgccgccatgggagtgcaggtggaaaccatctccccaggagacgggcgcaccttccccaagcgcggccagacctgcgtggtgcactacaccgggatgcttgaagatggaaagaaatttgattcctcccgggacagaaacaagccctttaagtttatgctaggcaagcaggaggtgatccgaggctgggaagaaggggttgcccagatgagtgtgggtcagagagccaaactgactatatctccagattatgcctatggtgccactgggcacccaggcatcatcccaccacatgccactctcgtcttcgatgtggagcttctaaaactggaatgacaggaatggcctcctcccttagctccctgttcttggatctgccatggagggatctggtgcctccagacatgtgcacatgaatccatatggagcttttcctgatgttccactccactttgtatagacatctgccctgactgaatgtgttctgtcactcagctttgcttccgacacctctgtttcctcttcccctttctcctcgtatgtgtgtttacctaaactatatgccataaacctcaagttactcattttattttgttttcattttggggtgaagattcagtttcagtcttttggatataggtttccaattaagtacatggtcaagtattaacagcacaagtggtaggttaacattagaataggaattggtgtaggggggggggtntgnaagaatanttatttaanttnnnggatganatttttatctattatatattaaacattcttgctgctgcgctgcaaagccatagcagatttgaggcgctgttgaggactgaattactctccaagttgagagatgtctttgggttaaattaaaagccctacctaaaactgaggtggggatggggagagcctttgcctccaccattcccacccaccctccccttaaaccctctgcctttgaaagtagatcatgttcactgcaatgctggacactacaggtatctgtccctgggccagcagggacctctgaagccttctttgtggccttttttttttttcatcctgtggtttttctaatggactttcaggaattttgtaatctcataactttccaagctccaccacttcctaaatcttaagaactttaattgacagtttcaattgaaggtgctgtttgtagacttaacacccagtgaaagcccagccatcatgacaaatccttgaatgttctcttaagaaaatgatgctggtcatcgcagcttcagcatctcctgttttttgatgcttggctccctctgctgatctcagtttcctggcttttcctccctcagccccttctcacccctttgctgtcctgtgtagtgatttggtgagaaatcgttgctgcacccttcccccagcaccatttatgagtctcaagttttattattgcaataaaagtgctttatgccggcttttctcaaaaaaaaaaaaaaaaaaaaaaaaaaaaaaaaaaaaaaaaaaaaaaagaaaaaaaaaaaagaagaaaaaaaaagaaaaaaaaaaaagaaaaaaaaaaaaaaagtcgggaggacaacaagaaatccatccaacgcaagagaacagagacggcactgcgagcacaccatagctacccgcggcgtaccactctagcgcgtctcacagacgaggcgag

SEQ ID NO: 381758 - DNA, 1966 bp, Homo sapiens
  misc_feature (137)..(137): n is a, c, g, or t
  misc_feature (140)..(140): n is a, c, g, or t
gaacttggacttagaacttcaataataggggcgcacatctgggcgatgtcaaccggcgagtggcgtactcttactacatatacgagttagtaaggcatggcgatcatctcgaacggtgcgcagcgacgcgatctagnagncgtggaaccgccgccaggtcgctgttggtccacgccgcccgtcgcgccgcccgcccgctcagcgtccgccgccgccatgggagtgcaggtggaaaccatctccccaggagacggtgagtagtggcgcgcggcggctcggagtacctctgccgccgcgcgcatcggctcagcatgcccgtctctgtctcctcagggcgcaccttccccaagcgcggccagacctgcgtggtgcactacaccgggatgcttgaagatggaaagaaatttgattcctcccgggacagaaacaagccctttaagtttatgctaggcaagcaggaggtgatccgaggctgggaagaaggggttgcccagatgagtgtgggtcagagagccaaactgactatatctccagattatgcctatggtgccactgggcacccaggcatcatcccaccacatgccactctcgtcttcgatgtggagcttctaaaactggaatgacaggaatggcctcctcccttagctccctgttcttggatctgccatggagggatctggtgcctccagacatgtgcacatgaatccatatggagcttttcctgatgttccactccactttgtatagacatctgccctgactgaatgtgttctgtcactcagctttgcttccgacacctctgtttcctcttcccctttctcctcgtatgtgtgtttacctaaactatatgccataaacctcaagttactcattttattttgttttcattttggggtgaagattcagtttcagtcttttggatataggtttccaattaagtacatggtcaagtattaacagcacaagtggtaggttaacattagaataggaattggtgtggggggggggtttgcaagaatattttattttaattttttggatgaaatttttatctattatatattaaacattcttgctgctgcgctgcaaagccatagcagatttgaggcgctgttgaggactgaattactctccaagttgagagatgtctttgggttaaattaaaagccctacctaaaactgaggtggggatggggagagcctttgcctccaccattcccacccaccctccccttaaaccctctgcctttgaaagtagatcatgttcactgcaatgctggacactacaggtatctgtccctgggccagcagggacctctgaagccttctttgtggccttttttttttttcatcctgtggtttttctaatggactttcaggaattttgtaatctcataactttccaagctccaccacttcctaaatcttaagaactttaattgacagtttcaattgaaggtgctgtttgtagacttaacacccagtgaaagcccagccatcatgacaaatccttgaatgttctcttaagaaaatgatgctggtcatcgcagcttcagcatctcctgttttttgatgcttggctccctctgctgatctcagtttcctggcttttcctccctcagccccttctcacccctttgctgtcctgtgtagtgatttggtgagaaatcgttgctgcacccttcccccagcaccatttatgagtctcaagttttattattgcaataaaagtgctttatgccggcttttctcaaaaaaaaaaaaaaaaaaaaaaaaaaaaaaaaaaaaaaaaaaaaaaagaaaaaaaaaaaagaagaaaaaaaaagaaaaaaaaaaaagaaaaaaaaaaaaaaagtcgggaggacaacaagaaatccatccaacgcaagagaacagagacggcactgcgagcacaccatagctacccgcggcgtaccactctagcgcgtctcacagacgaggcgag

SEQ ID NO: 381759 - DNA, 1664 bp, Homo sapiens
  misc_feature (1630)..(1630): n is a, c, g, or t
  misc_feature (1633)..(1633): n is a, c, g, or t
  misc_feature (1635)..(1635): n is a, c, g, or t
  misc_feature (1637)..(1637): n is a, c, g, or t
  misc_feature (1641)..(1641): n is a, c, g, or t
cgtcgcgcgccgtgtggggcgcgcacgcagggctgggcgtgagggggcgtgcgcgtgcgcaggcgacgcgccgaggtactaggcagagccgtggaaccgccgccaggtcgctgttggtccacgccgcccgtcgcgccgcccgcccgctcagcgtccgccgccgccatgggagtgcaggtggaaaccatctccccaggagacgggcgcaccttccccaagcgcggccagacctgcgtggtgcactacaccgggatgcttgaagatggaaagaaatttgattcctcccgggacagaaacaagccctttaagtttatgctaggcaagcaggaggtgatccgaggctgggaagaaggggttgcccagatgagtgtgggtcagagagccaaactgactatatctccagattatgcctatggtgccactgggcacccaggcatcatcccaccacatgccactctcgtcttcgatgtggagcttctaaaactggaatgacaggaatggcctcctcccttagctccctgttcttggatctgccatggagggatctggtgcctccagacatgtgcacatgaatccatatggagcttttcctgatgttccactccactttgtatagacatctgccctgactgaatgtgttctgtcactcagctttgcttccgacacctctgtttcctcttcccctttctcctcgtatgtgtgtttacctaaactatatgccataaacctcaagttactcattttattttgttttcattttggggtgaagattcagtttcagtcttttggatataggtttccaattaagtacatggtcaagtattaacagcacaagtggtaggttaacattagaataggaattggtgtggggggggggtttgcaagaatattttattttaattttttggatgaaatttttatctattatatattaaacattcttgctgctgcgctgcaaagccatagcagatttgaggcgctgttgaggactgaattactctccaagttgagagatgtctttgggttaaattaaaagccctacctaaaactgaggtggggatggggagagcctttgcctccaccattcccacccaccctccccttaaaccctctgcctttgaaagtagatcatgttcactgcaatgctggacactacaggtatctgtccctgggccagcagggacctctgaagccttctttgtggccttttttttttttcatcctgtggtttttctaatggactttcaggaattttgtaatctcataactttccaagctccaccacttcctaaatcttaagaactttaattgacagtttcaattgaaggtgctgtttgtagacttaacacccagtgaaagcccagccatcatgacaaatccttgaatgttctcttaagaaaatgatgctggtcatcgcagcttcagcatctcctgttttttgatgcttggctccctctgctgatctcagtttcctggcttttcctccctcagccccttctcacccctttgctgtcctgtgtagtgatttggtgagaaatcgttgctgcacccttcccccagcaccatttttgagaaaagccggcataaagcacttttattgcaataataaaacttgagactcataaatggngcngngngaanggtgcagcaacgatttctcacca

SEQ ID NO: 381760 - DNA, 1773 bp, Homo sapiens
  misc_feature (137)..(137): n is a, c, g, or t
  misc_feature (140)..(140): n is a, c, g, or t
gaacttggacttagaacttcaataataggggcgcacatctgggcgatgtcaaccggcgagtggcgtactcttactacatatacgagttagtaaggcatggcgatcatctcgaacggtgcgcagcgacgcgatctagnagncgtggaaccgccgccaggtcgctgttggtccacgccgcccgtcgcgccgcccgcccgctcagcgtccgccgccgccatgggagtgcaggtggaaaccatctccccaggagacgggcgcaccttccccaagcgcggccagacctgcgtggtgcactacaccgatgagtgtgggtcagagagccaaactgactatatctccagattatgcctatggtgccactgggcacccaggcatcatcccaccacatgccactctcgtcttcgatgtggagcttctaaaactggaatgacaggaatggcctcctcccttagctccctgttcttggatctgccatggagggatctggtgcctccagacatgtgcacatgaatccatatggagcttttcctgatgttccactccactttgtatagacatctgccctgactgaatgtgttctgtcactcagctttgcttccgacacctctgtttcctcttcccctttctcctcgtatgtgtgtttacctaaactatatgccataaacctcaagttactcattttattttgttttcattttggggtgaagattcagtttcagtcttttggatataggtttccaattaagtacatggtcaagtattaacagcacaagtggtaggttaacattagaataggaattggtgtggggggggggtttgcaagaatattttattttaattttttggatgaaatttttatctattatatattaaacattcttgctgctgcgctgcaaagccatagcagatttgaggcgctgttgaggactgaattactctccaagttgagagatgtctttgggttaaattaaaagccctacctaaaactgaggtggggatggggagagcctttgcctccaccattcccacccaccctccccttaaaccctctgcctttgaaagtagatcatgttcactgcaatgctggacactacaggtatctgtccctgggccagcagggacctctgaagccttctttgtggccttttttttttttcatcctgtggtttttctaatggactttcaggaattttgtaatctcataactttccaagctccaccacttcctaaatcttaagaactttaattgacagtttcaattgaaggtgctgtttgtagacttaacacccagtgaaagcccagccatcatgacaaatccttgaatgttctcttaagaaaatgatgctggtcatcgcagcttcagcatctcctgttttttgatgcttggctccctctgctgatctcagtttcctggcttttcctccctcagccccttctcacccctttgctgtcctgtgtagtgatttggtgagaaatcgttgctgcacccttcccccagcaccatttatgagtctcaagttttattattgcaataaaagtgctttatgccggcttttctcaaaaaaaaaaaaaaaaaaaaaaaaaaaaaaaaaaaaaaaaaaaaaaagaaaaaaaaaaaagaagaaaaaaaaagaaaaaaaaaaaagaaaaaaaaaaaaaaagtcgggaggacaacaagaaatccatccaacgcaagagaacagagacggcactgcgagcacaccatagctacccgcggcgtaccactctagcgcgtctcacagacgaggcgag

SEQ ID NO: 381761 - DNA, 1773 bp, Homo sapiens
cgtcgcgcgccgtgtggggcgcgcacgcagggctgggcgtgagggggcgtgcgcgtgcgcaggcgacgcgccgaggtactaggcagagccgtggaaccgccgccaggtcgctgttggtccacgccgcccgtcgcgccgcccgcccgctcagcgtccgccgccgccatgggagtgcaggtggaaaccatctccccaggagacgggcgcaccttccccaagcgcggccagacctgcgtggtgcactacaccgggatgcttgaagatggaaagaaatttgattcctcccgggacagaaacaagccctttaagtttatgctaggcaagcaggaggtgatccgaggctgggaagaaggggttgcccagatgagtgtgggtcagagagccaaactgactatatctccagattatgcctatggtgccactgggcacccaggcatcatcccaccacatgccactctcgtcttcgatctgccatggagggatctggtgcctccagacatgtgcacatgaatccatatggagcttttcctgatgttccactccactttgtatagacatctgccctgactgaatgtgttctgtcactcagctttgcttccgacacctctgtttcctcttcccctttctcctcgtatgtgtgtttacctaaactatatgccataaacctcaagttactcattttattttgttttcattttggggtgaagattcagtttcagtcttttggatataggtttccaattaagtacatggtcaagtattaacagcacaagtggtaggttaacattagaataggaattggtgtggggggggggtttgcaagaatattttattttaattttttggatgaaatttttatctattatatattaaacattcttgctgctgcgctgcaaagccatagcagatttgaggcgctgttgaggactgaattactctccaagttgagagatgtctttgggttaaattaaaagccctacctaaaactgaggtggggatggggagagcctttgcctccaccattcccacccaccctccccttaaaccctctgcctttgaaagtagatcatgttcactgcaatgctggacactacaggtatctgtccctgggccagcagggacctctgaagccttctttgtggccttttttttttttcatcctgtggtttttctaatggactttcaggaattttgtaatctcataactttccaagctccaccacttcctaaatcttaagaactttaattgacagtttcaattgaaggtgctgtttgtagacttaacacccagtgaaagcccagccatcatgacaaatccttgaatgttctcttaagaaaatgatgctggtcatcgcagcttcagcatctcctgttttttgatgcttggctccctctgctgatctcagtttcctggcttttcctccctcagccccttctcacccctttgctgtcctgtgtagtgatttggtgagaaatcgttgctgcacccttcccccagcaccatttatgagtctcaagttttattattgcaataaaagtgctttatgccggcttttctcaaaaaaaaaaaaaaaaaaaaaaaaaaaaaaaaaaaaaaaaaaaaaaagaaaaaaaaaaaagaagaaaaaaaaagaaaaaaaaaaaagaaaaaaaaaaaaaaagtcgggaggacaacaagaaatccatccaacgcaagagaacagagacggcactgcgagcacaccatagctacccgcggcgtaccactctagcgcgtctcacagacgaggcgag

SEQ ID NO: 381762 - DNA, 1723 bp, Homo sapiens
cgtcgcgcgccgtgtggggcgcgcacgcagggctgggcgtgagggggcgtgcgcgtgcgcaggcgacgcgccgaggtactaggcagagccgtggaaccgccgccaggtcgctgttggtccacgccgcccgtcgcgccgcccgcccgctcagcgtccgccgccgccatgggagtgcaggtggaaaccatctccccaggagacgggcgcaccttccccaagcgcggccagacctgcgtggtgcactacaccgggatgcttgaagatggaaagaaatttgattcctcccgggacagaaacaagccctttaagtttatgctaggcaagcaggaggtgatccgaggctgggaagaaggggttgcccagatgagtgtgggtcagagagccaaactgactatatctccagattatgcctatggtgccactgggcacccaggcatcatcccaccacatgccactctcgtcttcgatggagcttttcctgatgttccactccactttgtatagacatctgccctgactgaatgtgttctgtcactcagctttgcttccgacacctctgtttcctcttcccctttctcctcgtatgtgtgtttacctaaactatatgccataaacctcaagttactcattttattttgttttcattttggggtgaagattcagtttcagtcttttggatataggtttccaattaagtacatggtcaagtattaacagcacaagtggtaggttaacattagaataggaattggtgtggggggggggtttgcaagaatattttattttaattttttggatgaaatttttatctattatatattaaacattcttgctgctgcgctgcaaagccatagcagatttgaggcgctgttgaggactgaattactctccaagttgagagatgtctttgggttaaattaaaagccctacctaaaactgaggtggggatggggagagcctttgcctccaccattcccacccaccctccccttaaaccctctgcctttgaaagtagatcatgttcactgcaatgctggacactacaggtatctgtccctgggccagcagggacctctgaagccttctttgtggccttttttttttttcatcctgtggtttttctaatggactttcaggaattttgtaatctcataactttccaagctccaccacttcctaaatcttaagaactttaattgacagtttcaattgaaggtgctgtttgtagacttaacacccagtgaaagcccagccatcatgacaaatccttgaatgttctcttaagaaaatgatgctggtcatcgcagcttcagcatctcctgttttttgatgcttggctccctctgctgatctcagtttcctggcttttcctccctcagccccttctcacccctttgctgtcctgtgtagtgatttggtgagaaatcgttgctgcacccttcccccagcaccatttatgagtctcaagttttattattgcaataaaagtgctttatgccggcttttctcaaaaaaaaaaaaaaaaaaaaaaaaaaaaaaaaaaaaaaaaaaaaaaagaaaaaaaaaaaagaagaaaaaaaaagaaaaaaaaaaaagaaaaaaaaaaaaaaagtcgggaggacaacaagaaatccatccaacgcaagagaacagagacggcactgcgagcacaccatagctacccgcggcgtaccactctagcgcgtctcacagacgaggcgag

SEQ ID NO: 381763 - DNA, 1475 bp, Homo sapiens
cgtcgcgcgccgtgtggggcgcgcacgcagggctgggcgtgagggggcgtgcgcgtgcgcaggcgacgcgccgaggtactaggcagagccgtggaaccgccgccaggtcgctgttggtccacgccgcccgtcgcgccgcccgcccgctcagcgtccgccgccgccatgggagtgcaggtggaaaccatctccccaggagacgggcgcaccttccccaagcgcggccagacctgcgtggtgcactacaccgggatgcttgaagatggaaagaaatttgattcctcccgggacagaaacaagccctttaagtttatgctaggcaagcaggaggtgatccgaggctgggaagaaggggttgcccagatgagtgtgggtcagagagccaaactgactatatctccagattatgcctatggtgccactgggcacccaggcatcatcccaccacatgccactctcgtcttcgatgtggagcttctaaaactggaatgacaggaatggcctcctcccttagctccctgttcttggatctgccatggagggatctggtgcctccagacatgtgcacatgaatccatatggagcttttcctgatgttccactccactttgtatagacatctgccctgactgaattactctccaagttgagagatgtctttgggttaaattaaaagccctacctaaaactgaggtggggatggggagagcctttgcctccaccattcccacccaccctccccttaaaccctctgcctttgaaagtagatcatgttcactgcaatgctggacactacaggtatctgtccctgggccagcagggacctctgaagccttctttgtggccttttttttttttcatcctgtggtttttctaatggactttcaggaattttgtaatctcataactttccaagctccaccacttcctaaatcttaagaactttaattgacagtttcaattgaaggtgctgtttgtagacttaacacccagtgaaagcccagccatcatgacaaatccttgaatgttctcttaagaaaatgatgctggtcatcgcagcttcagcatctcctgttttttgatgcttggctccctctgctgatctcagtttcctggcttttcctccctcagccccttctcacccctttgctgtcctgtgtagtgatttggtgagaaatcgttgctgcacccttcccccagcaccatttatgagtctcaagttttattattgcaataaaagtgctttatgccggcttttctcaaaaaaaaaaaaaaaaaaaaaaaaaaaaaaaaaaaaaaaaaaaaaaagaaaaaaaaaaaagaagaaaaaaaaagaaaaaaaaaaaagaaaaaaaaaaaaaaagtcgggaggacaacaagaaatccatccaacgcaagagaacagagacggcactgcgagcacaccatagctacccgcggcgtaccactctagcgcgtctcacagacgaggcgag

SEQ ID NO: 381764 - DNA, 3405 bp, Homo sapiens
cgtcgcgcgccgtgtggggcgcgcacgcagggctgggcgtgagggggcgtgcgcgtgcgcaggcgacgcgccgaggtactaggcagagccgtggaaccgccgccaggtcgctgttggtccacgccgcccgtcgcgccgcccgcccgctcagcgtccgccgccgccatgggagtgcaggtggaaaccatctccccaggagacgggcgcaccttccccaagcgcggccagacctgcgtggtgcactacaccgggatgcttgaagatggaaagaaatttgattcctcccgggacagaaacaagccctttaagtttatgctaggcaagcaggaggtgatccgaggctgggaagaaggggttgcccagatgagtgtgggtcagagagccaaactgactatatctccagattatgcctatggtgccactgggcacccaggcatcatcccaccacatgccactctcgtcttcgatgtggagcttctaaaactggaatgacaggaatggcctcctcccttagctccctgttcttggatctgccatggagggatctggtgcctccagacatgtgcacatgaatccatatggagcttttcctgatgttccactccactttgtatagacatctgccctgactgaatgtgttctgtcactcagctttgcttccgacacctctgtttcctcttcccctttctcctcgtatgtgtgtttacctaaactatatgccataaacctcaagttactcattttattttgttttcattttggggtgaagattcagtttcagtcttttggatataggtttccaattaagtacatggtcaagtattaacagcaccatttatgagtctcaagttttattattgcaataaaagtgctttatgccggcttttctcaaaaaaaaaaaaaaaaaaaaaaactcgagactagttctccgctgctccagcctctggggcgcattccaaccttccagcctgcgacctgcggagaaaaaaaaattacttattttcttgccccatacataccttgaggcgagcaaaaaaattaaattttaaccatgagggaaatcgtgcacatccaggctggtcagtgtggcaaccagatcggtgccaagttctgggaggtgatcagtgatgaacatggcatcgaccccaccggcacctaccacggggacagcgacctgcagctggaccgcatctctgtgtactacaatgaagccacaggtggcaaatatgttcctcgtgccatcctggtggatctagaacctgggaccatggactctgttcgctcaggtccttttggccagatctttagaccagacaactttgtatttggtcagtctggggcaggtaacaactgggccaaaggccactacacagagggcgccgagctggttgattctgtcctggatgtggtacggaaggaggcagagagctgtgactgcctgcagggcttccagctgacccactcactgggcgggggcacaggctctggaatgggcactctccttatcagcaagatccgagaagaataccctgatcgcatcatgaataccttcagtgtggtgccttcacccaaagtgtctgacaccgtggtcgagccctacaatgccaccctctccgtccatcagttggtagagaatactgatgagacctattgcattgacaacgaggccctctatgatatctgcttccgcactctgaagctgaccacaccaacctacggggatctgaaccaccttgtctcagccaccatgagtggtgtcaccacctgcctccgtttccctggccagctcaatgctgacctccgcaagttggcagtcaacatggtccccttcccacgtctccatttctttatgcctggctttgcccctctcaccagccgtggaagccagcagtatcgagctctcacagtgccggaactcacccagcaggtcttcgatgccaagaacatgatggctgcctgtgacccccgccacggccgatacctcaccgtggctgctgtcttccgtggtcggatgtccatgaaggaggtcgatgagcagatgcttaacgtgcagaacaagaacagcagctactttgtggaatggatccccaacaatgtcaagacagccgtctgtgacatcccacctcgtggcctcaagatggcagtcaccttcattggcaatagcacagccatccaggagctcttcaagcgcatctcggagcagttcactgccatgttccgccggaaggccttcctccactggtacacaggcgagggcatggacgagatggagttcaccgaggctgagagcaacatgaacgacctcgtctctgagtatcagcagtaccaggatgccaccgcagaagaggaggaggatttcggtgaggaggccgaagaggaggcctaaggcagagcccccatcacctcaggcttctcagttcccttagccgtcttactcaactgcccctttcctctccctcagaatttgtgtttgctgcctctatcttgttttttgttttttcttctggggggggtctagaacagtgcctggcacatagtaggcgctcaataaatacttgtttgttgaatgtctcctctctctttccactctgggaaacctaggtttctgccattctgggtgaccctgtatttctttctggtgcccattccatttgtccagttaatacttcctcttaaaaatctccaagaagctgggtctccagatcccatttagaaccaaccaggtgctgaaaacacatgtagataatggccatcatcctaagcccaaagtagaaaatggtagaaggtagtgggtagaagtcactatataaggaaggggatgggattttccattctaaaagttttggagagggaaatccaggctattaaagtcactaaatttctaagtatgtccatttcccatctcagcttcaagggaggtgtcagcagtattatctccactttcaatctccctccaagctctactctggaggagtctgtcccactctgtcaagtggaatccttccctttccaactctacctccctcactcagctcctttcccctgatcagagaaagggatcaagggggttgggaggggggaaagagaccagccttggtccctaagcctccagaaacgtcttcttaatccccaccttttcttactcccaaaaaagaatgaacacccctgactctggagtggtgtatactgccacatcagtgtttgagtcagtccccagaggagaggggaaccctcctccatcttttttgcaacatctcatttcttccttttgctgttgcttcccccctcacacacttggttttgttctatcctacatttgagatttctattttatgttgaacttgctgctttttttcatattgaaaagatgacatcgccccaagagccaaaaataaatgggaattg

SEQ ID NO: 381765 - DNA, 860 bp, Homo sapiens
agtttgtataaaaaagtaggttggtattggtttggaatttttgggatattgtcgatctatgtgtctggacagtttcaattgaaggtgctgtttgtagacttaacacccagtgaaagcccagccatcatgacaaatccttgaatgttctcttaagaaaatgatgctggtcatcgcagcttcagcatctcctgttttttgatgcttggctccctctgctgatctcagtttcctggcttttcctccctcagccccttctcacccctttgctgtcctgtgtagtgatttggtgagaaatcgttgctgcacccttcccccagcaccatttatgagtctcaagttttattattgcaataaaagtgctttatgccggcttttctcaaaaaaaaaaaaaaaaaaaaaaaaaacaatgaaaacagcagagaaacacacacgaaaagcaaaacaaacacaaaaacaacgagaaaccgaggggcacccaaggcccacagcaaaaaaggccacaacacgcgagacacacaagcaaagacccagggagaaggagacaaacagcgcggacaaggagcccagcgcgacgcaaaaatgcggactaccgggcagaaggagagaggaacacggcgacggaagaacgcaagcaacaacagagaacagaagggcgaaccacagcgggacgaccaagcatacaccaggggaacaacaccaccataaacgcacaggacagaaacgtggcaacaagaaagcaccaacacccgccagcccgctcccgccagacaggtagcagagccacaccaaacccaacggagaacaaagaacaagaaagaagaggcgcaaaacacacgacccaacacgacaaaagcaaacac

SEQ ID NO: 381766 - DNA, 957 bp, Homo sapiens
  misc_feature (137)..(137): n is a, c, g, or t
  misc_feature (140)..(140): n is a, c, g, or t
gaacttggacttagaacttcaataataggggcgcacatctgggcgatgtcaaccggcgagtggcgtactcttactacatatacgagttagtaaggcatggcgatcatctcgaacggtgcgcagcgacgcgatctagnagncgtggaaccgccgccaggtcgctgttggtccacgccgcccgtcgcgccgcccgcccgctcagcgtccgccgccgccatgggagtgcaggtggaaaccatctccccaggagacggtgagtagtggcgcgcggcggctcggagtacctctgccgccgcgcgcatcggctcagcatgcccgtctctgtctcctcagggcgcaccttccccaagcgcggccagacctgcgtggtgcactacaccgggatgcttgaagatggaaagaaatttgattcctcccgggacagaaacaagccctttaagtttatgctaggcaagcaggaggtgatccgaggctgggaagaaggggttgcccagatgagtgtgggtcagagagccaaactgactatatctccagattatgcctatggtgccactgggcacccaggcatcatcccaccacatgccactctcgtcttcgatgtggagcttctaaaactggaatgacaggaatggcctcctcccttagctccctgttcttgggtaaggaaatggaatactgaagggcccttcactgcctttgctcctcccatgttatgcccagcgtttgatgggtagcagagagaacaaaaaacaccacaaggctatttttccccctgcattctttctgtattgagtatcctttcagtgttattagtgtatgctttgaatgtaaaaattggtcaccctaaggaaaggaattggcatgtgtatgttcccagttcaactcatggagatggcagctgtttaaatgtttttctatgtagtttataaattaaaactgaattgaggactatggaaa

SEQ ID NO: 381767 - DNA, 551 bp, Homo sapiens
ctggtcctggcttttgagaaaagagccagcagcctctggtcttgttgacaccatcatctgagagtggcaggccaccagagggaagggctaaggacagagccagatctggctgggccatctcaccttctggaggccgaacttgacccgggatggaaataatgaagcagccactggctttcccaaggcctgtgatcctcctggtcaccagaaatcccaagttcttatctcctgctcttccagtctcctctgttagggtactggttcccagcgcagagcttctgtgattaccagaagaacactgaaggagtcttcttgtctgtctggagccagctgagatggccctgagatccacagagcctcctccacgcccctggatggaggcgctcctgctcttccaccctttgtatctctcacttggcacccattcccgtaattaatcacaaactccgtctgagctattcctttctaagccatgccctctgtactctgacttgccccaaatagacagatgctcaataaatatttgctgattggctggaaaaacaaacaga

SEQ ID NO: 381768 - DNA, 417 bp, Homo sapiens
tcatactctataaaaataccaataataaaaatcctgtaaggaaaactaggaaactatagtcttatgtgggggagacttttcagcattagaaaactggaagctataaaagaagagatagctgtttgccttttcagatgctgaaactttgtaaatggtaaaagacatttaagtcaattgaagaacaccagattatgagaaaatatgcagtgcagaggaaaaataacatttaattgtgaatttcatatttaggaactcataaataaaaattagccaggccttgtggcacatgcctttagtcccaaccactcaggaggctgaggtaggaggattgcttgagcctgggaggttgaggcttcagtgagccgtgattgtgtcactacgctgcagtcttggtgacagagcaggactttgtttcca

SEQ ID NO: 381769 - DNA, 1420 bp, Homo sapiens
acaggccactgtcacctgccagcaggccagacagtccccagggtgatggacaaatcctgaagacatcagtgggtcttccctgtctcgatggctggcacgtccaggagtccaggagaaacaggtctttccatgcccaagttggtacctttttgggtgagaacactctgtatgtaccatttgtagaatcttggcacacatctgctgggtatcttcttcattcatacagcggaaacttgaactcagatctctcagccttttgtctcctttttcaaaccaagtcttgctgcacatcagagttgggaagcccgcctccaagcccggaagacccgcctcctctgtaaggttaaaggaggaagaggcagagattggaggttcaggcagtgacgtaacttgctgccttaggtggccttccgctctggcggctgtcgcgacgggggttcagggaatatttactgggcctctccgctccctctgctcttggaggtgccatgaggtcagttagctacgtgcagcgcgtggcgctggagttcagcgggagcctcttcccgcacgcaatctgcctcggagacgttgataacgatacggtaggtgcatgcgcaccgcaagagacagcctggatctgtgcagggacggggcaagggaagtggaagaggccgcccgagcgtgccacgtgagcgtgagcatgcgcgctgtggctagtttggagcgctagagagaaaaactttattgatagcttcagtgttcgtggttggttttgttccttgggaggttttgtttgttttttgagacaggctccgtctgtcacccaggctggagtgcagtggcttgatttcggctcaccgcaacctctgcctcccgggctcgagcgattctcctacctcagcctcccaaggggctgggattacaggcgcccgccaccacgcccgactaatttttgtgtttttagtagaggtggggtttcaccatgttggcccaaagtgctgggactacaggcctgagccatcgtgcccagcccttctcgttttttaaataaattaccacaggtcaagcaggtaaaacaatgcctggcacacagtttagtgctcacttaagtgttagtggtggtggtggtggtgttagtattttattctgtttttctgcaaatctttactgaactgctcattatgcaccaaggactctgctacattctaggaattcaaaaatgaacgagagagttccagtcctcagatagctcataatcaagctgtgtaatagtcaccggataataaaatgtaatgagatgcattgactaaagtatggagaggattctccggtggagcattaaagggaatagtgtctgatgctcttttttttgcagactttatcttttcatttatcatctatttcatagttctaatgcaaagcactgtattgccccctt

SEQ ID NO: 381770 - DNA, 287 bp, Homo sapiens
tgaaggaggagcagaagagcaacacggcagggagccagtctcagataagaaaaccaagactcagaagttaaatggaaaggtgaggtctctgaactaatccagactctcccatgaggttcctttggcaagtcctgggcttctgtcctcatctgcaaaatcgaaagcattcctgaggtttcttccagctctgcatcctgtaggattccaagaatgtaaaactgcatgtaaccgtggaacatctagagataagtcttagtttatgtaacattaaaactgtctagtgagga

SEQ ID NO: 381771 - DNA, 2871 bp, Homo sapiens
acaggccactgtcacctgccagcaggccagacagtccccagggtgatggacaaatcctgaagacatcagtgggtcttccctgtctcgatggctggcacgtccaggagtccaggagaaacaggtctttccatgcccaagttggtacctttttgggtgagaacactctgtatgtaccatttgtagaatcttggcacacatctgctgggtatcttcttcattcatacagcggaaacttgaactcagatctctcagccttttgtctcctttttcaaaccaagtcttgctgcacatcagagttgggaagcccgcctccaagcccggaagacccgcctcctctgtaaggttaaaggaggaagaggcagagattggaggttcaggcagtgacgtaacttgctgccttaggtggccttccgctctggcggctgtcgcgacgggggttcagggaatatttactgggcctctccgctccctctgctcttggaggtgccatgaggtcagttagctacgtgcagcgcgtggcgctggagttcagcgggagcctcttcccgcacgcaatctgcctcggagacgttgataacgatacgttaaatgaactggtggtgggagacaccagcgggaaggtgtctgtgtataaaaatgatgacagtcggccatggctcacctgttcctgccagggaatgctgacttgcgttggggttggagacgtgtgtaataaaggaaagaacctgttggtggcagtgagtgctgaaggctggtttcatttgtttgacctgacacctgccaaggtgttggatgcttctgggcaccacgagacactaatcggagaggagcagcgtccagtcttcaagcagcacatccctgccaacaccaaggtcatgctgatcagcgacatcgatggagatgggtgtcgtgagctggtggtgggctacacagaccgtgtggtgcgagctttccgctgggaggagctaggtgagggtcctgaacatctgacagggcagctggtgtccctcaagaaatggatgctggagggtcaggtggacagcctctcagtgactctggggccactgggtcttcctgaactgatggtgtctcagccaggttgtgcgtatgcaattctactgtgtacctggaaaaaggacactgggtcccctcctgcctctgaagggcccacggatggtagtagggagaccccagctgcccgagacgtggtgctgcaccagacatctggccgtatccacaacaagaatgtctccactcacctaattggcaacatcaaacaaggccacggcactgagagtagtggctctggcctctttgccctgtgcaccctggatgggacactgaagctcatggaagaaatggaagaagcagacaagctgctgtggtcagtgcaggtggatcaccagctctttgccctggagaaactggatgtcaccggcaacgggcatgaggaggtagttgcatgcgcctgggatggacagacatatatcattgatcacaaccgcaccgtcgtccgcttccaagtggatgaaaatatccgtgccttctgtgcaggcctgtacgcctgcaaagagggccgcaacagcccctgcctcgtatatgtcactttcaaccagaagatctatgtgtactgggaggtgcagctggagcggatggagtctaccaatctggtgaaactgctggagaccaagccggagtaccacagcctgctgcaggagctgggcgtggatcctgacgacctccctgtgactcgtgccctgcttcaccaaacgctctaccatccagaccagccaccacagtgtgctccctcaagcctccaggatcccacctagctgtacttgcctcatagctggtgaaggattcttctgaacccccaccctaccccctaaaggtatctgtggtattggcaggatagggaatatgcattacagaaatgcaggatttgactctgggcatgaaagatggcagcagccctagggtgaccgtgaactatagacctcgcagtcttttcggtgaaagaagagacaagttgaccctctgcccatttccttatggacctcacccatcatgccagcagggtcataggaccctggccttgttccaaatcatctgggacatgacccactccccactgtcactgtgttgaaaacagagacttgtttgtgtggccccaacacccataaggaaaccaggctttaggcccaggggagcagtggaggtaagggctccaccccatcttaagctctgtcttccgtggcacaattccaagttcttgacgttagtaattgttaaaggaatggcaaactgttttgttttgaaggatctttctacagtctggtcttacccatgttcctagcaaccctgagatgattttcttccatttaccaaagcagccgggtcagtgctttctcacgttgccgtattcttcaggtattagtcagcttcagaagccctgctcccatttttccacccacccattcccccataaaacagcttattgtctccaagacaatagacatttaaaatgtgatgcgggtttatgatccagaccacaatcagaattatatcttgggtcatttatgtgccgtctgttcttgattctctatgctctaaatcggtgtttttcaaactgtggttgcagtcctttggtggattatggccagcattttttaaataggtagaatagaataaagtaaaatagaaaatagcagagtacattgctctcagtgtaggtaagtattgttttgttagtcatatgtgcatgtgtgtactgagtgccatgtaaaatgtattcctgctgtggtaagctgtggtcgaggagtttgaaagccattgctttcaaattcctctcaattatactgaccctagtca

SEQ ID NO: 381772 - DNA, 2941 bp, Homo sapiens
acaggccactgtcacctgccagcaggccagacagtccccagggtgatggacaaatcctgaagacatcagtgggtcttccctgtctcgatggctggcacgtccaggagtccaggagaaacaggtctttccatgcccaagttggtacctttttgggtgagaacactctgtatgtaccatttgtagaatcttggcacacatctgctgggtatcttcttcattcatacagcggaaacttgaactcagatctctcagccttttgtctcctttttcaaaccaagtcttgctgcacatcagagttgggaagcccgcctccaagcccggaagacccgcctcctctgtaaggttaaaggaggaagaggcagagattggaggttcaggcagtgacgtaacttgctgccttaggtggccttccgctctggcggctgtcgcgacgggggttcagggaatatttactgggcctctccgctccctctgctcttggaggtgccatgaggtcagttagctacgtgcagcgcgtggcgctggagttcagcgggagcctcttcccgcacgcaatctgcctcggagacgttgataacgatacgttaaatgaactggtggtgggagacaccagcgggaaggtgtctgtgtataaaaatgatgacagtcggccatggctcacctgttcctgccagggaatgctgacttgcgttggggttggagacgtgtgtaataaaggaaagaacctgttggtggcagtgagtgctgaaggctggtttcatttgtttgacctgacacctgccaaggtgttggatgcttctgggcaccacgagacactaatcggagaggagcagcgtccagtcttcaagcagcacatccctgccaacaccaaggtcatgctgatcagcgacatcgatggagatgggtgtcgtgagctggtggtgggctacacagaccgtgtggtgcgagctttccgctgggaggagctaggtgagggtcctgaacatctgacagggcagctggtgtccctcaagaaatggatgctggagggtcaggtggacagcctctcagtgactctggggccactgggtcttcctgaactgatggtgtctcagccaggttgtgcgtatgcaattctactgtgtacctggaaaaaggacactgggtcccctcctgcctctgaagggcccacggatggtagtagggagaccccagctgcccgagacgtggtgctgcaccagacatctggccgtatccacaacaagaatgtctccactcacctaattggcaacatcaaacaaggccacggcactgagagtagtggctctggcctctttgccctgtgcaccctggatgggacactgaagctcatggaagaaatggaagaagcagacaagctgctgtggtcagtgcaggtggatcaccagctctttgccctggagaaactggatgtcaccggcaacgggcatgaggaggtagttgcatgcgcctgggatggacagacatatatcattgatcacaaccgcaccgtcgtccgcttccaagtggatgaaaatatccgtgccttctgtgcaggcctgtacgcctgcaaagagggccgcaacagcccctgcctcgtatatgtcactttcaaccagaagatctatgtgtactgggaggtgcagctggagcggatggagtctaccaatctggtgaaactgctggagaccaagccggagtaccacagcctgctgcaggagctgggcgtgggtgagtcccagaaaagccagtggcccgagtgcccaggagacccacagcatgctgcaggagctgggcgtggatcctgacgacctccctgtgactcgtgccctgcttcaccaaacgctctaccatccagaccagccaccacagtgtgctccctcaagcctccaggatcccacctagctgtacttgcctcatagctggtgaaggattcttctgaacccccaccctaccccctaaaggtatctgtggtattggcaggatagggaatatgcattacagaaatgcaggatttgactctgggcatgaaagatggcagcagccctagggtgaccgtgaactatagacctcgcagtcttttcggtgaaagaagagacaagttgaccctctgcccatttccttatggacctcacccatcatgccagcagggtcataggaccctggccttgttccaaatcatctgggacatgacccactccccactgtcactgtgttgaaaacagagacttgtttgtgtggccccaacacccataaggaaaccaggctttaggcccaggggagcagtggaggtaagggctccaccccatcttaagctctgtcttccgtggcacaattccaagttcttgacgttagtaattgttaaaggaatggcaaactgttttgttttgaaggatctttctacagtctggtcttacccatgttcctagcaaccctgagatgattttcttccatttaccaaagcagccgggtcagtgctttctcacgttgccgtattcttcaggtattagtcagcttcagaagccctgctcccatttttccacccacccattcccccataaaacagcttattgtctccaagacaatagacatttaaaatgtgatgcgggtttatgatccagaccacaatcagaattatatcttgggtcatttatgtgccgtctgttcttgattctctatgctctaaatcggtgtttttcaaactgtggttgcagtcctttggtggattatggccagcattttttaaataggtagaatagaataaagtaaaatagaaaatagcagagtacattgctctcagtgtaggtaagtattgttttgttagtcatatgtgcatgtgtgtactgagtgccatgtaaaatgtattcctgctgtggtaagctgtggtcgaggagtttgaaagccattgctttcaaattcctctcaattatactgaccctagtca

SEQ ID NO: 381773 - DNA, 2817 bp, Homo sapiens
acaggccactgtcacctgccagcaggccagacagtccccagggtgatggacaaatcctgaagacatcagtgggtcttccctgtctcgatggctggcacgtccaggagtccaggagaaacaggtctttccatgcccaagttggtacctttttgggtgagaacactctgtatgtaccatttgtagaatcttggcacacatctgctgggtatcttcttcattcatacagcggaaacttgaactcagatctctcagccttttgtctcctttttcaaaccaagtcttgctgcacatcagagttgggaagcccgcctccaagcccggaagacccgcctcctctgtaaggttaaaggaggaagaggcagagattggaggttcaggcagtgacgtaacttgctgccttaggtggccttccgctctggcggctgtcgcgacgggggttcagggaatatttactgggcctctccgctccctctgctcttggaggtgccatgaggtcagttagctacgtgcagcgcgtggcgctggagttcagcgggagcctcttcccgcacgcaatctgcctcggagacgttgataacgatacgttaaatgaactggtggtgggagacaccagcgggaaggtgtctgtgtataaaaatgatgacagtcggccatggctcacctgttcctgccagggaatgctgacttgcgttggggttggagacgtgtgtaataaaggaaagaacctgttggtggcagtgagtgctgaaggctggtttcatttgtttgacctgacacctgccaaggtgttggatgcttctgggcaccacgagacactaatcggagaggagcagcgtccagtcttcaagcagcacatccctgccaacaccaaggtcatgctgatcagcgacatcgatggagatgggtgtcgtgagctggtggtgggctacacagaccgtgtggtgcgagctttccgctgggaggagctaggtgagggtcctgaacatctgacagggcagctggtgtccctcaagaaatggatgctggagggtcaggtggacagcctctcagtgactctggggccactgggtcttcctgaactgatggtgtctcagccaggttgtgcgtatgcaattctactgtgtacctggaaaaaggacactgggtcccctcctgcctctgaagggcccacggatggtagtagggagaccccagctgcccgagacgtggtgctgcaccagacatctggccgtatccacaacaagaatgtctccactcacctaattggcaacatcaaacaagggacactgaagctcatggaagaaatggaagaagcagacaagctgctgtggtcagtgcaggtggatcaccagctctttgccctggagaaactggatgtcaccggcaacgggcatgaggaggtagttgcatgcgcctgggatggacagacatatatcattgatcacaaccgcaccgtcgtccgcttccaagtggatgaaaatatccgtgccttctgtgcaggcctgtacgcctgcaaagagggccgcaacagcccctgcctcgtatatgtcactttcaaccagaagatctatgtgtactgggaggtgcagctggagcggatggagtctaccaatctggtgaaactgctggagaccaagccggagtaccacagcctgctgcaggagctgggcgtggatcctgacgacctccctgtgactcgtgccctgcttcaccaaacgctctaccatccagaccagccaccacagtgtgctccctcaagcctccaggatcccacctagctgtacttgcctcatagctggtgaaggattcttctgaacccccaccctaccccctaaaggtatctgtggtattggcaggatagggaatatgcattacagaaatgcaggatttgactctgggcatgaaagatggcagcagccctagggtgaccgtgaactatagacctcgcagtcttttcggtgaaagaagagacaagttgaccctctgcccatttccttatggacctcacccatcatgccagcagggtcataggaccctggccttgttccaaatcatctgggacatgacccactccccactgtcactgtgttgaaaacagagacttgtttgtgtggccccaacacccataaggaaaccaggctttaggcccaggggagcagtggaggtaagggctccaccccatcttaagctctgtcttccgtggcacaattccaagttcttgacgttagtaattgttaaaggaatggcaaactgttttgttttgaaggatctttctacagtctggtcttacccatgttcctagcaaccctgagatgattttcttccatttaccaaagcagccgggtcagtgctttctcacgttgccgtattcttcaggtattagtcagcttcagaagccctgctcccatttttccacccacccattcccccataaaacagcttattgtctccaagacaatagacatttaaaatgtgatgcgggtttatgatccagaccacaatcagaattatatcttgggtcatttatgtgccgtctgttcttgattctctatgctctaaatcggtgtttttcaaactgtggttgcagtcctttggtggattatggccagcattttttaaataggtagaatagaataaagtaaaatagaaaatagcagagtacattgctctcagtgtaggtaagtattgttttgttagtcatatgtgcatgtgtgtactgagtgccatgtaaaatgtattcctgctgtggtaagctgtggtcgaggagtttgaaagccattgctttcaaattcctctcaattatactgaccctagtca

SEQ ID NO: 381774 - DNA, 2561 bp, Homo sapiens
acaggccactgtcacctgccagcaggccagacagtccccagggtgatggacaaatcctgaagacatcagtgggtcttccctgtctcgatggctggcacgtccaggagtccaggagaaacaggtctttccatgcccaagttggtacctttttgggtgagaacactctgtatgtaccatttgtagaatcttggcacacatctgctgggtatcttcttcattcatacagcggaaacttgaactcagatctctcagccttttgtctcctttttcaaaccaagtcttgctgcacatcagagttgggaagcccgcctccaagcccggaagacccgcctcctctgtaaggttaaaggaggaagaggcagagattggaggttcaggcagtgacgtaacttgctgccttaggtggccttccgctctggcggctgtcgcgacgggggttcagggaatatttactgggcctctccgctccctctgctcttggaggtgccatgaggtcagttagctacgtgcagcgcgtggcgctggagttcagcgggagcctcttcccgcacgcaatctgcctcggagacgttgataacgatacgatggagatgggtgtcgtgagctggtggtgggctacacagaccgtgtggtgcgagctttccgctgggaggagctaggtgagggtcctgaacatctgacagggcagctggtgtccctcaagaaatggatgctggagggtcaggtggacagcctctcagtgactctggggccactgggtcttcctgaactgatggtgtctcagccaggttgtgcgtatgcaattctactgtgtacctggaaaaaggacactgggtcccctcctgcctctgaagggcccacggatggtagtagggagaccccagctgcccgagacgtggtgctgcaccagacatctggccgtatccacaacaagaatgtctccactcacctaattggcaacatcaaacaaggccacggcactgagagtagtggctctggcctctttgccctgtgcaccctggatgggacactgaagctcatggaagaaatggaagaagcagacaagctgctgtggtcagtgcaggtggatcaccagctctttgccctggagaaactggatgtcaccggcaacgggcatgaggaggtagttgcatgcgcctgggatggacagacatatatcattgatcacaaccgcaccgtcgtccgcttccaagtggatgaaaatatccgtgccttctgtgcaggcctgtacgcctgcaaagagggccgcaacagcccctgcctcgtatatgtcactttcaaccagaagatctatgtgtactgggaggtgcagctggagcggatggagtctaccaatctggtgaaactgctggagaccaagccggagtaccacagcctgctgcaggagctgggcgtggatcctgacgacctccctgtgactcgtgccctgcttcaccaaacgctctaccatccagaccagccaccacagtgtgctccctcaagcctccaggatcccacctagctgtacttgcctcatagctggtgaaggattcttctgaacccccaccctaccccctaaaggtatctgtggtattggcaggatagggaatatgcattacagaaatgcaggatttgactctgggcatgaaagatggcagcagccctagggtgaccgtgaactatagacctcgcagtcttttcggtgaaagaagagacaagttgaccctctgcccatttccttatggacctcacccatcatgccagcagggtcataggaccctggccttgttccaaatcatctgggacatgacccactccccactgtcactgtgttgaaaacagagacttgtttgtgtggccccaacacccataaggaaaccaggctttaggcccaggggagcagtggaggtaagggctccaccccatcttaagctctgtcttccgtggcacaattccaagttcttgacgttagtaattgttaaaggaatggcaaactgttttgttttgaaggatctttctacagtctggtcttacccatgttcctagcaaccctgagatgattttcttccatttaccaaagcagccgggtcagtgctttctcacgttgccgtattcttcaggtattagtcagcttcagaagccctgctcccatttttccacccacccattcccccataaaacagcttattgtctccaagacaatagacatttaaaatgtgatgcgggtttatgatccagaccacaatcagaattatatcttgggtcatttatgtgccgtctgttcttgattctctatgctctaaatcggtgtttttcaaactgtggttgcagtcctttggtggattatggccagcattttttaaataggtagaatagaataaagtaaaatagaaaatagcagagtacattgctctcagtgtaggtaagtattgttttgttagtcatatgtgcatgtgtgtactgagtgccatgtaaaatgtattcctgctgtggtaagctgtggtcgaggagtttgaaagccattgctttcaaattcctctcaattatactgaccctagtca

SEQ ID NO: 381775 - DNA, 2455 bp, Homo sapiens
acaggccactgtcacctgccagcaggccagacagtccccagggtgatggacaaatcctgaagacatcagtgggtcttccctgtctcgatggctggcacgtccaggagtccaggagaaacaggtctttccatgcccaagttggtacctttttgggtgagaacactctgtatgtaccatttgtagaatcttggcacacatctgctgggtatcttcttcattcatacagcggaaacttgaactcagatctctcagccttttgtctcctttttcaaaccaagtcttgctgcacatcagagttgggaagcccgcctccaagcccggaagacccgcctcctctgtaaggttaaaggaggaagaggcagagattggaggttcaggcagtgacgtaacttgctgccttaggtggccttccgctctggcggctgtcgcgacgggggttcagggaatatttactgggcctctccgctccctctgctcttggaggtgccatgaggtcagttagctacgtgcagcgcgtggcgctggagttcagcgggagcctcttcccgcacgcaatctgcctcggagacgttgataacgatacgttaaatgaactggtggtgggagacaccagcgggaaggtgtctgtgtataaaaatgatgacagtcggccatggctcacctgttcctgccagggaatgctgacttgcgttggggttggagacgtgtgtaataaaggaaagaacctgttggtggcagtgagtgctgaaggctggtttcatttgtttgacctgacacctgccaaggtgttggatgcttctgggcaccacgagacactaatcggagaggagcagcgtccagtcttcaagcagcacatccctgccaacaccaaggtcatgctgatcagcgacatcgatggagatgggtgtcgtgagctggtggtgggctacacagaccgtgtggtgcgagctttccgctgggaggagctaggtgagggtcctgaacatctgacagggcagctggtgtccctcaagaaatggatgctggagggtcaggtggacagcctctcagtgactctggggccactgggtcttcctgaactgatggtgtctcagccaggttgtgcgtatgcaattctactgtgtacctggaaaaaggacactgggtcccctcctgcctctgaagggcccacggatggtagtagggagaccccagctgcccgagacgtggtgctgcaccagacatctggccgtatccacaacaagaatgtctccactcacctaattggcaacatcaaacaaggccacggcactgagagtagtggctctggcctctttgccctgtgcaccctggatgggacactgaagctcatggaagaaatggaagaagcagacaagctgctgtggtcagtgcaggtggatcaccagctctttgccctggagaaactggatgtcaccggcaacgggcatgaggaggtagttgcatgcgcctgggatggacagacatatatcattgatcacaaccgcaccgtcgtccgcttccaagtggatgaaaatatccgtgccttctgtgcaggcctgtacgcctgcaaagagggccgcaacagcccctgcctcgtatatgtcactttcaaccagaagatctatgtgtactgggaggtgcagctggagcggatggagtctaccaatctggtgaaactgctggagaccaagccggagtaccacagcctgctgcaggagctgggcgtggatcctgacgacctccctgtgactcgtgccctgcttcaccaaacgctctaccatccagaccagccaccacagtgtgctccctcaagcctccaggatcccacctagctgtacttgcctcatagctggtgaaggattcttctgaacccccaccctaccccctaaaggcgtctttggatcacactgcgcggctgctggctccatcacaaaacaatgaaggaggaagtgggacgcagagagaaacgcacatggggagaacgccacgtgaaggctgaggtcgggataatgcatctgcaagccaaggaacacctaagaggaccagcaaaccaccagaagccaggggagaggcgtggaacagaccctgccttacagctgtcagaaggaaccaaccctgccaacaccttcctgttgtactttcagcttccagaactaaaaaagagaaaaaagcagggtaagaagagaaagtggtggagctgagctgggcagagtggctcttttagaagcgatgacatttacacataggtcactatggagagggccatgcagacacctggaggagtgccacagacacagggaagagtgcaggctttctcctctgggcctgtcagatctactgaagacaggaatgaagttgttttccagaattctcctgtccagcaagggccgcaggcagcccgtgctgccaggagagcacacctccctactgccatcccaaagaggtggatcttcca

SEQ ID NO: 381776 - DNA, 1485 bp, Homo sapiens
tttttttttacaaagaaggtataactttaataaccctatttacagataagaaaaccaagactcagaagttaaatggaaaggtgaggtctctgaactaatccagactctcccatgaggttcctttggcaagtcctgggcttctgtcctcatctgcaaaatcgaaagcattcctgaggtttcttccagctctgcatcatcagagttgggaagcccgcctccaagcccggaagacccgcctcctctgtaaggttaaaggaggaagaggcagagattggaggttcaggcagtgacgtaacttgctgccttaggtggccttccgctctggcggctgtcgcgacgggggttcagggaatatttactgggcctctccgctccctctgctcttggaggtgccatgaggtcagttagctacgtgcagcgcgtggcgctggagttcagcgggagcctcttcccgcacgcaatctgcctcggagacgttgataacgatacgttaaatgaactggtggtgggagacaccagcgggaaggtgtctgtgtataaaaatgatgacagtcggccatggctcacctgttcctgccagggaatgctgacttgcgttggggttggagacgtgtgtaataaaggaaagaacctgttggtggcagtgagtgctgaaggctggtttcatttgtttgacctgacacctgccaaggtgttggatgcttctgggcaccacgagacactaatcggagaggagcagcgtccagtcttcaagcagcacatccctgccaacaccaaggtcatgctgatcagcgacatcgagatgggtgtcgtgagctggtggtgggctacacagaccgtgtggtgcgagctttccgctgggaggagctaggtgagggtcctgaacatctgacagggcagctggtgtccctcaagaaatggatgctggaggctcccatgataagccaggcatcactcaaggcactggaattgccatagtgaataaatagacaaaaattgctgccctcctgggccttattatgaagaaacagaaaagaaacaatataggctaggtgtgctgcctctcgcctgtgataccaacgctttgggaggctgagatgggaggatcacttgaggccaggagttccaggctgtagtgagctatgatctcaccactgcactccactccagcgtgggaccctgtctctatttaaaaaaggaaaagaaaagaaaaactatacattttgtaagataattaagtagtatattagaaggtagtaagtacacggccagacgtgatggctcatccctataatcccacgactttgggaggccaaggcaggcagatcacttgagttcaggagtttgagaccagcctggcccacacggtgaaactctgtccctactaaactgaggcaggagaatcgcttgaacccgggagacggatgttgcagtgacccaggatcatgccactgcactctagcctaggcaacagactccgtctcc

SEQ ID NO: 381777 - DNA, 1570 bp, Homo sapiens
acaggccactgtcacctgccagcaggccagacagtccccagggtgatggacaaatcctgaagacatcagtgggtcttccctgtctcgatggctggcacgtccaggagtccaggagaaacaggtctttccatgcccaagttggtacctttttgggtgagaacactctgtatgtaccatttgtagaatcttggcacacatctgctgggtatcttcttcattcatacagcggaaacttgaactcagatctctcagccttttgtctcctttttcaaaccaagtcttgctgcacatcagagttgggaagcccgcctccaagcccggaagacccgcctcctctgtaaggttaaaggaggaagaggcagagattggaggttcaggcagtgacgtaacttgctgccttaggtggccttccgctctggcggctgtcgcgacgggggttcagggaatatttactgggcctctccgctccctctgctcttggaggtgccatgaggtcagttagctacgtgcagcgcgtggcgctggagttcagcgggagcctcttcccgcacgcaatctgcctcggagacgttgataacgatacgttaaatgaactggtggtgggagacaccagcgggaaggtgtctgtgtataaaaatgatgacagtcggccatggctcacctgttcctgccagggaatgctgacttgcgttggggttggagacgtgtgtaataaaggaaagaacctgttggtggcagtgagtgctgaaggctggtttcatttgtttgacctgacacctgccaaggtgttggatgcttctgggcaccacgagacactaatcggagaggagcagcgtccagtcttcaagcagcacatccctgccaacaccaaggtcatgctgatcagcgacatcgtgggcatgcctacctttgcaggcagccaggagagtaggagtcagtggatactagagcatatcccaagggattggggtgagagggagaatccgtattcatgtatgcatttgttatgtgctgagctcccatgataagccaggcatcactcaaggcactggaattgccatagtgaataaatagacaaaaattgctgccctcctgggccttattatgaagaaacagaaaagaaacaatataggctaggtgtgctgcctctcgcctgtgataccaacgctttgggaggctgagatgggaggatcacttgaggccaggagttccaggctgtagtgagctatgatctcaccactgcactccactccagcgtgggaccctgtctctatttaaaaaaggaaaagaaaagaaaaactatacattttgtaagataattaagtagtatattagaaggtagtaagtacacggccagacgtgatggctcatccctataatcccacgactttgggaggccaaggcaggcagatcacttgagttcaggagtttgagaccagcctggcccacacggtgaaactctgtccctactaaactgaggcaggagaatcgcttgaacccgggagacggatgttgcagtgacccaggatcatgccactgcactctagcctaggcaacagactccgtctcc

SEQ ID NO: 381778 - DNA, 291 bp, Homo sapiens
ccttcccctgctgctgcagaacacccctctccccgtaggctctgaccttgccctgccctttacatattcttcctctggtcctcacaggccacggcactgagagtagtggctctggcctctttgccctgtgcaccctggatggtgagcaatgctaggatggggtgtgggggctgtatgcctgtagggtctgctcggggcctatcccacccacactcagcctgcctctcccccggcagggacactgaagctcatggaagaaatggaagaagcagacaagctgctgtggtcagt

SEQ ID NO: 381779 - DNA, 749 bp, Homo sapiens
acaaaaattgctgccctcctgggccttattatgaagaaacagaaaagaaacaatataggctaggtgtgctgcctctcgcctgtgataccaacgctttgggaggctgagatgggaggatcacttgaggccaggagttccaggctgtagtgagctatgatctcaccactgcactccactccagcgtgggaccctgtctctatttaaaaaaggaaaagaaaagaaaaactatacattttgtaagataattaagtagtatattagaaggtagtaagtacacggccagacgtgatggctcatccctataatcccacgactttgggaggccaaggcaggcagatcacttgagttcaggagtttgagaccagcctggcccacacggtgaaactctgtccctactaaaaatacaaaaagtagccaggcatggtggcaggcacctgttatcccagctactcaggagactgaggcaggagaatcgcttgaacccgggagacggatgttgcagtgacccaggatcatgccactgcactctagcctaggcaacagactccgtctccaaaaaaaaaaagaaaataagtgcagccgaccacggtggttcacgcctgtaatcccagcacttcgagagcactttgagaggctaaggcaggcggatcccttaagctcaggtgttcgagaccagcctgaccaacatagtgaaaccccgtctccagtaaaaatacaaaaattgggctgggcacggtggctcacgcctg

SEQ ID NO: 381780 - DNA, 395 bp, Homo sapiens
cctgaatcagcaggtaggggctatactttatattgccatcaggcatgcttgttggtttaggagaagaggcagacctgggtttgaatcctgattctgctgcctcctagctgagtggccttgggtgagtgactctatttctatgagctgaggtttcctcagtataaaattgcctacttcctagggtggctgtgagcattatgtgaggtggctcatttgacagttgcgtttactgccgaacccacgggtgaaattcctccccagctcgctgtttgtcatccagaatccagtccacagctcctttatgttccttttgtctctgtcctttttcagggcaacgggcatgaggaggtagttgcatgcgcctgggatggacagacatatatcattgatcacaa

SEQ ID NO: 381781 - DNA, 565 bp, Homo sapiens
tcctgcctctgaagggcccacggatggtagtaggtaagggggtacaggccagtggatggtgtgggggtgcatggaagcaggatgggctcccagatgccacatggtagtaaaatgggtctgcagttggcagagctgcctcatctaggtcccaacccaagcacctttgccccactggggaagattactttaagaccaagggaatcctgggctctaactttgtagcacctgaaagaggtcctgagattccaacctggcagccccatccctgtcttttctgtttgccacatgggccagatagggtcagtggtaggtttctaagctgattcaaatcccagaagctcttgcagggataggggttacaaagggctggagagctcagctcacttggtctcccgcttgatccgtccacctgctgtgcacagggagaccccagctgcccgagacgtggtgctgcaccagacatctggccgtatccacaacaagaatgtctccactcacctaattggcaacatcaaacaaggtgaaagtgtggtgggtgtgagggagggagatgaggggtagccgt

SEQ ID NO: 381782 - DNA, 1183 bp, Homo sapiens
acggtctgcagccctgtggagaaaaggagtggcccgtgggcctgtcactcacatcagagttgggaagcccgcctccaagcccggaagacccgcctcctctgtaaggttaaaggaggaagaggcagagattggaggttcaggcagtgacgtaacttgctgccttaggtggccttccgctctggcggctgtcgcgacgggggttcagggaatatttactgggcctctccgctccctctgctcttggaggtgccatgaggtcagttagctacgtgcagcgcgtggcgctggagttcagcgggagcctcttcccgcacgcaatctgcctcggagacgttgataacgatacggtaggtgcatgcgcaccgcaagagacagcctggatctgtgcagggacggggcaagggaagtggaagaggccgcccgagcgtgccacgtgagcgtgagcatgcgcgctgtggctagtttggagcgctagagagaaaaactttattgatagcttcagtgttcgtggttggttttgttccttgggaggttttgtttgttttttgagacaggctccgtctgtcacccaggctggagtgcagtggcttgatttcggctcaccgcaacctctgcctcccgggctcgagcgattctcctacctcagcctcccaaggggctgggattacaggcgcccgccaccacgcccgactaatttttgtgtttttagtagaggtggggtttcaccatgttggcccaaagtgctgggactacaggcctgagccatcgtgcccagcccttctcgttttttaaataaattaccacaggtcaagcaggtaaaacaatgcctggcacacagtttagtgctcacttaagtgttagtggtggtggtggtggtgttagtattttattctgtttttctgcaaatctttactgaactgctcattatgcaccaaggactctgctacattctaggaattcaaaaatgaacgagagagttccagtcctcagatagctcataatcaagctgtgtaatagtcaccggataataaaatgtaatgagatgcattgactaaagtatggagaggattctccggtggagcattaaagggaatagtgtctgatgctcttttttttgcagactttatcttttcatttatcatctatttcatagttctaatgcaaagcactgtattgccccctt

SEQ ID NO: 381783 - DNA, 2970 bp, Homo sapiens
acaggccactgtcacctgccagcaggccagacagtccccagggtgatggacaaatcctgaagacatcagtgggtcttccctgtctcgatggctggcacgtccaggagtccaggagaaacaggtctttccatgcccaagttggtacctttttgggtgagaacactctgtatgtaccatttgtagaatcttggcacacatctgctgggtatcttcttcattcatacagcggaaacttgaactcagatctctcagccttttgtctcctttttcaaaccaagtcttgctgcacatcagagttgggaagcccgcctccaagcccggaagacccgcctcctctgtaaggttaaaggaggaagaggcagagattggaggttcaggcagtgacgtaacttgctgccttaggtggccttccgctctggcggctgtcgcgacgggggttcagggaatatttactgggcctctccgctccctctgctcttggaggtgccatgaggtcagttagctacgtgcagcgcgtggcgctggagttcagcgggagcctcttcccgcacgcaatctgcctcggagacgttgataacgatacgttaaatgaactggtggtgggagacaccagcgggaaggtgtctgtgtataaaaatgatgacagtcggccatggctcacctgttcctgccagggaatgctgacttgcgttggggttggagacgtgtgtaataaaggaaagaacctgttggtggcagtgagtgctgaaggctggtttcatttgtttgacctgacacctgccaaggtgttggatgcttctgggcaccacgagacactaatcggagaggagcagcgtccagtcttcaagcagcacatccctgccaacaccaaggtcatgctgatcagcgacatcgatggagatgggtgtcgtgagctggtggtgggctacacagaccgtgtggtgcgagctttccgctgggaggagctaggtgagggtcctgaacatctgacagggcagctggtgtccctcaagaaatggatgctggagggtcaggtggacagcctctcagtgactctggggccactgggtcttcctgaactgatggtgtctcagccaggttgtgcgtatgcaattctactgtgtacctggaaaaaggacactgggtcccctcctgcctctgaagggcccacggatggtagtagggagaccccagctgcccgagacgtggtgctgcaccagacatctggccgtatccacaacaagaatgtctccactcacctaattggcaacatcaaacaaggccacggcactgagagtagtggctctggcctctttgccctgtgcaccctggatgggacactgaagctcatggaagaaatggaagaagcagacaagctgctgtggtcagtgcaggtggatcaccagctctttgccctggagaaactggatgtcaccggcaacgggcatgaggaggtagttgcatgcgcctgggatggacagacatatatcattgatcacaaccgcaccgtcgtccgcttccaagtggatgaaaattggaaaactaaatttcccccgggcgtggccccttccttggggttgcaggcctgtacgcctgcaaagagggccgcaacagcccctgcctcgtatatgtcactttcaaccagaagatctatgtgtactgggaggtgcagctggagcggatggagtctaccaatctggtgaaactgctggagaccaagccggagtaccacagcctgctgcaggagctgggcgtgggtgagtcccagaaaagccagtggcccgagtgcccaggagacccacagcatgctgcaggagctgggcgtggatcctgacgacctccctgtgactcgtgccctgcttcaccaaacgctctaccatccagaccagccaccacagtgtgctccctcaagcctccaggatcccacctagctgtacttgcctcatagctggtgaaggattcttctgaacccccaccctaccccctaaaggtatctgtggtattggcaggatagggaatatgcattacagaaatgcaggatttgactctgggcatgaaagatggcagcagccctagggtgaccgtgaactatagacctcgcagtcttttcggtgaaagaagagacaagttgaccctctgcccatttccttatggacctcacccatcatgccagcagggtcataggaccctggccttgttccaaatcatctgggacatgacccactccccactgtcactgtgttgaaaacagagacttgtttgtgtggccccaacacccataaggaaaccaggctttaggcccaggggagcagtggaggtaagggctccaccccatcttaagctctgtcttccgtggcacaattccaagttcttgacgttagtaattgttaaaggaatggcaaactgttttgttttgaaggatctttctacagtctggtcttacccatgttcctagcaaccctgagatgattttcttccatttaccaaagcagccgggtcagtgctttctcacgttgccgtattcttcaggtattagtcagcttcagaagccctgctcccatttttccacccacccattcccccataaaacagcttattgtctccaagacaatagacatttaaaatgtgatgcgggtttatgatccagaccacaatcagaattatatcttgggtcatttatgtgccgtctgttcttgattctctatgctctaaatcggtgtttttcaaactgtggttgcagtcctttggtggattatggccagcattttttaaataggtagaatagaataaagtaaaatagaaaatagcagagtacattgctctcagtgtaggtaagtattgttttgttagtcatatgtgcatgtgtgtactgagtgccatgtaaaatgtattcctgctgtggtaagctgtggtcgaggagtttgaaagccattgctttcaaattcctctcaattatactgaccctagtca

SEQ ID NO: 381784 - DNA, 2946 bp, Homo sapiens
acaggccactgtcacctgccagcaggccagacagtccccagggtgatggacaaatcctgaagacatcagtgggtcttccctgtctcgatggctggcacgtccaggagtccaggagaaacaggtctttccatgcccaagttggtacctttttgggtgagaacactctgtatgtaccatttgtagaatcttggcacacatctgctgggtatcttcttcattcatacagcggaaacttgaactcagatctctcagccttttgtctcctttttcaaaccaagtcttgctgcacatcagagttgggaagcccgcctccaagcccggaagacccgcctcctctgtaaggttaaaggaggaagaggcagagattggaggttcaggcagtgacgtaacttgctgccttaggtggccttccgctctggcggctgtcgcgacgggggttcagggaatatttactgggcctctccgctccctctgctcttggaggtgccatgaggtcagttagctacgtgcagcgcgtggcgctggagttcagcgggagcctcttcccgcacgcaatctgcctcggagacgttgataacgatacgttaaatgaactggtggtgggagacaccagcgggaaggtgtctgtgtataaaaatgatgacagtcggccatggctcacctgttcctgccagggaatgctgacttgcgttggggttggagacgtgtgtaataaaggaaagaacctgttggtggcagtgagtgctgaaggctggtttcatttgtttgacctgacacctgccaaggtgttggatgcttctgggcaccacgagacactaatcggagaggagcagcgtccagtcttcaagcagcacatccctgccaacaccaaggtcatgctgatcagcgacatcgtgggcatgcctacctttgcaggcagccaggagagtaggagtcagtggatactagagcatatcccaagggattgggatggagatgggtgtcgtgagctggtggtgggctacacagaccgtgtggtgcgagctttccgctgggaggagctaggtgagggtcctgaacatctgacagggcagctggtgtccctcaagaaatggatgctggagggtcaggtggacagcctctcagtgactctggggccactgggtcttcctgaactgatggtgtctcagccaggttgtgcgtatgcaattctactgtgtacctggaaaaaggacactgggtcccctcctgcctctgaagggcccacggatggtagtagggagaccccagctgcccgagacgtggtgctgcaccagacatctggccgtatccacaacaagaatgtctccactcacctaattggcaacatcaaacaaggccacggcactgagagtagtggctctggcctctttgccctgtgcaccctggatgggacactgaagctcatggaagaaatggaagaagcagacaagctgctgtggtcagtgcaggtggatcaccagctctttgccctggagaaactggatgtcaccggcaacgggcatgaggaggtagttgcatgcgcctgggatggacagacatatatcattgatcacaaccgcaccgtcgtccgcttccaagtggatgaaaatatccgtgccttctgtgcaggcctgtacgcctgcaaagagggccgcaacagcccctgcctcgtatatgtcactttcaaccagaagatctatgtgtactgggaggtgcagctggagcggatggagtctaccaatctggtgaaactgctggagaccaagccggagtaccacagcctgctgcaggagctgggcgtggatcctgacgacctccctgtgactcgtgccctgcttcaccaaacgctctaccatccagaccagccaccacagtgtgctccctcaagcctccaggatcccacctagctgtacttgcctcatagctggtgaaggattcttctgaacccccaccctaccccctaaaggtatctgtggtattggcaggatagggaatatgcattacagaaatgcaggatttgactctgggcatgaaagatggcagcagccctagggtgaccgtgaactatagacctcgcagtcttttcggtgaaagaagagacaagttgaccctctgcccatttccttatggacctcacccatcatgccagcagggtcataggaccctggccttgttccaaatcatctgggacatgacccactccccactgtcactgtgttgaaaacagagacttgtttgtgtggccccaacacccataaggaaaccaggctttaggcccaggggagcagtggaggtaagggctccaccccatcttaagctctgtcttccgtggcacaattccaagttcttgacgttagtaattgttaaaggaatggcaaactgttttgttttgaaggatctttctacagtctggtcttacccatgttcctagcaaccctgagatgattttcttccatttaccaaagcagccgggtcagtgctttctcacgttgccgtattcttcaggtattagtcagcttcagaagccctgctcccatttttccacccacccattcccccataaaacagcttattgtctccaagacaatagacatttaaaatgtgatgcgggtttatgatccagaccacaatcagaattatatcttgggtcatttatgtgccgtctgttcttgattctctatgctctaaatcggtgtttttcaaactgtggttgcagtcctttggtggattatggccagcattttttaaataggtagaatagaataaagtaaaatagaaaatagcagagtacattgctctcagtgtaggtaagtattgttttgttagtcatatgtgcatgtgtgtactgagtgccatgtaaaatgtattcctgctgtggtaagctgtggtcgaggagtttgaaagccattgctttcaaattcctctcaattatactgaccctagtca

SEQ ID NO: 381785 - DNA, 2181 bp, Homo sapiens
gcggataggagctgcggaacagatggaccaaatggacgggcaagatgccgcaaacacaggcaggggcgggggcagactgagggtgaagtgagtagcaccgcagatcgggtgtgaagccgcactggctggaaggtgccactgttagcagaggagcgggggctgctcgtgggactccagagcccatcttgtctttcatgcccacagatggagatgggtgtcgtgagctggtggtgggctacacagaccgtgtggtgcgagctttccgctgggaggagctaggtgagggtcctgaacatctgacagggcagctggtgtccctcaagaaatggatgctggagggtcaggtggacagcctctcagtgactctggggccactgggtcttcctgaactgatggtgtctcagccaggttgtgcgtatgcaattctactgtgtacctggaaaaaggacactgggtcccctcctgcctctgaagggcccacggatggtagtagggagaccccagctgcccgagacgtggtgctgcaccagacatctggccgtatccacaacaagaatgtctccactcacctaattggcaacatcaaacaaggccacggcactgagagtagtggctctggcctctttgccctgtgcaccctggatgggacactgaagctcatggaagaaatggaagaagcagacaagctgctgtggtcagtgcaggtggatcaccagctctttgccctggagaaactggatgtcaccggcaacgggcatgaggaggtagttgcatgcgcctgggatggacagacatatatcattgatcacaaccgcaccgtcgtccgcttccaagtggatgaaaatatccgtgccttctgtgcaggcctgtacgcctgcaaagagggccgcaacagcccctgcctcgtatatgtcactttcaaccagaagatctatgtgtactgggaggtgcagctggagcggatggagtctaccaatctggtgaaactgctggagaccaagccggagtaccacagcctgctgcaggagctgggcgtggatcctgacgacctccctgtgactcgtgccctgcttcaccaaacgctctaccatccagaccagccaccacagtgtgctccctcaagcctccaggatcccacctagctgtacttgcctcatagctggtgaaggattcttctgaacccccaccctaccccctaaaggtatctgtggtattggcaggatagggaatatgcattacagaaatgcaggatttgactctgggcatgaaagatggcagcagccctagggtgaccgtgaactatagacctcgcagtcttttcggtgaaagaagagacaagttgaccctctgcccatttccttatggacctcacccatcatgccagcagggtcataggaccctggccttgttccaaatcatctgggacatgacccactccccactgtcactgtgttgaaaacagagacttgtttgtgtggccccaacacccataaggaaaccaggctttaggcccaggggagcagtggaggtaagggctccaccccatcttaagctctgtcttccgtggcacaattccaagttcttgacgttagtaattgttaaaggaatggcaaactgttttgttttgaaggatctttctacagtctggtcttacccatgttcctagcaaccctgagatgattttcttccatttaccaaagcagccgggtcagtgctttctcacgttgccgtattcttcaggtattagtcagcttcagaagccctgctcccatttttccacccacccattcccccataaaacagcttattgtctccaagacaatagacatttaaaatgtgatgcgggtttatgatccagaccacaatcagaattatatcttgggtcatttatgtgccgtctgttcttgattctctatgctctaaatcggtgtttttcaaactgtggttgcagtcctttggtggattatggccagcattttttaaataggtagaatagaataaagtaaaatagaaaatagcagagtacattgctctcagtgtaggtaagtattgttttgttagtcatatgtgcatgtgtgtactgagtgccatgtaaaatgtattcctgctgtggtaagctgtggtcgaggagtttgaaagccattgctttcaaattcctctcaattatactgaccctagtca

SEQ ID NO: 381786 - DNA, 1600 bp, Homo sapiens
acaggccactgtcacctgccagcaggccagacagtccccagggtgatggacaaatcctgaagacatcagtgggtcttccctgtctcgatggctggcacgtccaggagtccaggagaaacaggtctttccatgcccaagttggtacctttttgggtgagaacactctgtatgtaccatttgtagaatcttggcacacatctgctgggtatcttcttcattcatacagcggaaacttgaactcagatctctcagccttttgtctcctttttcaaaccaagtcttgctgcacatcagagttgggaagcccgcctccaagcccggaagacccgcctcctctgtaaggttaaaggaggaagaggcagagattggaggttcaggcagtgacgtaacttgctgccttaggtggccttccgctctggcggctgtcgcgacgggggttcagggaatatttactgggcctctccgctccctctgctcttggaggtgccatgaggtcagttagctacgtgcagcgcgtggcgctggagttcagcgggagcctcttcccgcacgcaatctgcctcggagacgttgataacgatacgttaaatgaactggtggtgggagacaccagcgggaaggtatctgtggtattggcaggatagggaatatgcattacagaaatgcaggatttgactctgggcatgaaagatggcagcagccctagggtgaccgtgaactatagacctcgcagtcttttcggtgaaagaagagacaagttgaccctctgcccatttccttatggacctcacccatcatgccagcagggtcataggaccctggccttgttccaaatcatctgggacatgacccactccccactgtcactgtgttgaaaacagagacttgtttgtgtggccccaacacccataaggaaaccaggctttaggcccaggggagcagtggaggtaagggctccaccccatcttaagctctgtcttccgtggcacaattccaagttcttgacgttagtaattgttaaaggaatggcaaactgttttgttttgaaggatctttctacagtctggtcttacccatgttcctagcaaccctgagatgattttcttccatttaccaaagcagccgggtcagtgctttctcacgttgccgtattcttcaggtattagtcagcttcagaagccctgctcccatttttccacccacccattcccccataaaacagcttattgtctccaagacaatagacatttaaaatgtgatgcgggtttatgatccagaccacaatcagaattatatcttgggtcatttatgtgccgtctgttcttgattctctatgctctaaatcggtgtttttcaaactgtggttgcagtcctttggtggattatggccagcattttttaaataggtagaatagaataaagtaaaatagaaaatagcagagtacattgctctcagtgtaggtaagtattgttttgttagtcatatgtgcatgtgtgtactgagtgccatgtaaaatgtattcctgctgtggtaagctgtggtcgaggagtttgaaagccattgctttcaaattcctctcaattatactgaccctagtca

SEQ ID NO: 381787 - DNA, 962 bp, Homo sapiens
ggaggggcagctataaaggccgcgccggggccacgaggagcagagccggcgccgtcaccgcccgcattgccgctcccagtcccgcgctcggcacgacatgaaatcccccgacgaggtgctacgcgagggcgagttggagaagcgcagcgacagcctcttccagctatggaagaagaagcgcggggtgctcacctccgaccgcctgagcctgttccccgccagcccccgcgcgcgccccaaggagctgcgcttccactccatcctcaaggtggactgcgtggagcgcacgggcaagtacgtgtacttcaccatcgtcaccaccgaccacaaggagatcgacttccgctgcgcgggcgagagctgctggaacgcggccatcgcgctggcgctcatcgatttccagaaccgccgcgccctgcaggactttcgcagccgccaggaacgcaccgcacccgccgcacccgccgaggacgccgtggctgccgcggccgccgcaccctccgagccctcggagccctccaggccatccccgcagcccaaaccccgcacgccatgagcccgccgcgggccatacgctggacgagtcggaccgaggctaggacgtggccggcgctctccagccctgcagcagaagaacttcccgtgcgcgcggatcctcgctccgttgcacgggcgccttaagttattggactatctaatatctatgtatttatttcgctggttctttgtagtcacatattttatagtcttaatatcttgtttttgcatcactgtgcccattgcaaataaatcacttggccagtttgcttttctaccatccggctgtggctcagtgagactcctgctgggagggtggaggcccaggaatgggcgggcaggacaccctcatccagtcctgcggggctggtgtgaaaggcgctgggaaccggctttgaatgaataaatgaatcgtgtcatctgca

SEQ ID NO: 381788 - DNA, 816 bp, Homo sapiens
ggaggggcagctataaaggccgcgccggggccacgaggagcagagccggcgccgtcaccgcccgcattgccgctcccagtcccgcgctcggcacgacatgaaatcccccgacgaggtgctacgcgagggcgagttggagaagcgcagcgacagcctcttccagctatggaagaagaagcgcggggtgctcacctccgaccgcctgagcctgttccccgccagcccccgcgcgcgccccaaggagctgcgcttccactccatcctcaaggtggactgcgtggagcgcacgggcaagtacgtgtacttcaccatcgtcaccaccgaccacaaggagatcgacttccgctgcgcgggcgagagctgctggaacgcggccatcgcgctggcgctcatcgatttccagaaccgccgcgccctgcaggactttcgcagccgccaggaacgcaccgcacccgccgcacccgccgaggacgccgtggctgccgcggccgccgcaccctccgagccctcggagccctccaggccatccccgcagcccaaaccccgcacgccatgagcccgccgcgggccatacgctggacgagtcggaccgaggctaggacgtggccggcgctctccagccctgcagcagaagaacttcccgtgcgcgcggatcctcgctccgttgcacgggcgccttaagttattggactatctaatatctatgtatttatttcgctggttctttgtagtcacatattttatagtcttaatatcttgtttttgcatcactgtgcccattgcaaataaatcacttggccagtttgcttttctacc

SEQ ID NO: 381789 - DNA, 935 bp, Homo sapiens
tcagctggacaaggcagggtcagctggacaagggagggtcatttgacgtcaggagttcgtgatcagcctggccaacatggtgaaaccctacctctacttaaaatacaaaaattggctgggtggtagtggctcatgcctgtagtcccagctactcgggaggctgaggcgggagaatcgcttgagcctgggaggcagaggttgcagtgagccgagatcgtgccactgcactccagcctgggcgacagagtgagaccctgtctcaaaaaaaacccacaaaaataataaaaaggatgttaaatataatctggctcagttttctgccagttcctgagtctcttcaatgttcccactatctggcctttccaggccctgcctaaatgaggtatacacccctgacctgtgcagcttattctttatgggcagtgctcattattaaaacattcttcctgaacgtgagatccactctgtcctccgacagccctgcccactagagaggccacacaggctggttgccctcccaagttagcctgtcataccaccccttggtcttccctaggctgagcacccccgttttcttcagctgtttctcataacatgatctcaagcctcttctgaaccccaggctttcttgagtctccatatgagcatttgcctctgtgggcacaacttcaagtgtcctttgtgaggaaatgtgcatctctggttggtgaacttccatccctcagagagaaatagaagcacaaatttgaaacaagctgtctgtctgtctgtttctttatgtcttggaaactttatttatccatccaagctttttttttttttttagcctttgagagcaggcaaccatccaagctcattccacgaacccagagaattaaatatacctgatttgtagcacaaaataaataaatgataaaagttccctcaaaccttcc

SEQ ID NO: 381790 - DNA, 20437 bp, Homo sapiens
  misc_feature (6)..(6): n is a, c, g, or t
  misc_feature (12)..(12): n is a, c, g, or t
  misc_feature (17)..(17): n is a, c, g, or t
  misc_feature (20)..(20): n is a, c, g, or t
  misc_feature (23)..(23): n is a, c, g, or t
  misc_feature (26)..(26): n is a, c, g, or t
  misc_feature (68)..(68): n is a, c, g, or t
  misc_feature (221)..(221): n is a, c, g, or t
  misc_feature (352)..(352): n is a, c, g, or t
  misc_feature (1120)..(1120): n is a, c, g, or t
  misc_feature (3066)..(3066): n is a, c, g, or t
  misc_feature (3101)..(3101): n is a, c, g, or t
  misc_feature (3169)..(3169): n is a, c, g, or t
  misc_feature (3211)..(3211): n is a, c, g, or t
  misc_feature (3655)..(3655): n is a, c, g, or t
  misc_feature (4593)..(4593): n is a, c, g, or t
  misc_feature (5613)..(5613): n is a, c, g, or t
  misc_feature (6054)..(6054): n is a, c, g, or t
  misc_feature (6075)..(6075): n is a, c, g, or t
  misc_feature (6148)..(6149): n is a, c, g, or t
  misc_feature (13416)..(13416): n is a, c, g, or t
  misc_feature (13535)..(13535): n is a, c, g, or t
  misc_feature (13613)..(13613): n is a, c, g, or t
  misc_feature (13669)..(13669): n is a, c, g, or t
  misc_feature (14943)..(14943): n is a, c, g, or t
tgcctnccagcngcccncanccngcngctgcccagagcccccatagagagaggtccccgccgccaccntcatggatcagccacagttcagcggggcgccccgctttctcacccggcccaaggccttcgtggtgtcggtgggcaaggacgccaccctcagctgccagatcgtgggtaatcccacgccacaggtgagctgggagaaggaccagcagccggtgncggccggcgcgcgcttccgtctggcccaggacggcgacctctaccgcctcactatcctggacctggcgctgggcgacagtgggcaatacgtgtgccgcgcgcgcaatgccataggcgaggccttcgctgcngtgggcctgcaggtggacgcggaggccgcgtgcgccgagcaggcgccgcacttcctgctgcggcccacgtccatccgcgtgcgcgagggctcagaggccaccttccgctgccgcgtgggtggctccccgaggccggcagtgagctggtccaaggacgggcggcgcctgggtgagcccgacggcccccgcgtgcgcgtggaggagctcggcgaggcaagtgcgctgcgcattcgggcggcgcggccgcgcgacggcggcacttacgaggtccgcgccgagaacccgctgggcgctgccagcgccgccgcggcgctagtggtggactcggacgccgcggacacggccagccggcccgggacctccacggccgcgctcctggcgcacctgcagcggcggcgcgaggctatgcgcgccgagggcgcccccgcctcaccgcccagcaccggcacgcgcacctgcacggtgactgaaggcaagcacgcgcgcctcagctgctacgtgaccggcgagcccaagcccgagacggtgtggaagaaggacggccagctggtgaccgagggccggcgccacgtggtgtacgaggacgcgcaggagaacttcgtgctcaagatcctcttctgcaagcagtcggaccgcggcctctacacctgcacggcgtccaacctcgtgggccagacctacagctctgtgctggtcgtagtgcgcgagcccgcggttcccttcaaaaagcggctgcaagatctggaggtgcgggagaaggagtcggcnacgttcctatgtgaggtgccccagccgtccactgaggccgcgtggttcaaggaggagacgcggttgtgggcgagcgccaagtacggcatcgaggaggagggcaccgagcgccgcctgaccgtgcgcaatgtctcggccgacgacgacgcggtgtacatctgcgagacgccagagggcagccgcacggtggcggagctcgcagtccaaggaaacctcctccgaaagctccctcggaagacggcggtgcgcgtgggcgacacggctatgttttgcgtggagctggcggtcccggtgggccccgtccactggctgcggaaccaggaggaagtggtggcggggggccgcgtggccatctccgcggagggcacgcgccacacactgaccatctcccagtgctgcctggaggatgtgggccaggtggcctttatggctggcgactgccagacgtccacccggttctgcgtgtcggcccccaggaagcctcccctgcaaccccctgtggatcctgtggtaaaggccaggatggagagttccgtgattctcagctggtccccaccaccccatggggaacgccctgtcactatcgacggctacctggtagagaagaagaagcttggcacctacacctggatcaggtgccacgaggctgaatgggtggctacacctgagctgaccgtggctgatgtggcggaggaggggaacttccagttccgagtgtccgctctcaacagctttggtcagagtccctacctcgagttcccggggactgtccacctggcccccaagctggccgtgaggacaccgctgaaggcggtgcaggcggtagagggtggcgaggtcactttctccgtggacctcacggtggcctcagcgggtgagtggttcctggatgggcaggccctgaaggccagcagtgtgtatgagatccactgtgatcgcacccggcacacgctcaccatccgggaggtgcccgccagcctgcacggggcgcagctgaagttcgtggccaacggcattgagagcagcatccggatggaggtccgggcggccccagggctgactgccaacaagccgccagccgcagctgcccgggaggtgctggctcggctgcacgaggaggcgcagctgctggctgagctgtcagatcaggctgcggctgtgacgtggctgaaggatggtcgcacactgtccccaggccccaagtatgaggtgcaggcatcggccgggcggcgggtgctccttgtgcgagatgtggcccgggacgatgcaggcctctacgagtgcgtcagccgcgggggccgcatcgcctaccagctctccgtgcaaggcctcgcgcgctttctgcacaaggacatggcgggcagctgtgtggatgccgtggctgggggcccggcgcagtttgagtgtgagacctccgaagcccacgtccacgtgcactggtacaaggatggcatggagctgggccactccggtgagcgcttcttgcaggaggatgtggggacgcggcaccggctggtggcagccacagtcaccaggcaggatgaaggcacctactcctgccgcgtgggcgaggactctgtggacttccggctccgcgtctctgagcccaaggtggtgtttgctaaggagcagctggcacgcaggaagctgcaggcagaggcaggagccagtgccacactgagctgcgaggtggcccaggcccagacggaggtgacgtggtacaaggatgggaagaagctgagctccagctcgaaagtgtgcatggaggccacaggctgcacgcgcaggctggttgtgcagcaggcaggccaggcggatgccggggagtatagctgcgaggctgggggccagcggctctccttccatctggatgtcaaagagcccaaggtggtgtttgccaaggaccaggtggcacacagtgaggtgcaggctgaggcaggggccantgccacgctgagctgcgaggtggcccaggcccagncggaggtgatgtggtacaaagatgggaagaagctgagctccagcttgaaagtgcatgtagaggccaanggctgcagacggaggctggtggtgcagcaggcaggcaagacngatgccggggactacagctgcgaggccaggggccagagggtctccttccgcctgcacatcacagagcccaagatgatgtttgcaaaggagcagtcagtgcataatgaggtgcaggctgaggcgggggccagtgccatgctgagctgtgaggtggcccaggcccagacggaggtgacgtggtacaaggatgggaagaagctgagctccagctcaaaagtgggcatggaggtcaaagggtgcacacggaggctggtgctgccacaggcgggcaaagcagatgctggggagtacagctgtgaggctgggggccagagagtctccttccacctgcacatcacagagcccaagggggtgtttgcgaaggagcagtcagtgcataatgaggtgcaggctgaggcggggaccactgccatgctgagctgtgaggtggcccagccccagacngaggtgacgtggtacaaggacgggaagaagctgagctccagctcaaaagtacgcatggaggtcaagggctgcacacgaaggctggtagtgcagcaggtgggcaaagcagatgctggggagtacagctgcgaggctgggggccagagagtctcctttcaactgcacatcacagagcccaaggcagtgtttgccaaggagcagttggtgcataatgaggtgcggactgaggcaggggccagtgccacactgagctgtgaggtggcccaggcccagacagaggtgacgtggtacaaggatgggaagaagctgagctccagttcgaaagtgcgcatagaggctgcgggctgcatgcggcagctggtggtgcagcaggcaggccaggcagatgctggggagtacacctgtgaggctgggggccagcggctctccttccacctggatgtttcagagcccaaggcggtgtttgcaaaggagcagctggcacacaggaaggtgcaggccgaggcgggggccattgccacgctgagctgcgaggtggcccaggcccagacagaggtgacgtggtacaaggacgggaagaagctgagctccagctcgaaagttcgaatggaggctgtgggctgcacacggaggctggtggtgcagcaggcatgccaggcggacaccggggagtatagctgcgaggccgggggccagcggctctccttcagcctggacgtggcagagcccaaggtggtgtttgccaaggagcagccagtgcacagggaggtgcaggcccaggcgggggccagcaccacactcagctgcgaggtggctcaggcccagacggaggtgatgtggtacaaggacgggaagaagctgagcttcagctcgaaagtgcgcatggaggctgtgggctgcacacggaggctggtggtgcagcaggcgggccaggcggncgccggggagtacagctgcgaggcggggagccagcggctctccttccacctgcacgtggcagagcccaaggcggtgtttgccaaggagcagccagcgagcagggaggtgcaggctgaggcggggaccagtgccacgctgagctgcgaggtggcccaggcccagacagaggtgacgtggtacaaggacgggaagaaactgagctccagctcgaaagtgcgaatggaggccgtgggctgcacacggaggctggtggtgcaggaggcaggccaggcggacgccggggagtacagctgcaaggccggggatcagcggctgtccttccacctgcacgtggcagagcccaaggtggtgtttgccaaggagcagccagcacacagggaggtgcaggctgaggcgggggccagtgccacgctgagctgcgaggtggcccaggcccagacagaggtgacgtggtacaaggatgggaagaagctgagttccagctcgaaagtgcgcgtggaggccgtgggctgcacacggaggctggtggtgcagcaggcgggccaggcagaggccggggagtacagctgcgaggcagggggtcagcagctctccttccgcctgcaggtggcagagctggagccccaaatttcagagagaccctgccgcagggagcctctggtggtcaaggagcatgaagacatcatcctgaccgccacactggccacaccctctgcggccacggtgacctggctcaaggatggtgtggagattcgccgcagcaagcggcatgagacagccagccagggggacacccacaccctgaccgtgcatggcgcccaggttctggacagcgccatctacagctgccgtgtgggcgcagaggggcaggacttcccagtgcaggtggaagaggtggccgccaagttctgccggctgctggagcctgtgtgcggcgagctgggtggcacggtgacactggcctgcgagctaagcccagcgtgtgcagaggtggtgtggcgctgcggcaacacgcagcntcgggtgggcaagcgcttccagatggtggccgaggggcccgtgcgctcactcactgtgttggggctgcgcgcagaggacgcaggggagtacgtgtgtgagagccgtgatgaccacaccagtgcgcagctcaccgtcagtgtgccccgagtggtgaagtttatgtctgggctgagcaccgtggtcgcagaggagggcggcgaggccaccttccagtgcgtggtgtcccccagtgatgtggcagtcgtgtggttccgggacggtgccctgcttcagcccagcgagaagtttgccatatcacagagtggcgccagccacagcctgaccatctcagacctggtgctggaggacgcgggccagatcaccgtggaggctgagggcgcctcatcctctgctgccctgagggtccgagagcgcctgtgctgttcaaaaagaagctgganccgcagacggtggaggagcgnagctcggtgaccctggaggtggagctgacgcggccgtggccggagctgaggtggacacggaacgcgacggccnnggcgccgggaaagaacgtggagatccacgccgagggcgcccgccaccgcctggttctcacaacgtaggttttgccgaccgtggcttctttggctgcgagacgccggatgacaagacacaggccaaactcaccgtggagatgcgccaggtacggctcgtacggggcctgcaggcagtggaggcacgggagcagggcacggctaccatggaggtgcagctgtcgcatgcggacgtggatggcagctggactcgtgacggtctgcggttccagcaggggcccacgtgccacctggctgtgcggggccccatgcacaccctcacactctcggggctgcggccagaggatagtggccttatggtcttcaaggccgaaggagtgcacacgtcggcgcggctcgtggtcaccgagcttcccgtgagcttcagccgcccgctgcaggacgtggtgaccactgagaaggagaaggttaccctggagtgcgagctgtcgcgtcctaatgtggatgtgcgctggctgaaggacggtgtggagctgcgggcaggcaagacgatggccatcgcagcccagggcgcctgcaggagcctcaccatttaccggtgcgagttcgcggatcagggagtgtatgtgtgtgatgcccatgatgcccagagctctgcctccgtgaaggtacaaggaaggacatacactctcatctaccggagagtcctggcggaagatgcaggagagatccaatttgtagccgaaaatgcagaatcgcgagcccagctccgagtgaaggagctgccagtgaccctcgtgcgcccgctgcgggacaagattgccatggagaagcaccgcggtgtgctggagtgtcaggtgtcccgggccagcgcccaggtgcggtggttcaagggcagtcaggagctgcagcccgggcccaagtacgagctggtcagtgatggcctctaccgcaagctgatcatcagtgatgtccacgcagaggacgaggacacctacacctgtgacgccggtgatgtcaagaccagtgcacagttcttcgtggaagagcaatccatcaccattgtgcggggtctgcaggacgtgacagtgatggagcccgctcctgcctggtttgagtgtgagacctccatcccctcagtgcggccacctaagtggctcctggggaagacggtgttgcaggctggggggaacgtgggcctggagcaggagggcacggtgcaccggctgatgctgcggcggacctgctccaccatgaccgggcccgtgcacttcaccgttggcaagtcgcgctcctctgcccgcctggtggtctcagacatccccgtagtcctcacacggccgttggagcccaagacagggcgtgagctgcagtcagtggtcctgtcctgcgacttccggccagcccccaaggctgtgcagtggtacaaggatgacacgcccctgtctccctctgagaagtttaagatgagcctggagggtcagatggctgagctgcgcatcctccggctcatgcctgctgatgctggtgtctaccggtgccaggcgggcagtgcccacagcagcactgaggtcactgtggaagcgcgggaggtgacagtgacagggccgctacaggatgcagaggccacggaggagggctgggccagcttctcctgtgagctgtcccacgaggatgaggaggtcgagtggtcgctcaacgggatgcccctgtacaacgacagcttccatgagatctcacacaagggccggcgccacacgctggtactgaagagcatccagcgggctgatgcgggcatagtacgcgcctcctccctgaaggtgtcgacctctgcccgcctggaggtccgagtgaagccggtggtgttcctgaaggcgctggatgacctgtccgcagaggagcgcggcaccctggccctgcagtgtgaagtctctgaccccgaggcccatgtggtgtggcgcaaagatggcgtgcagctgggccccagtgacaagtatgacttcctgcacacggcgggcacgcgggggctcgtggtgcatgacgtgagccctgaagacgccggcctgtacacctgccacgtgggctccgaggagacccgggcccgggtccgcgtgcacgatctgcacgtgggcatcaccaagaggctgaagacaatggaggtgctggaaggggaaagctgcagctttgagtgcgtcctgtcccacgagagtgccagcgacccggccatgtggacagtcggtgggaagacagtgggcagctccagccgcttccaggccacacgtcagggccgaaaatacatcctggtggtccgggaggctgcaccaagtgatgccggggaggtggtcttctctgtgcggggcctcacctccaaggcctcactcattgtcagagagaggccggccgccatcatcaagcccctggaagaccagtgggtggcgccaggggaggacgtggagctgcgctgtgagctgtcacgggcgggaacgcccgtgcactggctgaaggacaggaaggccatccgcaagagccagaagtatgatgtggtctgcgagggcacgatggccatgctggtcatccgcggggcctcgctcaaggacgcgggcgagtacacgtgtgaggtggaggcttccaagagcacagccagcctccatgtggaagaaaaagcaaactgcttcacagaggagctgaccaatctgcaggtggaggagaaaggcacagctgtgttcacgtgcaagacggagcaccccgcggccacagtgacctggcgcaagggcctcttggagctacgggcctcagggaagcaccagcccagccaggagggcctgaccctgcggctcaccatcagtgccctggagaaggcagacagcgacacctatacctgcgacattggccaggcccagtcccgggcccagctcctagtgcaaggccggagagtgcacatcatcgaggacctggaggatgtggatgtgcaggagggctcctcggccaccttccgttgccggatctccccggccaactacgagcctgtgcactggttcctggacaagacacccctgcatgccaacgagctcaatgagatcgatgcccagcccgggggctaccacgtgctgaccctgcggcagctggcgctcaaggactcgggcaccatctactttgaggcgggtgaccagcgggcctcggccgccctgcgggtcactgagaagccaagcgtcttctcccgggagctcacagatgccaccatcacagagggtgaggacttgaccctggtgtgcgagaccagcacctgcgacattcctgtgtgctggaccaaggatgggaagaccctgcgggggtctgcccggtgccagctgagccatgagggccaccgggcccagctgctcatcactggggccaccctgcaggacagtggacgctacaagtgtgaggctgggggcgcctgcagcagctccattgtcagggtgcatgcgcggccagtgcggttccaggaggccctgaaggacctggaggtgctggagggtggtgctgccacactgcgctgtgtgctgtcatctgtggctgcgcccgtgaagtggtgctatggaaacaacgtcctgaggccaggtgacaaatacagcctacgccaggagggtgccatgctggagctggtggtccggaacctccggccgcaggacagcgggcggtactcatgctccttcggggaccagactacttctgccaccctcacagtgactgccctgcctgcccagttcatcgggaaactgagaaacaaggaggccacagaaggggccacggccacgctgcggtgtgagctgagcaaggcagcccctgtggagtggagaaaggggtccgagaccctcagagatggggacagatactgtctgaggcaggacggggccatgtgtgagctgcagatccgtggcctggccatggtggatgccgcggagtactcgtgtgtgtgtggagaggagaggacctcagcctcactcaccatcaggcccatgcctgcccacttcataggaagactgagacaccaagagagcatagaaggggccacagccacgctgcggtgtgagctgagcaaggcggcccccgtggagtggaggaaggggcgtgagagcctcagagatggggacagacatagcctgaggcaggacggggctgtgtgcgagctgcagatctgtggcctggctgtggcagatgctggggagtactcctgtgtgtgtggggaggagaggacctctgccactctcaccgtgaaggccctgccagccaagttcacagagggtctgaggaatgaagaggccgtggaaggggccacagccatgttgtggtgtgaactgagcaaggtggcccctgtggagtggaggaaggggcccgagaacctcagagatggggacagatacatcctgaggcaggaggggaccaggtgtgagctgcagatctgtggcctggccatggcggacgccggggagtacttgtgtgtgtgcgggcaggagaggacctcagccacgctcaccatcagggctctgcctgccaggttcatagaagatgtgaaaaaccaggaggccagagaaggggccacggctgtgctgcagtgtgagctgaacagtgcagcccctgtggagtggagaaaggggtctgagacccttagagatggggacagatacagcctgaggcaggacgggactaaatgtgagctgcagattcgtggcctggccatggcagacactggggagtactcgtgcgtgtgcgggcaggagaggacctcggctatgctcaccgtcagggctctacccatcaagttcacagagggtctgaggaacgaagaggccacagaaggggcaacagccgtgctgcggtgtgagctgagcaagatggcccccgtggagtggtggaaggggcatgagaccctcagagatggagacagacacagcctgaggcaggacggggccaggtgtgagctgcagatccgcggcctcgtggcagaggacgctggggagtacctgtgcatgtgcgggaaggagaggacctcagccatgctcaccgtcagggccatgccttccaagttcatagagggtctgaggaatgaagaggccacagaaggggacacggccacgctgtggtgtgagctgagcaaggcggcaccggtggagtggaggaaggggcatgagaccctcagagatggggacagacacagcctgaggcaggacgggtccaggtgtgagctgcagatccgtggcctggctgtggtggatgccggggagtactcgtgtgtgtgcgggcaggagaggacctcagccacactcactgtcagggccctgcctgccagattcatagaagatgtgaaaaaccaggaggccagagaaggggccacggccgtgctgcaatgtgagctgagcaaggcggcccccgtggagtggaggaaggggtctgagaccctcagaggtggggacagatacagcctgaggcaggatgggaccagatgtgagctgcagattcatggcctgtctgtggcagacactggggagtactcgtgtgtgtgcgggcaggagaggacctcggccacactcaccgtcagggccccacagccagtgttccgggagccgctgcagagtctgcaggcggaggagggctccacggccaccctgcagtgtgagctgtctgagcccactgctacagtggtctggagcaagggtggcctgcagctgcaggccaatgggcgccgggagccacggcttcagggctgcaccgcggagctggtgttacaggacctacaacgtgaagacactggcgaatacacttgcacctgtggctcccaggccaccagtgccaccctcactgtcacagctgcgcctgtgcggttcctccgagagctgcagcaccaggaggtggatgagggaggcaccgcacacttatgctgcgagctgagccgggcgggtgcgagcgtggagtggcgcaagggctccctacagctcttcccttgtgccaagtaccagatggtgcaggatggtgcagctgcagagctgctggtacgcggagtggagcaggaggatgcgggtgactacacgtgtgacacgggccacacgcagagcatggccagcctctctgtccgtgtccccaggcccaagttcaagacccggcttcagagtctggagcaggagacaggtgacatagcccggctgtgctgtcagctgagtgatgcagagtcgggggccgtggtgcaatggctcaaggagggcgtggagctgcatgcgggccccaagtacgagatgcggagccagggggccacgcgggagctgctgatccaccaactggaggccaaggacacgggcgagtatgcctgtgtgacaggcggccagaaaaccgctgcctccctcagggtcacagagcctgaggtgaccattgtacgggggctggttgatgcggaggtgacggccgatgaggatgttgagttcagctgtgaggtgtccagggctggagccacaggcgtgcagtggtgcctacagggcctgccactgcaaagcaatgaggtgacagaggtggctgtgcgggatggccgcatccacaccctgcggctgaagggcgtgacgcccgaggacgctggcactgtctccttccatttgggaaaccatgcttcctctgcccagctcaccgtcagagctcctgaggtgaccatcctggagcccctgcaggacgtgcagctcagtgagggccaggatgccagcttccagtgccggctatccagagcttcaggccaggaggcccgctgggctttaggaggggtgcccctgcaggccaacgagatgaatgacatcactgtggagcagggcacactccacctgctcaccctgcacaaggtgacccttgaggatgctggaactgtcagtttccacgtgggcacgtgtagctctgaggcccagctgaaagtcacagccaagaacacggtggtgcgggggctggagaatgtggaggcgctggagggcggcgaggcgctgttcgagtgccagctgtcccagcccgaggtggccgcccacacctggctgctggacgacgaacccgtgcgcacctcggagaacgccgaggtggtcttcttcgagaacggcctgcgccacctgctgctgctcaaaaacttgcggccacaagacagctgccgggtgaccttcctggctggggatatggtgacgtccgcattcctcacggtccgaggctggcgcctggagatcctggagcctctgaaaaacgcggcggtccgggccggcgcacaggcangcttcacctgcacgctcagcgaggcggtgcccgtgggagaggcgtcctggtacatcaatggcgcggcagtgcagccggatgacagcgactggactgtcaccgccgacggcagtcaccangccctactgctgcgcagcgcccagccccaccacgccggggaggtcaccttcgcttgccgcgacgccgtggcctctgcncggctcaccgtgctgggcctccctgatcccccagaggatgctgaggtggtggctcncagcagccacactgtgacactgtcttgggcagctcccatgagtgatggaggcggtggtctctgtggctaccgcgtggaggtgaaggagggggccacaggccagtggcggctgtgccacgagctggtgcctggacccgagtgtgtggtggatggcctggcccccggggagacctaccgcttccgtgtggcagctgtgggccctgtgggtgctggggaaccggttcacctgccccagacagtgcggcttgcagagccaccgaagcctgtgcctccccagccctcagcccctgagagccggcaggtggcagctggtgaagatgtctctctggagcttgaggtggtggctgaggctggtgaggtcatctggcacaagggaatggagcgcatccagcccggtgggcggttcgaggtggtctcccagggtcggcaacagatgctggtgatcaagggcttcacggcagaagaccagggcgagtaccactgtggcctggctcagggctccatctgccctgcggctgccaccttccaggtggcactgagcccagcctctgtggatgaggcccctcagcccagcttgccccccgaggcagcccaggagggtgacctgcacctactgtgggaggccctggctcggaaacgtcgcatgagccgtgagcccacgctggactccattagcgagctgccagaggaggacggccgctcgcagcgcctgccacaggaggcagaggaggtggcacctgatctctctgaaggctactccacggccgatgagctggcccgcactggagatgctgacctctcacacaccagctctgatgatgagtcccgggcaggcaccccttccctggtcacctacctcaagaaggctgggaggccaggcacctcaccactggccagcaaggttggggccccagcagccccctctgtgaagccacagcagcagcaggagccactggctgctgtgcgcccaccactgggagacctgagcaccaaagacctgggtgatccctcaatggacaaggcagctgtgaagatccaggctgcctttaagggctacaaggtccggaaggagatgaagcagcaggaagggcccatgttctcccacacatttggggacaccgaggcacaggtgggggatgccctgcggctggagtgtgtcgtggccagcaaggcagatgtgcgagcccgctggctgaaggatggtgtggagctgaccgatgggcggcaccatcacatcgaccagcttggggatggcacctgctctctgctgatcnctggcctggaccgtgctgatgctggctgctacacctgtcaggtgagcaacaagtttggccaggtgacccacagtgcctgtgtggtggtcagtgggtcagagagtgaagccgagagctcctctgggggtgagctggacgatgccttccgccgggctgcccgtcggctgcaccggctcttccgcaccaaaagtccggctgaagtttcagatgaggagctcttcctgagtgcagacgagggccctgcagagccagaggagcccgcggactggcagacataccgcgaagatgagcatttcatctgcatccgttttgaggcgctcactgaggcccgccaggcggtaactcgcttccaggagatgtttgccacactgggcattggggtggagatcaagctggtggaacaggggcctcggagggtagagatgtgcatcagcaaagagactcctgcccctgtggtgcctccagagccattgcccagcctactgacttctgacgctgccccagtgttcctgactgagttgcagaaccaagaagtgcaggatgggtatcctgtgagctttgactgcgtggtgacaggtcagcccatgcccagtgtgcgctggttcaaggatgggaagttgttggaggaggatgatcactacatgattaatgaagaccaacagggtggccatcagctcatcatcacagccgtggtgccagcagacatgggcgtctaccgctgcctggccgagaacagcatgggtgtctcctccaccaaggctgagctccgtgtggacttgacaagcacagactatgacactgcagcagatgccacggagtcctcatcctacttcagtgcccaaggctacctgtccagccgggagcaggagggaacagagtccaccactgatgagggccagctgccccaggtggtggaggagctgagagacctccaggtggcccctggcacacgcctggccaagttccagctcaaggtgaaaggctaccctgctcccagattatactggttcaaagatggccagcccctgaccgcatctgcccacatccgcatgactgacaagaagatcctgcacaccctggagatcatctccgtcacccgggaggactctggccagtatgcagcctatatcagcaatgccatgggtgctgcctactcgtctgcccggctgctggttcgaggccctgatgagccagaagagaagcctgcatcagatgtgcatgagcagctggtgccgccccgaatgctggagaggttcacccccaagaaagtgaagaaaggctccagcatcaccttctctgtgaaggtagaaggacgcccggtgcccaccgtgcactggctcagggaggaggctgagagaggcgtgctgtggattggccctgacacaccgggctacaccgtggccagctctgcgcagcagcacagcctggtcctgctggacgtgggccggcagcaccagggcacctacacatgcattgccagcaacgctgccggccaggccctctgctccgccagcctgcacgtctcgggcctgcctaaggtggaggagcaggagaaagtgaaggaagcgctgatttccactttcctgcaggggaccacacaagccatctcagcacaggggttggaaactgcgagttttgctgaccttggtgggcagaggaaagaagagcctctggctgccaaggaggccctcggccacctgtccctcgctgaggtgggcacagaggagttcctgcagaaactgacctcccagatcactgagatggtatcggccaagatcacgcaggccaagctgcaggtgcccggaggtgacagtgatgaggactccaagacaccatctgcatccccccgccatggccgatcacggccatcctccagcatccaggagtcttcctcagagtcagaggacggcgatgcccgaggcgagatctttgacatctacgtggtcaccgctgactacctgcccctaggggctgagcaggatgccatcacgctgcgggaaggccagtatgtggaggtcctggatgcagcccacccactgcgctggcttgtccgcaccaagcccaccaagtccagcccctcacggcagggctgggtgtcaccagcctacctggacaggaggctcaagctgtcacctgagtggggggccgctgaggcccctgagttccctggggaggctgtgtctgaagacgaatacaaggcaaggctgagctctgtgatccaggagctgctgagttctgagcaggccttcgtggaggagctgcagttcctgcagagccaccacctgcagcacctggagcgctgcccccacgtgcccatagctgtggccggccagaaggcagtcatcttccgcaatgtgcgggacatcggccgcttccacagcagcttcctgcaggagttgcagcagtgcgacacggacgacgacgtggccatgtgcttcatcaagaaccaggcggcctttgagcagtacctggagttcctggtggggcgtgtgcaggctgagtcggtggtcgtcagcacggccatccaggagttctacaagaaatacgcggaggaggccctgttggcaggggacccctctcagcccccgccaccacctctgcagcactacctggagcagccagtggagcgggtgcagcgctaccaggccttgctgaaggagctgatccgcaacaaggcgcggaacagacagaactgcgcgctgctggagcaggcctatgccgtggtgtctgccctgccacagcgcgctgagaacaagctgcacgtgtccctcatggagaactacccaggcaccctgcaggccctgggcgagcccatccgccagggccacttcatcgtgtgggagggtgcaccgggggcccgcatgccctggaagggccacaaccgtcacgtgttcctcttccgcaaccacctggtaatctgcaagccccggcgagactcccgcaccgataccgtcagctacgtgttccggaacatgatgaagctgagcagcatcgacctgaacgaccaggtggagggggatgaccgcgccttcgaggtgtggcaggagcgggaggactcggtgcgcaagtacctgctgcaggcacggacagccattatcaagagctcgtgggtgaaggagatctgtggcatccagcagcgtctggccctgcctgtgtggcggcccccggactttgaagaggagctggccgactgcacagccgagctgggtgagacagtcaagctggcctgccgcgtgacgggcacacccaagcctgtcatcagctggtacaaagatgggaaagcagtgcaggtggacccccaccacatcctcattgaagaccctgatggctcgtgtgcactcatcctggacagcctgaccggtgtggactctggccagtacatgtgcttcgcggccagcgccgctggcaactgcagtaccctgggcaagatcctggtgcaagtcccaccacggttcgtgaacaaggtccgggcctcaccctttgtggagggagaggacgcccagttcacctgcaccatcgaaggcgccccgtacccgcagatcaggtggtacaaggacggggccctgctgaccactggcaacaagttccagacactgagtgagcctcgcagcggcctgctagtgctggtgatccgggcggccagcaaggaggacctggggctctacgagtgtgagctggtgaaccggctgggctccgcgcgggctagtgcggagctgcgcattcagagccccatgctgcaggcccaggagcagtgtcacagggagcagctcgtggctgcagtggaagtcactgagcaagagactaaagtccccaagaaaaccgtcatcatagaagagaccatcaccactgtggtgaagagcccacgtggccaacgacggtcccccagcaagtccccctcccgctcaccttcccgctgctctgccagcccgctgaggccaggcctactggcccccgacctgctgtacctgccaggtgctggccagccccgcaggccggaggcagaaccaggccagaagcccgtggtgcccacactgtatgtgacggaggccgaggcccactctccagctctgcccggactctcggggccccagcccaagtgggtggaggtggaggagaccattgaagtccgggtgaagaagatgggcccgcagggtgtgtctcccaccacagaggtgcccaggagctcatcggggcatctcttcacactgcccggtgcgacccccggaggggaccccaattccaacaactccaacaacaagctgctggcccaggaggcctgggcccagggcacagccatggtcggcgtcagagagccccttgtcttccgcgtggatgccagaggcagtgtggactgggctgcttctggcatgggcagcctggaggaggagggcaccatggaggaggcgggagaggaagagggggaagacggagacgcctttgtgacggaggagtcccaggacacacacagccttggggatcgtgaccccaagatcctcacgcacaacggccgcatgctgacactggctgacctggaagattacgtgcctggggaaggggagaccttccactgtggtggccctgggcctggcgcccctgatgaccctccctgcgaggtctcggtgatccagagagagatcggggagcccacggtggggcagcctgtgctgctcagcgtggggcatgcactgggtccccgaggccctctcggcctctttaggcctgagccccgtggggcgtcaccaccgggaccccaggtccgtagccttgagggcacctccttcctcttgcgggaggccccggctcggcctgtgggcagtgctccctggacgcagtctttctgcacccgcatccggcgttctgcggacagtggccagagcagcttcaccacagagctttccacccagaccgtcaacttcgggacagtgggggagacggtcacccttcacatctgcccagacagggatggggatgaggcggcacagccctgatgctgctgccatggtggcttggggcagcggggagaaaggagtgtccttgaggcctaggacgctgcccggcctcagcagcagccctgggagcctcctgagggccctccctgtccctggccacgggcccttcttacctcactcaacttcagccaggaggactgggtggtgcttgcaatgttggaatgaccggctcaaagacctcagctctgggctgtttcctgtcagcctggcaggagcctcaggactgtggacgaaggatgtggccttgggcatttgtcctgttcccacatgggcctggtccctccctcctggccccagccacagctgccaggcctgacatggccttgcctctcctgcagtcttggtgactgagacccttgggtggcgcttcccagctctgcaggccctcctggccttttctgcagggtggacacagggtctgtgtgtgggcagcagcccctgtctctcagcaagaataaagcagcttcctgtgcaaaaaactgatt

SEQ ID NO: 381791 - DNA, 2882 bp, Homo sapiens
ttctttgattgtttaaccttacaaaaatttagactagtaacttatttcacactgaaaagtgagttccaggaaggttagaggccacagagtataaaaggtaaaaccataaagcctctagatgctaacatagattgctaaaaacttcagggaacggaaagatttcttaaaactaaacagtggaacaatggtatatttaactacattaaaactaaaactttaatttgtcaagacatcatttgagagcgaaaaggccggtcaaggacatgggtaagatgtttacaaatacacagttatcatttgctagcatttaaaatatataaagagttcctaaaaataaggaaggaaaagacagaaaaggctactgaaaattggacagaagcctgaagagcgacaccccagaagagctgacgtaatggccagaagtggtggaaagggctccaccttgcatgtcaccaggcaatgcatgacaaagcccaggccttccccgcagaggccaacgctgaccctcctgacagtggcaggactggaagcctcagtactctggggccctgcagtgaggacacgccctgcccagtcccatggggagaccctagcatatccttgaagggagctgtgtaagcattaggaacccagtccctgcactggaggagctcgtgcacggagggtttgtcacaactgccccgcctggaatagcccatggcactgcacagtggatggagaaactgtgattcttgtgctgggaggtggtggggcttctcccagctacatggccagtgccaagcttgggaaggttctgtttctcctactttctcgtctaggccctcctaccctagggtggtcttcctgacctgggcagtatctttgacctcgtgtgtccctccttgtccatccccagagcccaaggtggtgtttgccaaggagcagccagcacacagggaggtgcaggctgaggcgggggccagtgccacgctgagctgcgaggtggcccaggcccagacagaggtgacgtggtacaaggatgggaagaagctgagttccagctcgaaagtgcgcgtggaggccgtgggctgcacacggaggctggtggtgcagcaggcgggccaggcagaggccggggagtacagctgcgaggcagggggtcagcagctctccttccgcctgcaggtggcaggtcagtgctttggggatgctgagtgagccctgtttgtagctgctgctgtgactggagtagaaccactgctgacccagtgggctttccattagactccatccctcaacttctcccatcctctcacctcctatttttatgcctgtggtggagctgggctgcttagtggggaagggagtgaacggaagggtcagggccctccttgtccatgttgggtggtgtttctgtgcagacatgctgggtcacattttcccagtaccttctccaaactaccgatgtcccgaggtgtccaggactctggtcctatctaatgcatgagatggcggtaagccagacgtccctccctcggggatactcctgcagtccctgcacggcctcatctggccccatgtgagggctctccctgtggaaagagattttaattcgttgagtcagggtgtagggaaattccagccacacagtcttatttggaattatatcaacactgaacactgggttcccaaagttttcagtgttctgggacacacttctgtccttccctgtggatgtagaagccctgtcagagccctgactaaaacccagatccacagcgttagtgtgtgcaaaacgagtaaagagcagcacattggcaggtgcgcacacgtgacgttggaattccatttcggaagccaatctcactttccttttgcattctgttagaatgttctgtgtctgaattccccttggaatttggatagatttaaaagtgataggaataagtagctggtgtttctagcctccgcctccaggcgggtgaggaggtgacacctgagaattcctccctctcacccctgaccctgccggaaagcgaaactgagatgcgggcattgggccctgggaagcgtggggaaggggaaaggagaaagccaggtgggtttttaggtcccttccagtgccacactgtggggtgttgaggggccgcgcgaggcaggcccttccatgaggcctggactggaggccttctctaggcgccggcgctggcctgggccgcctgccgccacacaggggccgcacgcctgggccccagggcccctttgccggcgggaggccggggggaccgactgctcttggcgcccggggtcaggggaggccgggaaacctcggctcccgggcgacaggcacccaggcccttctcagccccccggccgcggccgcgccgggcctcgcttcagccgggcgattcttcccctcatttgttgcattgtttgcattaatatgaatatcttgttctgtttgttttgtctcctgagagccaataaagctgtgttttttctttacaccaaaaaaaaaaaaaaaaaaaaaaaggaataagtagcttatggcacagtgacacactggtagaattaagttatggtggtagcagtcgctgactggggaagccatatttacatcatcctgtttccttgatgagtcctgtgcctgccccctctccagctgattcataggaagtctgagaatgacctttactttcctattgtttgttaggagagtttaacttcaaactccaaccctgagccctgagtgccaccacataacagttggtgttatatatatctaaaatggtttacaaatgtgtagataccaaaaatactcactgcaagtaaatttgaaaagtgttaacaaattatataatttctagaaaccaaaaacagacttaagaaatagataacctata

SEQ ID NO: 381792 - DNA, 8991 bp, Homo sapiens
  misc_feature (1577)..(1577): n is a, c, g, or t
  misc_feature (2018)..(2018): n is a, c, g, or t
  misc_feature (2039)..(2039): n is a, c, g, or t
  misc_feature (2112)..(2113): n is a, c, g, or t
  misc_feature (8909)..(8909): n is a, c, g, or t
  misc_feature (8920)..(8920): n is a, c, g, or t
  misc_feature (8927)..(8927): n is a, c, g, or t
  misc_feature (8929)..(8929): n is a, c, g, or t
  misc_feature (8935)..(8935): n is a, c, g, or t
  misc_feature (8943)..(8943): n is a, c, g, or t
  misc_feature (8945)..(8945): n is a, c, g, or t
  misc_feature (8950)..(8950): n is a, c, g, or t
  misc_feature (8956)..(8956): n is a, c, g, or t
  misc_feature (8961)..(8961): n is a, c, g, or t
  misc_feature (8972)..(8973): n is a, c, g, or t
  misc_feature (8975)..(8976): n is a, c, g, or t
  misc_feature (8978)..(8978): n is a, c, g, or t
  misc_feature (8982)..(8982): n is a, c, g, or t
  misc_feature (8989)..(8989): n is a, c, g, or t
ttctttgattgtttaaccttacaaaaatttagactagtaacttatttcacactgaaaagtgagttccaggaaggttagaggccacagagtataaaaggtaaaaccataaagcctctagatgctaacatagattgctaaaaacttcagggaacggaaagatttcttaaaactaaacagtggaacaatggtatatttaactacattaaaactaaaactttaatttgtcaagacatcatttgagagcgaaaaggccggtcaaggacatgggtaagatgtttacaaatacacagttatcatttgctagcatttaaaatatataaagagttcctaaaaataaggaaggaaaagacagaaaaggctactgaaaattggacagaagcctgaagagcgacaccccagaagagctgacgtaatggccagaagtggtggaaagggctccaccttgcatgtcaccaggcaatgcatgacaaagcccaggccttccccgcagaggccaacgctgaccctcctgacagtggcaggactggaagcctcagtactctggggccctgcagtgaggacacgccctgcccagtcccatggggagaccctagcatatccttgaagggagctgtgtaagcattaggaacccagtccctgcactggaggagctcgtgcacggagggtttgtcacaactgccccgcctggaatagcccatggcactgcacagtggatggagaaactgtgattcttgtgctgggaggtggtggggcttctcccagctacatggccagtgccaagcttgggaaggttctgtttctcctactttctcgtctaggccctcctaccctagggtggtcttcctgacctgggcagtatctttgacctcgtgtgtccctccttgtccatccccagagcccaaggtggtgtttgccaaggagcagccagcacacagggaggtgcaggctgaggcgggggccagtgccacgctgagctgcgaggtggcccaggcccagacagaggtgacgtggtacaaggatgggaagaagctgagttccagctcgaaagtgcgcgtggaggccgtgggctgcacacggaggctggtggtgcagcaggcgggccaggcagaggccggggagtacagctgcgaggcagggggtcagcagctctccttccgcctgcaggtggcagagctggagccccaaatttcagagagaccctgccgcagggagcctctggtggtcaaggagcatgaagacatcatcctgaccgccacactggccacaccctctgcggccacggtgacctggctcaaggatggtgtggagattcgccgcagcaagcggcatgagacagccagccagggggacacccacaccctgaccgtgcatggcgcccaggttctggacagcgccatctacagctgccgtgtgggcgcagaggggcaggacttcccagtgcaggtggaagaggtggccgccaagttctgccggctgctggagcctgtgtgcggcgagctgggtggcacggtgacactggcctgcgagctaagcccagcgtgtgcagaggtggtgtggcgctgcggcaacacgcagcntcgggtgggcaagcgcttccagatggtggccgaggggcccgtgcgctcactcactgtgttggggctgcgcgcagaggacgcaggggagtacgtgtgtgagagccgtgatgaccacaccagtgcgcagctcaccgtcagtgtgccccgagtggtgaagtttatgtctgggctgagcaccgtggtcgcagaggagggcggcgaggccaccttccagtgcgtggtgtcccccagtgatgtggcagtcgtgtggttccgggacggtgccctgcttcagcccagcgagaagtttgccatatcacagagtggcgccagccacagcctgaccatctcagacctggtgctggaggacgcgggccagatcaccgtggaggctgagggcgcctcatcctctgctgccctgagggtccgagagcgcctgtgctgttcaaaaagaagctgganccgcagacggtggaggagcgnagctcggtgaccctggaggtggagctgacgcggccgtggccggagctgaggtggacacggaacgcgacggccnnggcgccgggaaagaacgtggagatccacgccgagggcgcccgccaccgcctggttctcacaacgtaggttttgccgaccgtggcttctttggctgcgagacgccggatgacaagacacaggccaaactcaccgtggagatgcgccaggtacggctcgtacggggcctgcaggcagtggaggcacgggagcagggcacggctaccatggaggtgcagctgtcgcatgcggacgtggatggcagctggactcgtgacggtctgcggttccagcaggggcccacgtgccacctggctgtgcggggccccatgcacaccctcacactctcggggctgcggccagaggatagtggccttatggtcttcaaggccgaaggagtgcacacgtcggcgcggctcgtggtcaccgagcttcccgtgagcttcagccgcccgctgcaggacgtggtgaccactgagaaggagaaggttaccctggagtgcgagctgtcgcgtcctaatgtggatgtgcgctggctgaaggacggtgtggagctgcgggcaggcaagacgatggccatcgcagcccagggcgcctgcaggagcctcaccatttaccggtgcgagttcgcggatcagggagtgtatgtgtgtgatgcccatgatgcccagagctctgcctccgtgaaggtacaaggaaggacatacactctcatctaccggagagtcctggcggaagatgcaggagagatccaatttgtagccgaaaatgcagaatcgcgagcccagctccgagtgaaggagctgccagtgaccctcgtgcgcccgctgcgggacaagattgccatggagaagcaccgcggtgtgctggagtgtcaggtgtcccgggccagcgcccaggtgcggtggttcaagggcagtcaggagctgcagcccgggcccaagtacgagctggtcagtgatggcctctaccgcaagctgatcatcagtgatgtccacgcagaggacgaggacacctacacctgtgacgccggtgatgtcaagaccagtgcacagttcttcgtggaagagcaatccatcaccattgtgcggggtctgcaggacgtgacagtgatggagcccgctcctgcctggtttgagtgtgagacctccatcccctcagtgcggccacctaagtggctcctggggaagacggtgttgcaggctggggggaacgtgggcctggagcaggagggcacggtgcaccggctgatgctgcggcggacctgctccaccatgaccgggcccgtgcacttcaccgttggcaagtcgcgctcctctgcccgcctggtggtctcagacatccccgtagtcctcacacggccgttggagcccaagacagggcgtgagctgcagtcagtggtcctgtcctgcgacttccggccagcccccaaggctgtgcagtggtacaaggatgacacgcccctgtctccctctgagaagtttaagatgagcctggagggtcagatggctgagctgcgcatcctccggctcatgcctgctgatgctggtgtctaccggtgccaggcgggcagtgcccacagcagcactgaggtcactgtggaagcgcgggaggtgacagtgacagggccgctacaggatgcagaggccacggaggagggctgggccagcttctcctgtgagctgtcccacgaggatgaggaggtcgagtggtcgctcaacgggatgcccctgtacaacgacagcttccatgagatctcacacaagggccggcgccacacgctggtactgaagagcatccagcgggctgatgcgggcatagtacgcgcctcctccctgaaggtgtcgacctctgcccgcctggaggtccgagtgaagccggtggtgttcctgaaggcgctggatgacctgtccgcagaggagcgcggcaccctggccctgcagtgtgaagtctctgaccccgaggcccatgtggtgtggcgcaaagatggcgtgcagctgggccccagtgacaagtatgacttcctgcacacggcgggcacgcgggggctcgtggtgcatgacgtgagccctgaagacgccggcctgtacacctgccacgtgggctccgaggagacccgggcccgggtccgcgtgcacgatctgcacgtgggcatcaccaagaggctgaagacaatggaggtgctggaaggggaaagctgcagctttgagtgcgtcctgtcccacgagagtgccagcgacccggccatgtggacagtcggtgggaagacagtgggcagctccagccgcttccaggccacacgtcagggccgaaaatacatcctggtggtccgggaggctgcaccaagtgatgccggggaggtggtcttctctgtgcggggcctcacctccaaggcctcactcattgtcagagagaggccggccgccatcatcaagcccctggaagaccagtgggtggcgccaggggaggacgtggagctgcgctgtgagctgtcacgggcgggaacgcccgtgcactggctgaaggacaggaaggccatccgcaagagccagaagtatgatgtggtctgcgagggcacgatggccatgctggtcatccgcggggcctcgctcaaggacgcgggcgagtacacgtgtgaggtggaggcttccaagagcacagccagcctccatgtggaagaaaaagcaaactgcttcacagaggagctgaccaatctgcaggtggaggagaaaggcacagctgtgttcacgtgcaagacggagcaccccgcggccacagtgacctggcgcaagggcctcttggagctacgggcctcagggaagcaccagcccagccaggagggcctgaccctgcggctcaccatcagtgccctggagaaggcagacagcgacacctatacctgcgacattggccaggcccagtcccgggcccagctcctagtgcaaggccggagagtgcacatcatcgaggacctggaggatgtggatgtgcaggagggctcctcggccaccttccgttgccggatctccccggccaactacgagcctgtgcactggttcctggacaagacacccctgcatgccaacgagctcaatgagatcgatgcccagcccgggggctaccacgtgctgaccctgcggcagctggcgctcaaggactcgggcaccatctactttgaggcgggtgaccagcgggcctcggccgccctgcgggtcactgagaagccaagcgtcttctcccgggagctcacagatgccaccatcacagagggtgaggacttgaccctggtgtgcgagaccagcacctgcgacattcctgtgtgctggaccaaggatgggaagaccctgcgggggtctgcccggtgccagctgagccatgagggccaccgggcccagctgctcatcactggggccaccctgcaggacagtggacgctacaagtgtgaggctgggggcgcctgcagcagctccattgtcagggtgcatgcgcggccagtgcggttccaggaggccctgaaggacctggaggtgctggagggtggtgctgccacactgcgctgtgtgctgtcatctgtggctgcgcccgtgaagtggtgctatggaaacaacgtcctgaggccaggtgacaaatacagcctacgccaggagggtgccatgctggagctggtggtccggaacctccggccgcaggacagcgggcggtactcatgctccttcggggaccagactacttctgccaccctcacagtgactgccctgcctgcccagttcatcgggaaactgagaaacaaggaggccacagaaggggccacggccacgctgcggtgtgagctgagcaaggcagcccctgtggagtggagaaaggggtccgagaccctcagagatggggacagatactgtctgaggcaggacggggccatgtgtgagctgcagatccgtggcctggccatggtggatgccgcggagtactcgtgtgtgtgtggagaggagaggacctcagcctcactcaccatcaggcccatgcctgcccacttcataggaagactgagacaccaagagagcatagaaggggccacagccacgctgcggtgtgagctgagcaaggcggcccccgtggagtggaggaaggggcgtgagagcctcagagatggggacagacatagcctgaggcaggacggggctgtgtgcgagctgcagatctgtggcctggctgtggcagatgctggggagtactcctgtgtgtgtggggaggagaggacctctgccactctcaccgtgaaggccctgccagccaagttcacagagggtctgaggaatgaagaggccgtggaaggggccacagccatgttgtggtgtgaactgagcaaggtggcccctgtggagtggaggaaggggcccgagaacctcagagatggggacagatacatcctgaggcaggaggggaccaggtgtgagctgcagatctgtggcctggccatggcggacgccggggagtacttgtgtgtgtgcgggcaggagaggacctcagccacgctcaccatcagggctctgcctgccaggttcatagaagatgtgaaaaaccaggaggccagagaaggggccacggctgtgctgcagtgtgagctgaacagtgcagcccctgtggagtggagaaaggggtctgagacccttagagatggggacagatacagcctgaggcaggacgggactaaatgtgagctgcagattcgtggcctggccatggcagacactggggagtactcgtgcgtgtgcgggcaggagaggacctcggctatgctcaccgtcagggctctacccatcaagttcacagagggtctgaggaacgaagaggccacagaaggggcaacagccgtgctgcggtgtgagctgagcaagatggcccccgtggagtggtggaaggggcatgagaccctcagagatggagacagacacagcctgaggcaggacggggccaggtgtgagctgcagatccgcggcctcgtggcagaggacgctggggagtacctgtgcatgtgcgggaaggagaggacctcagccatgctcaccgtcagggccatgccttccaagttcatagagggtctgaggaatgaagaggccacagaaggggacacggccacgctgtggtgtgagctgagcaaggcggcaccggtggagtggaggaaggggcatgagaccctcagagatggggacagacacagcctgaggcaggacgggtccaggtgtgagctgcagatccgtggcctggctgtggtggatgccggggagtactcgtgtgtgtgcgggcaggagaggacctcagccacactcactgtcagggccctgcctgccagattcatagaagatgtgaaaaaccaggaggccagagaaggggccacggccgtgctgcaatgtgagctgagcaaggcggcccccgtggagtggaggaaggggtctgagaccctcagaggtggggacagatacagcctgaggcaggatgggaccagatgtgagctgcagattcatggcctgtctgtggcagacactggggagtactcgtgtgtgtgcgggcaggagaggacctcggccacactcaccgtcagggccctgcctgcacgattcactcaagatctgaagaccaaggaggcctcagaaggggccacagctacactgcagtgtgagctgagcaaggtggcccctgtggaatggaagaagggtcctgagaccctcagagatgggggcagatacagcctgaagcaggatgggacgaggtgtgagctgcagatccatgacctgtctgtggcggatgctggggaatactcatgcatgtgtggacaagagaggacctcggccacgctcactgtcagggccctgcctgccaggttcacagagggtctgaggaatgaagaggccatggaaggggccacagccacactgcaatgtgagctgagcaaggcagcccctgtggagtggaggaaaggccttgaggctctcagagatggggacaaatacagcctgagacaagacggggctgtgtgtgagctgcagattcatggcctggctatggcagataacggggtgtactcatgtgtgtgtgggcaggagaggacctcagctacactcactgtcagggccctgcctgccagattcatagaggatatgagaaaccagaaggccacagaaggggctacagtcacattgcaatgtaagctgagaaaggcggcccccgtggagtggagaaaggggcccaacaccctcaaagatggggacaggtacagcctgaagcaggatgggaccagttgtgagctgcagattcgtggcctggtcatagcagatgctggagaatactcgtgcatatgtgagcaggagaggacctcggccacgctcactgtcagggccctgccggccagattcatagaagatgtgagaaatcacgaggccacagaaggggccacagctgtgctgcagtgtgagctgagcaaggcggcccccgtggagtggcggaaggggtctgagaccctcagagatggggacagatatagcctgaggcaggacgggacgaggtgtgagctgcagattcgtggcctggctgtggaggacactggagagtatttgtgtgtgtgcgggcaggagagaacctcagctacactcactgtcagggccctgccagccagattcatagacaacatgacaaaccaggaagccagagaaggggccacggccacactgcactgtgaactgagcaaggtggcccctgtggagtggaggaagggacctgaaaccctccgagatggggacagacacagcctgaggcaggagaatngcttgaacccnggaggcngnggttgnagtgagcnangatcntgccantgcantccagcctggnnannanagcnagctctntc

SEQ ID NO: 381793 - DNA, 6263 bp, Homo sapiens
  misc_feature (6181)..(6181): n is a, c, g, or t
  misc_feature (6192)..(6192): n is a, c, g, or t
  misc_feature (6199)..(6199): n is a, c, g, or t
  misc_feature (6201)..(6201): n is a, c, g, or t
  misc_feature (6207)..(6207): n is a, c, g, or t
  misc_feature (6215)..(6215): n is a, c, g, or t
  misc_feature (6217)..(6217): n is a, c, g, or t
  misc_feature (6222)..(6222): n is a, c, g, or t
  misc_feature (6228)..(6228): n is a, c, g, or t
  misc_feature (6233)..(6233): n is a, c, g, or t
  misc_feature (6244)..(6245): n is a, c, g, or t
  misc_feature (6247)..(6248): n is a, c, g, or t
  misc_feature (6250)..(6250): n is a, c, g, or t
  misc_feature (6254)..(6254): n is a, c, g, or t
  misc_feature (6261)..(6261): n is a, c, g, or t
cgctaggtagagggctgggttgatggacgaggctgacaacgtgcgcttgcgcaggaaggaaggacatacactctcatctaccggagagtcctggcggaagatgcaggagagatccaatttgtagccgaaaatgcagaatcgcgagcccagctccgagtgaaggagctgccagtgaccctcgtgcgcccgctgcgggacaagattgccatggagaagcaccgcggtgtgctggagtgtcaggtgtcccgggccagcgcccaggtgcggtggttcaagggcagtcaggagctgcagcccgggcccaagtacgagctggtcagtgatggcctctaccgcaagctgatcatcagtgatgtccacgcagaggacgaggacacctacacctgtgacgccggtgatgtcaagaccagtgcacagttcttcgtggaagagcaatccatcaccattgtgcggggtctgcaggacgtgacagtgatggagcccgctcctgcctggtttgagtgtgagacctccatcccctcagtgcggccacctaagtggctcctggggaagacggtgttgcaggctggggggaacgtgggcctggagcaggagggcacggtgcaccggctgatgctgcggcggacctgctccaccatgaccgggcccgtgcacttcaccgttggcaagtcgcgctcctctgcccgcctggtggtctcagacatccccgtagtcctcacacggccgttggagcccaagacagggcgtgagctgcagtcagtggtcctgtcctgcgacttccggccagcccccaaggctgtgcagtggtacaaggatgacacgcccctgtctccctctgagaagtttaagatgagcctggagggtcagatggctgagctgcgcatcctccggctcatgcctgctgatgctggtgtctaccggtgccaggcgggcagtgcccacagcagcactgaggtcactgtggaagcgcgggaggtgacagtgacagggccgctacaggatgcagaggccacggaggagggctgggccagcttctcctgtgagctgtcccacgaggatgaggaggtcgagtggtcgctcaacgggatgcccctgtacaacgacagcttccatgagatctcacacaagggccggcgccacacgctggtactgaagagcatccagcgggctgatgcgggcatagtacgcgcctcctccctgaaggtgtcgacctctgcccgcctggaggtccgagtgaagccggtggtgttcctgaaggcgctggatgacctgtccgcagaggagcgcggcaccctggccctgcagtgtgaagtctctgaccccgaggcccatgtggtgtggcgcaaagatggcgtgcagctgggccccagtgacaagtatgacttcctgcacacggcgggcacgcgggggctcgtggtgcatgacgtgagccctgaagacgccggcctgtacacctgccacgtgggctccgaggagacccgggcccgggtccgcgtgcacgatctgcacgtgggcatcaccaagaggctgaagacaatggaggtgctggaaggggaaagctgcagctttgagtgcgtcctgtcccacgagagtgccagcgacccggccatgtggacagtcggtgggaagacagtgggcagctccagccgcttccaggccacacgtcagggccgaaaatacatcctggtggtccgggaggctgcaccaagtgatgccggggaggtggtcttctctgtgcggggcctcacctccaaggcctcactcattgtcagagagaggccggccgccatcatcaagcccctggaagaccagtgggtggcgccaggggaggacgtggagctgcgctgtgagctgtcacgggcgggaacgcccgtgcactggctgaaggacaggaaggccatccgcaagagccagaagtatgatgtggtctgcgagggcacgatggccatgctggtcatccgcggggcctcgctcaaggacgcgggcgagtacacgtgtgaggtggaggcttccaagagcacagccagcctccatgtggaagaaaaagcaaactgcttcacagaggagctgaccaatctgcaggtggaggagaaaggcacagctgtgttcacgtgcaagacggagcaccccgcggccacagtgacctggcgcaagggcctcttggagctacgggcctcagggaagcaccagcccagccaggagggcctgaccctgcggctcaccatcagtgccctggagaaggcagacagcgacacctatacctgcgacattggccaggcccagtcccgggcccagctcctagtgcaaggccggagagtgcacatcatcgaggacctggaggatgtggatgtgcaggagggctcctcggccaccttccgttgccggatctccccggccaactacgagcctgtgcactggttcctggacaagacacccctgcatgccaacgagctcaatgagatcgatgcccagcccgggggctaccacgtgctgaccctgcggcagctggcgctcaaggactcgggcaccatctactttgaggcgggtgaccagcgggcctcggccgccctgcgggtcactgagaagccaagcgtcttctcccgggagctcacagatgccaccatcacagagggtgaggacttgaccctggtgtgcgagaccagcacctgcgacattcctgtgtgctggaccaaggatgggaagaccctgcgggggtctgcccggtgccagctgagccatgagggccaccgggcccagctgctcatcactggggccaccctgcaggacagtggacgctacaagtgtgaggctgggggcgcctgcagcagctccattgtcagggtgcatgcgcggccagtgcggttccaggaggccctgaaggacctggaggtgctggagggtggtgctgccacactgcgctgtgtgctgtcatctgtggctgcgcccgtgaagtggtgctatggaaacaacgtcctgaggccaggtgacaaatacagcctacgccaggagggtgccatgctggagctggtggtccggaacctccggccgcaggacagcgggcggtactcatgctccttcggggaccagactacttctgccaccctcacagtgactgccctgcctgcccagttcatcgggaaactgagaaacaaggaggccacagaaggggccacggccacgctgcggtgtgagctgagcaaggcagcccctgtggagtggagaaaggggtccgagaccctcagagatggggacagatactgtctgaggcaggacggggccatgtgtgagctgcagatccgtggcctggccatggtggatgccgcggagtactcgtgtgtgtgtggagaggagaggacctcagcctcactcaccatcaggcccatgcctgcccacttcataggaagactgagacaccaagagagcatagaaggggccacagccacgctgcggtgtgagctgagcaaggcggcccccgtggagtggaggaaggggcgtgagagcctcagagatggggacagacatagcctgaggcaggacggggctgtgtgcgagctgcagatctgtggcctggctgtggcagatgctggggagtactcctgtgtgtgtggggaggagaggacctctgccactctcaccgtgaaggccctgccagccaagttcacagagggtctgaggaatgaagaggccgtggaaggggccacagccatgttgtggtgtgaactgagcaaggtggcccctgtggagtggaggaaggggcccgagaacctcagagatggggacagatacatcctgaggcaggaggggaccaggtgtgagctgcagatctgtggcctggccatggcggacgccggggagtacttgtgtgtgtgcgggcaggagaggacctcagccacgctcaccatcagggctctgcctgccaggttcatagaagatgtgaaaaaccaggaggccagagaaggggccacggctgtgctgcagtgtgagctgaacagtgcagcccctgtggagtggagaaaggggtctgagacccttagagatggggacagatacagcctgaggcaggacgggactaaatgtgagctgcagattcgtggcctggccatggcagacactggggagtactcgtgcgtgtgcgggcaggagaggacctcggctatgctcaccgtcagggctctacccatcaagttcacagagggtctgaggaacgaagaggccacagaaggggcaacagccgtgctgcggtgtgagctgagcaagatggcccccgtggagtggtggaaggggcatgagaccctcagagatggagacagacacagcctgaggcaggacggggccaggtgtgagctgcagatccgcggcctcgtggcagaggacgctggggagtacctgtgcatgtgcgggaaggagaggacctcagccatgctcaccgtcagggccatgccttccaagttcatagagggtctgaggaatgaagaggccacagaaggggacacggccacgctgtggtgtgagctgagcaaggcggcaccggtggagtggaggaaggggcatgagaccctcagagatggggacagacacagcctgaggcaggacgggtccaggtgtgagctgcagatccgtggcctggctgtggtggatgccggggagtactcgtgtgtgtgcgggcaggagaggacctcagccacactcactgtcagggccctgcctgccagattcatagaagatgtgaaaaaccaggaggccagagaaggggccacggccgtgctgcaatgtgagctgagcaaggcggcccccgtggagtggaggaaggggtctgagaccctcagaggtggggacagatacagcctgaggcaggatgggaccagatgtgagctgcagattcatggcctgtctgtggcagacactggggagtactcgtgtgtgtgcgggcaggagaggacctcggccacactcaccgtcagggccctgcctgcacgattcactcaagatctgaagaccaaggaggcctcagaaggggccacagctacactgcagtgtgagctgagcaaggtggcccctgtggaatggaagaagggtcctgagaccctcagagatgggggcagatacagcctgaagcaggatgggacgaggtgtgagctgcagatccatgacctgtctgtggcggatgctggggaatactcatgcatgtgtggacaagagaggacctcggccacgctcactgtcagggccctgcctgccaggttcacagagggtctgaggaatgaagaggccatggaaggggccacagccacactgcaatgtgagctgagcaaggcagcccctgtggagtggaggaaaggccttgaggctctcagagatggggacaaatacagcctgagacaagacggggctgtgtgtgagctgcagattcatggcctggctatggcagataacggggtgtactcatgtgtgtgtgggcaggagaggacctcagctacactcactgtcagggccctgcctgccagattcatagaggatatgagaaaccagaaggccacagaaggggctacagtcacattgcaatgtaagctgagaaaggcggcccccgtggagtggagaaaggggcccaacaccctcaaagatggggacaggtacagcctgaagcaggatgggaccagttgtgagctgcagattcgtggcctggtcatagcagatgctggagaatactcgtgcatatgtgagcaggagaggacctcggccacgctcactgtcagggccctgccggccagattcatagaagatgtgagaaatcacgaggccacagaaggggccacagctgtgctgcagtgtgagctgagcaaggcggcccccgtggagtggcggaaggggtctgagaccctcagagatggggacagatatagcctgaggcaggacgggacgaggtgtgagctgcagattcgtggcctggctgtggaggacactggagagtatttgtgtgtgtgcgggcaggagagaacctcagctacactcactgtcagggccctgccagccagattcatagacaacatgacaaaccaggaagccagagaaggggccacggccacactgcactgtgaactgagcaaggtggcccctgtggagtggaggaagggacctgaaaccctccgagatggggacagacacagcctgaggcaggagaatngcttgaacccnggaggcngnggttgnagtgagcnangatcntgccantgcantccagcctggnnannanagcnagctctntc

SEQ ID NO: 381794 - DNA, 7793 bp, Homo sapiens
  misc_feature (1577)..(1577): n is a, c, g, or t
  misc_feature (2018)..(2018): n is a, c, g, or t
  misc_feature (2039)..(2039): n is a, c, g, or t
  misc_feature (2112)..(2113): n is a, c, g, or t
ttctttgattgtttaaccttacaaaaatttagactagtaacttatttcacactgaaaagtgagttccaggaaggttagaggccacagagtataaaaggtaaaaccataaagcctctagatgctaacatagattgctaaaaacttcagggaacggaaagatttcttaaaactaaacagtggaacaatggtatatttaactacattaaaactaaaactttaatttgtcaagacatcatttgagagcgaaaaggccggtcaaggacatgggtaagatgtttacaaatacacagttatcatttgctagcatttaaaatatataaagagttcctaaaaataaggaaggaaaagacagaaaaggctactgaaaattggacagaagcctgaagagcgacaccccagaagagctgacgtaatggccagaagtggtggaaagggctccaccttgcatgtcaccaggcaatgcatgacaaagcccaggccttccccgcagaggccaacgctgaccctcctgacagtggcaggactggaagcctcagtactctggggccctgcagtgaggacacgccctgcccagtcccatggggagaccctagcatatccttgaagggagctgtgtaagcattaggaacccagtccctgcactggaggagctcgtgcacggagggtttgtcacaactgccccgcctggaatagcccatggcactgcacagtggatggagaaactgtgattcttgtgctgggaggtggtggggcttctcccagctacatggccagtgccaagcttgggaaggttctgtttctcctactttctcgtctaggccctcctaccctagggtggtcttcctgacctgggcagtatctttgacctcgtgtgtccctccttgtccatccccagagcccaaggtggtgtttgccaaggagcagccagcacacagggaggtgcaggctgaggcgggggccagtgccacgctgagctgcgaggtggcccaggcccagacagaggtgacgtggtacaaggatgggaagaagctgagttccagctcgaaagtgcgcgtggaggccgtgggctgcacacggaggctggtggtgcagcaggcgggccaggcagaggccggggagtacagctgcgaggcagggggtcagcagctctccttccgcctgcaggtggcagagctggagccccaaatttcagagagaccctgccgcagggagcctctggtggtcaaggagcatgaagacatcatcctgaccgccacactggccacaccctctgcggccacggtgacctggctcaaggatggtgtggagattcgccgcagcaagcggcatgagacagccagccagggggacacccacaccctgaccgtgcatggcgcccaggttctggacagcgccatctacagctgccgtgtgggcgcagaggggcaggacttcccagtgcaggtggaagaggtggccgccaagttctgccggctgctggagcctgtgtgcggcgagctgggtggcacggtgacactggcctgcgagctaagcccagcgtgtgcagaggtggtgtggcgctgcggcaacacgcagcntcgggtgggcaagcgcttccagatggtggccgaggggcccgtgcgctcactcactgtgttggggctgcgcgcagaggacgcaggggagtacgtgtgtgagagccgtgatgaccacaccagtgcgcagctcaccgtcagtgtgccccgagtggtgaagtttatgtctgggctgagcaccgtggtcgcagaggagggcggcgaggccaccttccagtgcgtggtgtcccccagtgatgtggcagtcgtgtggttccgggacggtgccctgcttcagcccagcgagaagtttgccatatcacagagtggcgccagccacagcctgaccatctcagacctggtgctggaggacgcgggccagatcaccgtggaggctgagggcgcctcatcctctgctgccctgagggtccgagagcgcctgtgctgttcaaaaagaagctgganccgcagacggtggaggagcgnagctcggtgaccctggaggtggagctgacgcggccgtggccggagctgaggtggacacggaacgcgacggccnnggcgccgggaaagaacgtggagatccacgccgagggcgcccgccaccgcctggttctcacaacgtaggttttgccgaccgtggcttctttggctgcgagacgccggatgacaagacacaggccaaactcaccgtggagatgcgccaggtacggctcgtacggggcctgcaggcagtggaggcacgggagcagggcacggctaccatggaggtgcagctgtcgcatgcggacgtggatggcagctggactcgtgacggtctgcggttccagcaggggcccacgtgccacctggctgtgcggggccccatgcacaccctcacactctcggggctgcggccagaggatagtggccttatggtcttcaaggccgaaggagtgcacacgtcggcgcggctcgtggtcaccgagcttcccgtgagcttcagccgcccgctgcaggacgtggtgaccactgagaaggagaaggttaccctggagtgcgagctgtcgcgtcctaatgtggatgtgcgctggctgaaggacggtgtggagctgcgggcaggcaagacgatggccatcgcagcccagggcgcctgcaggagcctcaccatttaccggtgcgagttcgcggatcagggagtgtatgtgtgtgatgcccatgatgcccagagctctgcctccgtgaaggtacaaggaaggacatacactctcatctaccggagagtcctggcggaagatgcaggagagatccaatttgtagccgaaaatgcagaatcgcgagcccagctccgagtgaaggagctgccagtgaccctcgtgcgcccgctgcgggacaagattgccatggagaagcaccgcggtgtgctggagtgtcaggtgtcccgggccagcgcccaggtgcggtggttcaagggcagtcaggagctgcagcccgggcccaagtacgagctggtcagtgatggcctctaccgcaagctgatcatcagtgatgtccacgcagaggacgaggacacctacacctgtgacgccggtgatgtcaagaccagtgcacagttcttcgtggaagagcaatccatcaccattgtgcggggtctgcaggacgtgacagtgatggagcccgctcctgcctggtttgagtgtgagacctccatcccctcagtgcggccacctaagtggctcctggggaagacggtgttgcaggctggggggaacgtgggcctggagcaggagggcacggtgcaccggctgatgctgcggcggacctgctccaccatgaccgggcccgtgcacttcaccgttggcaagtcgcgctcctctgcccgcctggtggtctcagacatccccgtagtcctcacacggccgttggagcccaagacagggcgtgagctgcagtcagtggtcctgtcctgcgacttccggccagcccccaaggctgtgcagtggtacaaggatgacacgcccctgtctccctctgagaagtttaagatgagcctggagggtcagatggctgagctgcgcatcctccggctcatgcctgctgatgctggtgtctaccggtgccaggcgggcagtgcccacagcagcactgaggtcactgtggaagcgcgggaggtgacagtgacagggccgctacaggatgcagaggccacggaggagggctgggccagcttctcctgtgagctgtcccacgaggatgaggaggtcgagtggtcgctcaacgggatgcccctgtacaacgacagcttccatgagatctcacacaagggccggcgccacacgctggtactgaagagcatccagcgggctgatgcgggcatagtacgcgcctcctccctgaaggtgtcgacctctgcccgcctggaggtccgagtgaagccggtggtgttcctgaaggcgctggatgacctgtccgcagaggagcgcggcaccctggccctgcagtgtgaagtctctgaccccgaggcccatgtggtgtggcgcaaagatggcgtgcagctgggccccagtgacaagtatgacttcctgcacacggcgggcacgcgggggctcgtggtgcatgacgtgagccctgaagacgccggcctgtacacctgccacgtgggctccgaggagacccgggcccgggtccgcgtgcacgatctgcacgtgggcatcaccaagaggctgaagacaatggaggtgctggaaggggaaagctgcagctttgagtgcgtcctgtcccacgagagtgccagcgacccggccatgtggacagtcggtgggaagacagtgggcagctccagccgcttccaggccacacgtcagggccgaaaatacatcctggtggtccgggaggctgcaccaagtgatgccggggaggtggtcttctctgtgcggggcctcacctccaaggcctcactcattgtcagagagaggccggccgccatcatcaagcccctggaagaccagtgggtggcgccaggggaggacgtggagctgcgctgtgagctgtcacgggcgggaacgcccgtgcactggctgaaggacaggaaggccatccgcaagagccagaagtatgatgtggtctgcgagggcacgatggccatgctggtcatccgcggggcctcgctcaaggacgcgggcgagtacacgtgtgaggtggaggcttccaagagcacagccagcctccatgtggaagaaaaagcaaactgcttcacagaggagctgaccaatctgcaggtggaggagaaaggcacagctgtgttcacgtgcaagacggagcaccccgcggccacagtgacctggcgcaagggcctcttggagctacgggcctcagggaagcaccagcccagccaggagggcctgaccctgcggctcaccatcagtgccctggagaaggcagacagcgacacctatacctgcgacattggccaggcccagtcccgggcccagctcctagtgcaaggccggagagtgcacatcatcgaggacctggaggatgtggatgtgcaggagggctcctcggccaccttccgttgccggatctccccggccaactacgagcctgtgcactggttcctggacaagacacccctgcatgccaacgagctcaatgagatcgatgcccagcccgggggctaccacgtgctgaccctgcggcagctggcgctcaaggactcgggcaccatctactttgaggcgggtgaccagcgggcctcggccgccctgcgggtcactgagaagccaagcgtcttctcccgggagctcacagatgccaccatcacagagggtgaggacttgaccctggtgtgcgagaccagcacctgcgacattcctgtgtgctggaccaaggatgggaagaccctgcgggggtctgcccggtgccagctgagccatgagggccaccgggcccagctgctcatcactggggccaccctgcaggacagtggacgctacaagtgtgaggctgggggcgcctgcagcagctccattgtcagggtgcatgcgcggccagtgcggttccaggaggccctgaaggacctggaggtgctggagggtggtgctgccacactgcgctgtgtgctgtcatctgtggctgcgcccgtgaagtggtgctatggaaacaacgtcctgaggccaggtgacaaatacagcctacgccaggagggtgccatgctggagctggtggtccggaacctccggccgcaggacagcgggcggtactcatgctccttcggggaccagactacttctgccaccctcacagtgactgccctgcctgcccagttcatcgggaaactgagaaacaaggaggccacagaaggggccacggccacgctgcggtgtgagctgagcaaggcagcccctgtggagtggagaaaggggtccgagaccctcagagatggggacagatactgtctgaggcaggacggggccatgtgtgagctgcagatccgtggcctggccatggtggatgccgcggagtactcgtgtgtgtgtggagaggagaggacctcagcctcactcaccatcaggcccatgcctgcccacttcataggaagactgagacaccaagagagcatagaaggggccacagccacgctgcggtgtgagctgagcaaggcggcccccgtggagtggaggaaggggcgtgagagcctcagagatggggacagacatagcctgaggcaggacggggctgtgtgcgagctgcagatctgtggcctggctgtggcagatgctggggagtactcctgtgtgtgtggggaggagaggacctctgccactctcaccgtgaaggccctgccagccaagttcacagagggtctgaggaatgaagaggccgtggaaggggccacagccatgttgtggtgtgaactgagcaaggtggcccctgtggagtggaggaaggggcccgagaacctcagagatggggacagatacatcctgaggcaggaggggaccaggtgtgagctgcagatctgtggcctggccatggcggacgccggggagtacttgtgtgtgtgcgggcaggagaggacctcagccacgctcaccatcagggctctgcctgccaggttcatagaagatgtgaaaaaccaggaggccagagaaggggccacggctgtgctgcagtgtgagctgaacagtgcagcccctgtggagtggagaaaggggtctgagacccttagagatggggacagatacagcctgaggcaggacgggactaaatgtgagctgcagattcgtggcctggccatggcagacactggggagtactcgtgcgtgtgcgggcaggagaggacctcggctatgctcaccgtcagggctctacccatcaagttcacagagggtctgaggaacgaagaggccacagaaggggcaacagccgtgctgcggtgtgagctgagcaagatggcccccgtggagtggtggaaggggcatgagaccctcagagatggagacagacacagcctgaggcaggacggggccaggtgtgagctgcagatccgcggcctcgtggcagaggacgctggggagtacctgtgcatgtgcgggaaggagaggacctcagccatgctcaccgtcagggccatgccttccaagttcatagagggtctgaggaatgaagaggccacagaaggggacacggccacgctgtggtgtgagctgagcaaggcggcaccggtggagtggaggaaggggcatgagaccctcagagatggggacagacacagcctgaggcaggacgggtccaggtgtgagctgcagatccgtggcctggctgtggtggatgccggggagtactcgtgtgtgtgcgggcaggagaggacctcagccacactcactgtcagggccctgcctgccagattcatagaagatgtgaaaaaccaggaggccagagaaggggccacggccgtgctgcaatgtgagctgagcaaggcggcccccgtggagtggaggaaggggtctgagaccctcagaggtggggacagatacagcctgaggcaggatgggaccagatgtgagctgcagattcatggcctgtctgtggcagacactggggagtactcgtgtgtgtgcgggcaggagaggacctcggccacactcaccgtcaggggtaaagaccacatgtggccacctgagtgattcctgtctcctcccacctaacccacatgatctgtgctctcccagttcctcttgatgtcattgccatctcatt

SEQ ID NO: 381795 - DNA, 8090 bp, Homo sapiens
  misc_feature (1577)..(1577): n is a, c, g, or t
  misc_feature (2018)..(2018): n is a, c, g, or t
  misc_feature (2039)..(2039): n is a, c, g, or t
  misc_feature (2112)..(2113): n is a, c, g, or t
ttctttgattgtttaaccttacaaaaatttagactagtaacttatttcacactgaaaagtgagttccaggaaggttagaggccacagagtataaaaggtaaaaccataaagcctctagatgctaacatagattgctaaaaacttcagggaacggaaagatttcttaaaactaaacagtggaacaatggtatatttaactacattaaaactaaaactttaatttgtcaagacatcatttgagagcgaaaaggccggtcaaggacatgggtaagatgtttacaaatacacagttatcatttgctagcatttaaaatatataaagagttcctaaaaataaggaaggaaaagacagaaaaggctactgaaaattggacagaagcctgaagagcgacaccccagaagagctgacgtaatggccagaagtggtggaaagggctccaccttgcatgtcaccaggcaatgcatgacaaagcccaggccttccccgcagaggccaacgctgaccctcctgacagtggcaggactggaagcctcagtactctggggccctgcagtgaggacacgccctgcccagtcccatggggagaccctagcatatccttgaagggagctgtgtaagcattaggaacccagtccctgcactggaggagctcgtgcacggagggtttgtcacaactgccccgcctggaatagcccatggcactgcacagtggatggagaaactgtgattcttgtgctgggaggtggtggggcttctcccagctacatggccagtgccaagcttgggaaggttctgtttctcctactttctcgtctaggccctcctaccctagggtggtcttcctgacctgggcagtatctttgacctcgtgtgtccctccttgtccatccccagagcccaaggtggtgtttgccaaggagcagccagcacacagggaggtgcaggctgaggcgggggccagtgccacgctgagctgcgaggtggcccaggcccagacagaggtgacgtggtacaaggatgggaagaagctgagttccagctcgaaagtgcgcgtggaggccgtgggctgcacacggaggctggtggtgcagcaggcgggccaggcagaggccggggagtacagctgcgaggcagggggtcagcagctctccttccgcctgcaggtggcagagctggagccccaaatttcagagagaccctgccgcagggagcctctggtggtcaaggagcatgaagacatcatcctgaccgccacactggccacaccctctgcggccacggtgacctggctcaaggatggtgtggagattcgccgcagcaagcggcatgagacagccagccagggggacacccacaccctgaccgtgcatggcgcccaggttctggacagcgccatctacagctgccgtgtgggcgcagaggggcaggacttcccagtgcaggtggaagaggtggccgccaagttctgccggctgctggagcctgtgtgcggcgagctgggtggcacggtgacactggcctgcgagctaagcccagcgtgtgcagaggtggtgtggcgctgcggcaacacgcagcntcgggtgggcaagcgcttccagatggtggccgaggggcccgtgcgctcactcactgtgttggggctgcgcgcagaggacgcaggggagtacgtgtgtgagagccgtgatgaccacaccagtgcgcagctcaccgtcagtgtgccccgagtggtgaagtttatgtctgggctgagcaccgtggtcgcagaggagggcggcgaggccaccttccagtgcgtggtgtcccccagtgatgtggcagtcgtgtggttccgggacggtgccctgcttcagcccagcgagaagtttgccatatcacagagtggcgccagccacagcctgaccatctcagacctggtgctggaggacgcgggccagatcaccgtggaggctgagggcgcctcatcctctgctgccctgagggtccgagagcgcctgtgctgttcaaaaagaagctgganccgcagacggtggaggagcgnagctcggtgaccctggaggtggagctgacgcggccgtggccggagctgaggtggacacggaacgcgacggccnnggcgccgggaaagaacgtggagatccacgccgagggcgcccgccaccgcctggttctcacaacgtaggttttgccgaccgtggcttctttggctgcgagacgccggatgacaagacacaggccaaactcaccgtggagatgcgccaggtacggctcgtacggggcctgcaggcagtggaggcacgggagcagggcacggctaccatggaggtgcagctgtcgcatgcggacgtggatggcagctggactcgtgacggtctgcggttccagcaggggcccacgtgccacctggctgtgcggggccccatgcacaccctcacactctcggggctgcggccagaggatagtggccttatggtcttcaaggccgaaggagtgcacacgtcggcgcggctcgtggtcaccgagcttcccgtgagcttcagccgcccgctgcaggacgtggtgaccactgagaaggagaaggttaccctggagtgcgagctgtcgcgtcctaatgtggatgtgcgctggctgaaggacggtgtggagctgcgggcaggcaagacgatggccatcgcagcccagggcgcctgcaggagcctcaccatttaccggtgcgagttcgcggatcagggagtgtatgtgtgtgatgcccatgatgcccagagctctgcctccgtgaaggtacaaggaaggacatacactctcatctaccggagagtcctggcggaagatgcaggagagatccaatttgtagccgaaaatgcagaatcgcgagcccagctccgagtgaaggagctgccagtgaccctcgtgcgcccgctgcgggacaagattgccatggagaagcaccgcggtgtgctggagtgtcaggtgtcccgggccagcgcccaggtgcggtggttcaagggcagtcaggagctgcagcccgggcccaagtacgagctggtcagtgatggcctctaccgcaagctgatcatcagtgatgtccacgcagaggacgaggacacctacacctgtgacgccggtgatgtcaagaccagtgcacagttcttcgtggaagagcaatccatcaccattgtgcggggtctgcaggacgtgacagtgatggagcccgctcctgcctggtttgagtgtgagacctccatcccctcagtgcggccacctaagtggctcctggggaagacggtgttgcaggctggggggaacgtgggcctggagcaggagggcacggtgcaccggctgatgctgcggcggacctgctccaccatgaccgggcccgtgcacttcaccgttggcaagtcgcgctcctctgcccgcctggtggtctcagacatccccgtagtcctcacacggccgttggagcccaagacagggcgtgagctgcagtcagtggtcctgtcctgcgacttccggccagcccccaaggctgtgcagtggtacaaggatgacacgcccctgtctccctctgagaagtttaagatgagcctggagggtcagatggctgagctgcgcatcctccggctcatgcctgctgatgctggtgtctaccggtgccaggcgggcagtgcccacagcagcactgaggtcactgtggaagcgcgggaggtgacagtgacagggccgctacaggatgcagaggccacggaggagggctgggccagcttctcctgtgagctgtcccacgaggatgaggaggtcgagtggtcgctcaacgggatgcccctgtacaacgacagcttccatgagatctcacacaagggccggcgccacacgctggtactgaagagcatccagcgggctgatgcgggcatagtacgcgcctcctccctgaaggtgtcgacctctgcccgcctggaggtccgagtgaagccggtggtgttcctgaaggcgctggatgacctgtccgcagaggagcgcggcaccctggccctgcagtgtgaagtctctgaccccgaggcccatgtggtgtggcgcaaagatggcgtgcagctgggccccagtgacaagtatgacttcctgcacacggcgggcacgcgggggctcgtggtgcatgacgtgagccctgaagacgccggcctgtacacctgccacgtgggctccgaggagacccgggcccgggtccgcgtgcacgatctgcacgtgggcatcaccaagaggctgaagacaatggaggtgctggaaggggaaagctgcagctttgagtgcgtcctgtcccacgagagtgccagcgacccggccatgtggacagtcggtgggaagacagtgggcagctccagccgcttccaggccacacgtcagggccgaaaatacatcctggtggtccgggaggctgcaccaagtgatgccggggaggtggtcttctctgtgcggggcctcacctccaaggcctcactcattgtcagagagaggccggccgccatcatcaagcccctggaagaccagtgggtggcgccaggggaggacgtggagctgcgctgtgagctgtcacgggcgggaacgcccgtgcactggctgaaggacaggaaggccatccgcaagagccagaagtatgatgtggtctgcgagggcacgatggccatgctggtcatccgcggggcctcgctcaaggacgcgggcgagtacacgtgtgaggtggaggcttccaagagcacagccagcctccatgtggaagaaaaagcaaactgcttcacagaggagctgaccaatctgcaggtggaggagaaaggcacagctgtgttcacgtgcaagacggagcaccccgcggccacagtgacctggcgcaagggcctcttggagctacgggcctcagggaagcaccagcccagccaggagggcctgaccctgcggctcaccatcagtgccctggagaaggcagacagcgacacctatacctgcgacattggccaggcccagtcccgggcccagctcctagtgcaaggccggagagtgcacatcatcgaggacctggaggatgtggatgtgcaggagggctcctcggccaccttccgttgccggatctccccggccaactacgagcctgtgcactggttcctggacaagacacccctgcatgccaacgagctcaatgagatcgatgcccagcccgggggctaccacgtgctgaccctgcggcagctggcgctcaaggactcgggcaccatctactttgaggcgggtgaccagcgggcctcggccgccctgcgggtcactgagaagccaagcgtcttctcccgggagctcacagatgccaccatcacagagggtgaggacttgaccctggtgtgcgagaccagcacctgcgacattcctgtgtgctggaccaaggatgggaagaccctgcgggggtctgcccggtgccagctgagccatgagggccaccgggcccagctgctcatcactggggccaccctgcaggacagtggacgctacaagtgtgaggctgggggcgcctgcagcagctccattgtcagggtgcatgcgcggccagtgcggttccaggaggccctgaaggacctggaggtgctggagggtggtgctgccacactgcgctgtgtgctgtcatctgtggctgcgcccgtgaagtggtgctatggaaacaacgtcctgaggccaggtgacaaatacagcctacgccaggagggtgccatgctggagctggtggtccggaacctccggccgcaggacagcgggcggtactcatgctccttcggggaccagactacttctgccaccctcacagtgactgccctgcctgcccagttcatcgggaaactgagaaacaaggaggccacagaaggggccacggccacgctgcggtgtgagctgagcaaggcagcccctgtggagtggagaaaggggtccgagaccctcagagatggggacagatactgtctgaggcaggacggggccatgtgtgagctgcagatccgtggcctggccatggtggatgccgcggagtactcgtgtgtgtgtggagaggagaggacctcagcctcactcaccatcaggcccatgcctgcccacttcataggaagactgagacaccaagagagcatagaaggggccacagccacgctgcggtgtgagctgagcaaggcggcccccgtggagtggaggaaggggcgtgagagcctcagagatggggacagacatagcctgaggcaggacggggctgtgtgcgagctgcagatctgtggcctggctgtggcagatgctggggagtactcctgtgtgtgtggggaggagaggacctctgccactctcaccgtgaaggccctgccagccaagttcacagagggtctgaggaatgaagaggccgtggaaggggccacagccatgttgtggtgtgaactgagcaaggtggcccctgtggagtggaggaaggggcccgagaacctcagagatggggacagatacatcctgaggcaggaggggaccaggtgtgagctgcagatctgtggcctggccatggcggacgccggggagtacttgtgtgtgtgcgggcaggagaggacctcagccacgctcaccatcagggctctgcctgccaggttcatagaagatgtgaaaaaccaggaggccagagaaggggccacggctgtgctgcagtgtgagctgaacagtgcagcccctgtggagtggagaaaggggtctgagacccttagagatggggacagatacagcctgaggcaggacgggactaaatgtgagctgcagattcgtggcctggccatggcagacactggggagtactcgtgcgtgtgcgggcaggagaggacctcggctatgctcaccgtcagggctctacccatcaagttcacagagggtctgaggaacgaagaggccacagaaggggcaacagccgtgctgcggtgtgagctgagcaagatggcccccgtggagtggtggaaggggcatgagaccctcagagatggagacagacacagcctgaggcaggacggggccaggtgtgagctgcagatccgcggcctcgtggcagaggacgctggggagtacctgtgcatgtgcgggaaggagaggacctcagccatgctcaccgtcagggccatgccttccaagttcatagagggtctgaggaatgaagaggccacagaaggggacacggccacgctgtggtgtgagctgagcaaggcggcaccggtggagtggaggaaggggcatgagaccctcagagatggggacagacacagcctgaggcaggacgggtccaggtgtgagctgcagatccgtggcctggctgtggtggatgccggggagtactcgtgtgtgtgcgggcaggagaggacctcagccacactcactgtcagggccctgcctgccagattcatagaagatgtgaaaaaccaggaggccagagaaggggccacggccgtgctgcaatgtgagctgagcaaggcggcccccgtggagtggaggaaggggtctgagaccctcagaggtggggacagatacagcctgaggcaggatgggaccagatgtgagctgcagattcatggcctgtctgtggcagacactggggagtactcgtgtgtgtgcgggcaggagaggacctcggccacactcaccgtcagggccctgcctgcacgattcactcaagatctgaagaccaaggaggcctcagaaggggccacagctacactgcagtgtgagctgagcaaggtggcccctgtggaatggaagaagggtcctgagaccctcagagatgggggcagatacagcctgaagcaggatgggacgaggtgtgagctgcagatccatgacctgtctgtggcggatgctggggaatactcatgcatgtgtggacaagagaggacctcggccacgctcactgtcaggggtaaagtccatctgtccagatctgcgttctggtgtccagttgttcacttcttgccatcaatctctgctcattgcatggtctcccccagactgccacactcttcacgtcatgccacactatcccttccagcttcct

SEQ ID NO: 381796 - DNA, 2935 bp, Homo sapiens
  misc_feature (1577)..(1577): n is a, c, g, or t
  misc_feature (2018)..(2018): n is a, c, g, or t
  misc_feature (2039)..(2039): n is a, c, g, or t
  misc_feature (2112)..(2113): n is a, c, g, or t
ttctttgattgtttaaccttacaaaaatttagactagtaacttatttcacactgaaaagtgagttccaggaaggttagaggccacagagtataaaaggtaaaaccataaagcctctagatgctaacatagattgctaaaaacttcagggaacggaaagatttcttaaaactaaacagtggaacaatggtatatttaactacattaaaactaaaactttaatttgtcaagacatcatttgagagcgaaaaggccggtcaaggacatgggtaagatgtttacaaatacacagttatcatttgctagcatttaaaatatataaagagttcctaaaaataaggaaggaaaagacagaaaaggctactgaaaattggacagaagcctgaagagcgacaccccagaagagctgacgtaatggccagaagtggtggaaagggctccaccttgcatgtcaccaggcaatgcatgacaaagcccaggccttccccgcagaggccaacgctgaccctcctgacagtggcaggactggaagcctcagtactctggggccctgcagtgaggacacgccctgcccagtcccatggggagaccctagcatatccttgaagggagctgtgtaagcattaggaacccagtccctgcactggaggagctcgtgcacggagggtttgtcacaactgccccgcctggaatagcccatggcactgcacagtggatggagaaactgtgattcttgtgctgggaggtggtggggcttctcccagctacatggccagtgccaagcttgggaaggttctgtttctcctactttctcgtctaggccctcctaccctagggtggtcttcctgacctgggcagtatctttgacctcgtgtgtccctccttgtccatccccagagcccaaggtggtgtttgccaaggagcagccagcacacagggaggtgcaggctgaggcgggggccagtgccacgctgagctgcgaggtggcccaggcccagacagaggtgacgtggtacaaggatgggaagaagctgagttccagctcgaaagtgcgcgtggaggccgtgggctgcacacggaggctggtggtgcagcaggcgggccaggcagaggccggggagtacagctgcgaggcagggggtcagcagctctccttccgcctgcaggtggcagagctggagccccaaatttcagagagaccctgccgcagggagcctctggtggtcaaggagcatgaagacatcatcctgaccgccacactggccacaccctctgcggccacggtgacctggctcaaggatggtgtggagattcgccgcagcaagcggcatgagacagccagccagggggacacccacaccctgaccgtgcatggcgcccaggttctggacagcgccatctacagctgccgtgtgggcgcagaggggcaggacttcccagtgcaggtggaagaggtggccgccaagttctgccggctgctggagcctgtgtgcggcgagctgggtggcacggtgacactggcctgcgagctaagcccagcgtgtgcagaggtggtgtggcgctgcggcaacacgcagcntcgggtgggcaagcgcttccagatggtggccgaggggcccgtgcgctcactcactgtgttggggctgcgcgcagaggacgcaggggagtacgtgtgtgagagccgtgatgaccacaccagtgcgcagctcaccgtcagtgtgccccgagtggtgaagtttatgtctgggctgagcaccgtggtcgcagaggagggcggcgaggccaccttccagtgcgtggtgtcccccagtgatgtggcagtcgtgtggttccgggacggtgccctgcttcagcccagcgagaagtttgccatatcacagagtggcgccagccacagcctgaccatctcagacctggtgctggaggacgcgggccagatcaccgtggaggctgagggcgcctcatcctctgctgccctgagggtccgagagcgcctgtgctgttcaaaaagaagctgganccgcagacggtggaggagcgnagctcggtgaccctggaggtggagctgacgcggccgtggccggagctgaggtggacacggaacgcgacggccnnggcgccgggaaagaacgtggagatccacgccgagggcgcccgccaccgcctggttctcacaacgtaggttttgccgaccgtggcttctttggctgcgagacgccggatgacaagacacaggccaaactcaccgtggagatgcgccaggtacggctcgtacggggcctgcaggcagtggaggcacgggagcagggcacggctaccatggaggtgcagctgtcgcatgcggacgtggatggcagctggactcgtgacggtctgcggttccagcaggggcccacgtgccacctggctgtgcggggccccatgcacaccctcacactctcggggctgcggccagaggatagtggccttatggtcttcaaggccgaaggagtgcacacgtcggcgcggctcgtggtcaccgagcttcccgtgagcttcagccgcccgctgcaggacgtggtgaccactgagaaggagaaggttaccctggagtgcgagctgtcgcgtcctaatgtggatgtgcgctggctgaaggacggtgtggagctgcgggcaggcaagacgatggccatcgcagcccagggcgcctgcaggagcctcaccatttaccggtgcgagttcgcggatcagggagtgtatgtgtgtgatgcccatgatgcccagagctctgcctccgtgaaggtacaaggccgcaacatccagatcgtgaggcccctggaggatgtggaagtgatggagaaggacggtgccaccttctcctgtgaggtctcccacgacgaagtgcctggccagtggttctgggagggcagtacactgcggcccactgacaacgtgcgc

SEQ ID NO: 381797 - DNA, 360 bp, Homo sapiens
atgtgagaaatcacgaggccacagaaggggccacagctgtgctgcagtgtgagctgagcaaggcggcccccgtggagtggcggaaggggtctgagaccctcagagatggggacagatatagcctgaggcaggacgggacgaggtgtgagctgcagattcgtggcctggctgtggaggacactggagagtatttgtgtgtgtgcgggcaggagagaacctcagctacactcactgtcaggggtaaagatcctgtgtggtcacatggacttgtggcttggaatctaagtgtctctgtgtcaccaccttctacttccaaatgtggcacccctgtgggaaccctgaggttgtgtgtcctctaac

SEQ ID NO: 381798 - DNA, 403 bp, Homo sapiens
caggccttctctccccagtgctgccttcctgaccttgatggtggtggtcaccctatgcatccctgccttccccagagcccaaggcggtgtttgccaaggagcagccagcgagcagggaggtgcaggctgaggcggggaccagtgccacgctgagctgcgaggtggcccaggcccagacagaggtgacgtggtacaaggacgggaagaaactgagctccagctcgaaagtgcgaatggaggccgtgggctgcacacggaggctggtggtgcaggaggcaggccaggcggacgccggggagtacagctgcaaggccggggatcagcggctgtccttccacctgcacgtggcaggtcagtgctttggaggtcctgaggagcctcttcagaggtgatggtgcttctg

SEQ ID NO: 381799 - DNA, 2270 bp, Homo sapiens
gccatgttctgtccgaaaaatcctccagacagtctgatgatatcagtgactgtttggtccttctcagccctgcctgccagattcatagaggatatgagaaaccagaaggccacagaaggggctacagtcacattgcaatgtaagctgagaaaggcggcccccgtggagtggagaaaggggcccaacaccctcaaagatggggacaggtacagcctgaagcaggatgggaccagttgtgagctgcagattcgtggcctggtcatagcagatgctggagaatactcgtgcatatgtgagcaggagaggacctcggccacgctcactgtcaggggtaaagaccacatgtgaccacctgagtgacttctgtcttcccccacttaacccacatgttctgtgctctcccagtgtctctcagtgtcgttgacattttattcagtcactcatctttgtggtccatctcacaaatgcatgctgaggacccacttggatggcctaatctagggcctgggcatacagaccccaagggtgaatagtgcagggtccccaggtgtcaggacagggagagcagcaggcaggtgtcagggtccaggagagctgtctggggcccctgccatcttgcaaaggcctgtggatgtccaccagctcttgagcctcaggcatggaggtcaggaaatgtatgtcctttgacagacatagcgatggctcaggccaggcccctcttcaggctggtgagtgttctgattgatccttgtggtcattccaagcttctaaaggagtattgtcttcatctgctcaggctaacgtaacaaagcactgcagacagggtggctcaaataacacagatttattttctcagaagtatggggctgaaatctcaagatcaagatgtcagctcctctcttcttgtagacagctgtcttctccccatgtcttcacatggatgtccctctgtgtgcatgtgtgtgtcctaacctctttttataagagcaccagtcatactggatttggaaccaccctaacaacctcatttttcctttcaatgattgtctttaaatacagtgatattctgacgtgtactgggggttaggacttcaacatatgcattttttctgaggcacaattcagaccataacactccaccatctggattctcaaaattcatggccttctcacgtgcaaaatatgtttacttcttcctaacagtcccaaatcttagcccatttcaatatcaactagtccaaatcacctctaaatatcatctgagtcaactgtgagggagataaagtgtgacttatacagaggcaaaatttttcttcatctgtgaggctgtgaaatcagacaagttatttgttttgaagtcacaatggtgggacaggcataggatggacattctgaatcagggagaaactggaaaggaggaatgagtcacgggtcccaagtaaggtgtaaccctagcaggacaaatattattaggttttaaggctttggattaatacctagtcctctcgacccaacagggttgcaactctaccccctcagccctgagtggaggtgtctggctctctgtaactgaggaggagacagccttacttccaggcctgtgccctctaccctctggttataatgccattcctgtcaactcctgaactaacttttgggtcattattcctttttcttacagaatatcttgtttatatccatgtagctctattggcccatcctgtggattctcagaagtctgacatccttccttcattttgtcccatctctgttcgaatcagttcaagctagcagcatttcctctggtataaaggtctcaaaaactttgtcccatgtgatccatgtgggtcaaagccaccagacaaaagaattctccacagatctttccttgataatcttatttttattactggcttctgctgagagggctgaatggatccataaaccacacacctgatctgtttagcaaatggttgtccagtgtggatattctccccagaataatgctttctcatttttttttgcagtatgtatagcctgaaaatttttctgtatcttcaagctctggttcctttttgcttaacaaatcctttttgaatttatctctctcctctcacattttcatattagagagaaatcaggctatggtttcaattctttggttagaaacttcctcaggtaaatatatccaattttgttgtttgcaagtcctatcttccacaaaacactagaataaaatttgaccaggtttttggctactttataacagt

SEQ ID NO: 381800 - DNA, 9401 bp, Homo sapiens
  misc_feature (967)..(967): n is a, c, g, or t
  misc_feature (1987)..(1987): n is a, c, g, or t
  misc_feature (2428)..(2428): n is a, c, g, or t
  misc_feature (2449)..(2449): n is a, c, g, or t
  misc_feature (2522)..(2523): n is a, c, g, or t
  misc_feature (9319)..(9319): n is a, c, g, or t
  misc_feature (9330)..(9330): n is a, c, g, or t
  misc_feature (9337)..(9337): n is a, c, g, or t
  misc_feature (9339)..(9339): n is a, c, g, or t
  misc_feature (9345)..(9345): n is a, c, g, or t
  misc_feature (9353)..(9353): n is a, c, g, or t
  misc_feature (9355)..(9355): n is a, c, g, or t
  misc_feature (9360)..(9360): n is a, c, g, or t
  misc_feature (9366)..(9366): n is a, c, g, or t
  misc_feature (9371)..(9371): n is a, c, g, or t
  misc_feature (9382)..(9383): n is a, c, g, or t
  misc_feature (9385)..(9386): n is a, c, g, or t
  misc_feature (9388)..(9388): n is a, c, g, or t
  misc_feature (9392)..(9392): n is a, c, g, or t
  misc_feature (9399)..(9399): n is a, c, g, or t
tatactcctatggcagtggtcttgggttggaggtgacgtggtacaaggacgggaagaagctgagctccagctcaaaagtacgcatggaggtcaagggctgcacacgaaggctggtagtgcagcaggtgggcaaagcagatgctggggagtacagctgcgaggctgggggccagagagtctcctttcaactgcacatcacagagcccaaggcagtgtttgccaaggagcagttggtgcataatgaggtgcggactgaggcaggggccagtgccacactgagctgtgaggtggcccaggcccagacagaggtgacgtggtacaaggatgggaagaagctgagctccagttcgaaagtgcgcatagaggctgcgggctgcatgcggcagctggtggtgcagcaggcaggccaggcagatgctggggagtacacctgtgaggctgggggccagcggctctccttccacctggatgtttcagagcccaaggcggtgtttgcaaaggagcagctggcacacaggaaggtgcaggccgaggcgggggccattgccacgctgagctgcgaggtggcccaggcccagacagaggtgacgtggtacaaggacgggaagaagctgagctccagctcgaaagttcgaatggaggctgtgggctgcacacggaggctggtggtgcagcaggcatgccaggcggacaccggggagtatagctgcgaggccgggggccagcggctctccttcagcctggacgtggcagagcccaaggtggtgtttgccaaggagcagccagtgcacagggaggtgcaggcccaggcgggggccagcaccacactcagctgcgaggtggctcaggcccagacggaggtgatgtggtacaaggacgggaagaagctgagcttcagctcgaaagtgcgcatggaggctgtgggctgcacacggaggctggtggtgcagcaggcgggccaggcggncgccggggagtacagctgcgaggcggggagccagcggctctccttccacctgcacgtggcagagcccaaggcggtgtttgccaaggagcagccagcgagcagggaggtgcaggctgaggcggggaccagtgccacgctgagctgcgaggtggcccaggcccagacagaggtgacgtggtacaaggacgggaagaaactgagctccagctcgaaagtgcgaatggaggccgtgggctgcacacggaggctggtggtgcaggaggcaggccaggcggacgccggggagtacagctgcaaggccggggatcagcggctgtccttccacctgcacgtggcagagcccaaggtggtgtttgccaaggagcagccagcacacagggaggtgcaggctgaggcgggggccagtgccacgctgagctgcgaggtggcccaggcccagacagaggtgacgtggtacaaggatgggaagaagctgagttccagctcgaaagtgcgcgtggaggccgtgggctgcacacggaggctggtggtgcagcaggcgggccaggcagaggccggggagtacagctgcgaggcagggggtcagcagctctccttccgcctgcaggtggcagagctggagccccaaatttcagagagaccctgccgcagggagcctctggtggtcaaggagcatgaagacatcatcctgaccgccacactggccacaccctctgcggccacggtgacctggctcaaggatggtgtggagattcgccgcagcaagcggcatgagacagccagccagggggacacccacaccctgaccgtgcatggcgcccaggttctggacagcgccatctacagctgccgtgtgggcgcagaggggcaggacttcccagtgcaggtggaagaggtggccgccaagttctgccggctgctggagcctgtgtgcggcgagctgggtggcacggtgacactggcctgcgagctaagcccagcgtgtgcagaggtggtgtggcgctgcggcaacacgcagcntcgggtgggcaagcgcttccagatggtggccgaggggcccgtgcgctcactcactgtgttggggctgcgcgcagaggacgcaggggagtacgtgtgtgagagccgtgatgaccacaccagtgcgcagctcaccgtcagtgtgccccgagtggtgaagtttatgtctgggctgagcaccgtggtcgcagaggagggcggcgaggccaccttccagtgcgtggtgtcccccagtgatgtggcagtcgtgtggttccgggacggtgccctgcttcagcccagcgagaagtttgccatatcacagagtggcgccagccacagcctgaccatctcagacctggtgctggaggacgcgggccagatcaccgtggaggctgagggcgcctcatcctctgctgccctgagggtccgagagcgcctgtgctgttcaaaaagaagctgganccgcagacggtggaggagcgnagctcggtgaccctggaggtggagctgacgcggccgtggccggagctgaggtggacacggaacgcgacggccnnggcgccgggaaagaacgtggagatccacgccgagggcgcccgccaccgcctggttctcacaacgtaggttttgccgaccgtggcttctttggctgcgagacgccggatgacaagacacaggccaaactcaccgtggagatgcgccaggtacggctcgtacggggcctgcaggcagtggaggcacgggagcagggcacggctaccatggaggtgcagctgtcgcatgcggacgtggatggcagctggactcgtgacggtctgcggttccagcaggggcccacgtgccacctggctgtgcggggccccatgcacaccctcacactctcggggctgcggccagaggatagtggccttatggtcttcaaggccgaaggagtgcacacgtcggcgcggctcgtggtcaccgagcttcccgtgagcttcagccgcccgctgcaggacgtggtgaccactgagaaggagaaggttaccctggagtgcgagctgtcgcgtcctaatgtggatgtgcgctggctgaaggacggtgtggagctgcgggcaggcaagacgatggccatcgcagcccagggcgcctgcaggagcctcaccatttaccggtgcgagttcgcggatcagggagtgtatgtgtgtgatgcccatgatgcccagagctctgcctccgtgaaggtacaaggaaggacatacactctcatctaccggagagtcctggcggaagatgcaggagagatccaatttgtagccgaaaatgcagaatcgcgagcccagctccgagtgaaggagctgccagtgaccctcgtgcgcccgctgcgggacaagattgccatggagaagcaccgcggtgtgctggagtgtcaggtgtcccgggccagcgcccaggtgcggtggttcaagggcagtcaggagctgcagcccgggcccaagtacgagctggtcagtgatggcctctaccgcaagctgatcatcagtgatgtccacgcagaggacgaggacacctacacctgtgacgccggtgatgtcaagaccagtgcacagttcttcgtggaagagcaatccatcaccattgtgcggggtctgcaggacgtgacagtgatggagcccgctcctgcctggtttgagtgtgagacctccatcccctcagtgcggccacctaagtggctcctggggaagacggtgttgcaggctggggggaacgtgggcctggagcaggagggcacggtgcaccggctgatgctgcggcggacctgctccaccatgaccgggcccgtgcacttcaccgttggcaagtcgcgctcctctgcccgcctggtggtctcagacatccccgtagtcctcacacggccgttggagcccaagacagggcgtgagctgcagtcagtggtcctgtcctgcgacttccggccagcccccaaggctgtgcagtggtacaaggatgacacgcccctgtctccctctgagaagtttaagatgagcctggagggtcagatggctgagctgcgcatcctccggctcatgcctgctgatgctggtgtctaccggtgccaggcgggcagtgcccacagcagcactgaggtcactgtggaagcgcgggaggtgacagtgacagggccgctacaggatgcagaggccacggaggagggctgggccagcttctcctgtgagctgtcccacgaggatgaggaggtcgagtggtcgctcaacgggatgcccctgtacaacgacagcttccatgagatctcacacaagggccggcgccacacgctggtactgaagagcatccagcgggctgatgcgggcatagtacgcgcctcctccctgaaggtgtcgacctctgcccgcctggaggtccgagtgaagccggtggtgttcctgaaggcgctggatgacctgtccgcagaggagcgcggcaccctggccctgcagtgtgaagtctctgaccccgaggcccatgtggtgtggcgcaaagatggcgtgcagctgggccccagtgacaagtatgacttcctgcacacggcgggcacgcgggggctcgtggtgcatgacgtgagccctgaagacgccggcctgtacacctgccacgtgggctccgaggagacccgggcccgggtccgcgtgcacgatctgcacgtgggcatcaccaagaggctgaagacaatggaggtgctggaaggggaaagctgcagctttgagtgcgtcctgtcccacgagagtgccagcgacccggccatgtggacagtcggtgggaagacagtgggcagctccagccgcttccaggccacacgtcagggccgaaaatacatcctggtggtccgggaggctgcaccaagtgatgccggggaggtggtcttctctgtgcggggcctcacctccaaggcctcactcattgtcagagagaggccggccgccatcatcaagcccctggaagaccagtgggtggcgccaggggaggacgtggagctgcgctgtgagctgtcacgggcgggaacgcccgtgcactggctgaaggacaggaaggccatccgcaagagccagaagtatgatgtggtctgcgagggcacgatggccatgctggtcatccgcggggcctcgctcaaggacgcgggcgagtacacgtgtgaggtggaggcttccaagagcacagccagcctccatgtggaagaaaaagcaaactgcttcacagaggagctgaccaatctgcaggtggaggagaaaggcacagctgtgttcacgtgcaagacggagcaccccgcggccacagtgacctggcgcaagggcctcttggagctacgggcctcagggaagcaccagcccagccaggagggcctgaccctgcggctcaccatcagtgccctggagaaggcagacagcgacacctatacctgcgacattggccaggcccagtcccgggcccagctcctagtgcaaggccggagagtgcacatcatcgaggacctggaggatgtggatgtgcaggagggctcctcggccaccttccgttgccggatctccccggccaactacgagcctgtgcactggttcctggacaagacacccctgcatgccaacgagctcaatgagatcgatgcccagcccgggggctaccacgtgctgaccctgcggcagctggcgctcaaggactcgggcaccatctactttgaggcgggtgaccagcgggcctcggccgccctgcgggtcactgagaagccaagcgtcttctcccgggagctcacagatgccaccatcacagagggtgaggacttgaccctggtgtgcgagaccagcacctgcgacattcctgtgtgctggaccaaggatgggaagaccctgcgggggtctgcccggtgccagctgagccatgagggccaccgggcccagctgctcatcactggggccaccctgcaggacagtggacgctacaagtgtgaggctgggggcgcctgcagcagctccattgtcagggtgcatgcgcggccagtgcggttccaggaggccctgaaggacctggaggtgctggagggtggtgctgccacactgcgctgtgtgctgtcatctgtggctgcgcccgtgaagtggtgctatggaaacaacgtcctgaggccaggtgacaaatacagcctacgccaggagggtgccatgctggagctggtggtccggaacctccggccgcaggacagcgggcggtactcatgctccttcggggaccagactacttctgccaccctcacagtgactgccctgcctgcccagttcatcgggaaactgagaaacaaggaggccacagaaggggccacggccacgctgcggtgtgagctgagcaaggcagcccctgtggagtggagaaaggggtccgagaccctcagagatggggacagatactgtctgaggcaggacggggccatgtgtgagctgcagatccgtggcctggccatggtggatgccgcggagtactcgtgtgtgtgtggagaggagaggacctcagcctcactcaccatcaggcccatgcctgcccacttcataggaagactgagacaccaagagagcatagaaggggccacagccacgctgcggtgtgagctgagcaaggcggcccccgtggagtggaggaaggggcgtgagagcctcagagatggggacagacatagcctgaggcaggacggggctgtgtgcgagctgcagatctgtggcctggctgtggcagatgctggggagtactcctgtgtgtgtggggaggagaggacctctgccactctcaccgtgaaggccctgccagccaagttcacagagggtctgaggaatgaagaggccgtggaaggggccacagccatgttgtggtgtgaactgagcaaggtggcccctgtggagtggaggaaggggcccgagaacctcagagatggggacagatacatcctgaggcaggaggggaccaggtgtgagctgcagatctgtggcctggccatggcggacgccggggagtacttgtgtgtgtgcgggcaggagaggacctcagccacgctcaccatcagggctctgcctgccaggttcatagaagatgtgaaaaaccaggaggccagagaaggggccacggctgtgctgcagtgtgagctgaacagtgcagcccctgtggagtggagaaaggggtctgagacccttagagatggggacagatacagcctgaggcaggacgggactaaatgtgagctgcagattcgtggcctggccatggcagacactggggagtactcgtgcgtgtgcgggcaggagaggacctcggctatgctcaccgtcagggctctacccatcaagttcacagagggtctgaggaacgaagaggccacagaaggggcaacagccgtgctgcggtgtgagctgagcaagatggcccccgtggagtggtggaaggggcatgagaccctcagagatggagacagacacagcctgaggcaggacggggccaggtgtgagctgcagatccgcggcctcgtggcagaggacgctggggagtacctgtgcatgtgcgggaaggagaggacctcagccatgctcaccgtcagggccatgccttccaagttcatagagggtctgaggaatgaagaggccacagaaggggacacggccacgctgtggtgtgagctgagcaaggcggcaccggtggagtggaggaaggggcatgagaccctcagagatggggacagacacagcctgaggcaggacgggtccaggtgtgagctgcagatccgtggcctggctgtggtggatgccggggagtactcgtgtgtgtgcgggcaggagaggacctcagccacactcactgtcagggccctgcctgccagattcatagaagatgtgaaaaaccaggaggccagagaaggggccacggccgtgctgcaatgtgagctgagcaaggcggcccccgtggagtggaggaaggggtctgagaccctcagaggtggggacagatacagcctgaggcaggatgggaccagatgtgagctgcagattcatggcctgtctgtggcagacactggggagtactcgtgtgtgtgcgggcaggagaggacctcggccacactcaccgtcagggccctgcctgcacgattcactcaagatctgaagaccaaggaggcctcagaaggggccacagctacactgcagtgtgagctgagcaaggtggcccctgtggaatggaagaagggtcctgagaccctcagagatgggggcagatacagcctgaagcaggatgggacgaggtgtgagctgcagatccatgacctgtctgtggcggatgctggggaatactcatgcatgtgtggacaagagaggacctcggccacgctcactgtcagggccctgcctgccaggttcacagagggtctgaggaatgaagaggccatggaaggggccacagccacactgcaatgtgagctgagcaaggcagcccctgtggagtggaggaaaggccttgaggctctcagagatggggacaaatacagcctgagacaagacggggctgtgtgtgagctgcagattcatggcctggctatggcagataacggggtgtactcatgtgtgtgtgggcaggagaggacctcagctacactcactgtcagggccctgcctgccagattcatagaggatatgagaaaccagaaggccacagaaggggctacagtcacattgcaatgtaagctgagaaaggcggcccccgtggagtggagaaaggggcccaacaccctcaaagatggggacaggtacagcctgaagcaggatgggaccagttgtgagctgcagattcgtggcctggtcatagcagatgctggagaatactcgtgcatatgtgagcaggagaggacctcggccacgctcactgtcagggccctgccggccagattcatagaagatgtgagaaatcacgaggccacagaaggggccacagctgtgctgcagtgtgagctgagcaaggcggcccccgtggagtggcggaaggggtctgagaccctcagagatggggacagatatagcctgaggcaggacgggacgaggtgtgagctgcagattcgtggcctggctgtggaggacactggagagtatttgtgtgtgtgcgggcaggagagaacctcagctacactcactgtcagggccctgccagccagattcatagacaacatgacaaaccaggaagccagagaaggggccacggccacactgcactgtgaactgagcaaggtggcccctgtggagtggaggaagggacctgaaaccctccgagatggggacagacacagcctgaggcaggagaatngcttgaacccnggaggcngnggttgnagtgagcnangatcntgccantgcantccagcctggnnannanagcnagctctntc

SEQ ID NO: 381801 - DNA, 1859 bp, Homo sapiens
accttgtgctttgtttctttagttctgtggcagggggtgggggactctgtaggttgggctcacatgcatgtgtaagagttctttgtgcactctcactgctggcttgctggtacaataacctgagctctcacgctgccctggcaatcctgggcgctgtgcccatcttttctcgggccctctcctccctcccccagagaagagaccatcaccactgtggtgaagagcccacgtggccaacgacggtcccccagcaagtccccctcccgctcaccttcccgctgctctgccagcccgctgaggccaggcctactggcccccgacctgctgtacctgccaggtgctggccagccccgcaggccggaggcagaaccaggccagaagcccgtggtgcccacactgtatgtgacggaggccgaggcccactctccagctctgcccggactctcggggccccagcccaagtgggtggaggtggaggagaccattgaagtccgggtgaagaagatgggcccgcagggtgtgtctcccaccacagaggtgcccaggagctcatcggggcatctcttcacactgcccggtgcgacccccggaggggaccccaattccaacaactccaacaacaagctgctggcccaggaggcctgggcccagggcacagccatggtcggcgtcagagagccccttgtcttccgcgtggatgccagaggcagtgtggactgggctgcttctggcatgggcagcctggaggaggagggcaccatggaggaggcgggagaggaagagggggaagacggagacgcctttgtgacggaggagtcccaggacacacacagccttggggatcgtgaccccaagatcctcacgcacaacggccgcatgctgacactggctgacctggaagattacgtgcctggggaaggggagaccttccactgtggtggccctgggcctggcgcccctgatgaccctccctgcgaggtctcggtgatccagagagagatcggggagcccacggtggggcagcctgtgctgctcagcgtggggcatgcactgggtccccgaggccctctcggcctctttaggcctgagccccgtggggcgtcaccaccgggaccccaggtccgtagccttgagggcacctccttcctcttgcgggaggccccggctcggcctgtgggcagtgctccctggacgcagtctttctgcacccgcatccggcgttctgcggacagtggccagagcagcttcaccacagagctttccacccagaccgtcaacttcgggacagtgggggagacggtcacccttcacatctgcccagacagggatggggatgaggcggcacagccctgatgctgctgccatggtggcttggggcagcggggagaaaggagtgtccttgaggcctaggacgctgcccggcctcagcagcagccctgggagcctcctgagggccctccctgtccctggccacgggcccttcttacctcactcaacttcagccaggaggactgggtggtgcttgcaatgttggaatgaccggctcaaagacctcagctctgggctgtttcctgtcagcctggcaggagcctcaggactgtggacgaaggatgtggccttgggcatttgtcctgttcccacatgggcctggtccctccctcctggccccagccacagctgccaggcctgacatggccttgcctctcctgcagtcttggtgactgagacccttgggtggcgcttcccagctctgcaggccctcctggccttttctgcagggtggacacagggtctgtgtgtgggcagcagcccctgtctctcagcaagaataaagcagcttcctgtgcaaaaaactgatt

SEQ ID NO: 381802 - DNA, 459 bp, Homo sapiens
gttcccggggactgtccacctgggtaagtgggacctccctgttacaacctacggggctgctcacctgccccggaatcccccaggtccagcttcaggggaggccagagtggcctcatggggaccttctgtggggaggggggctgccaaggccttgccctggtgcagtgtccgtggtggaaggataggtgaccccactacagggcccctgggagcctgcctgtctccagcagacccaggggacggggctccagggctgccccactctggtggggcttgtaggatgctggaggggtctcagggcagctgtaccttgtccttgttccttcatgagcctgactcatgctatggtcgctctgtgtgttggctgggcttcctggaggaggaacatttaggtctaggctctgtaggaagagaaggggaaggcagagacctcctcagcactccccactcctcctcggc

SEQ ID NO: 381803 - DNA, 335 bp, Homo sapiens
ttgaatgttatcttaaaaatggtggttcatgatccaggcgcagtggctcatgcctgtaatcccagcaccttgggaggccgaggcaggaagatcacttgagcccaggagctcaaggctgcaagtgagttatgattgtgccactgcactcctgcctgagtgccaggacaaggcctcatctctaaataaaaataaacaaaagataaaaatatggttcaatcaactccacatagtttcctggcaatattggtgaatttgagattttcttagttaaatgacctcttttcattttactaagttgtccatgtatcattgctttagaatgtcaagtccagaag

SEQ ID NO: 381804 - DNA, 447 bp, Homo sapiens
tgctgggattgcaggcgtgagccactgcgcccggcctaattttattttttgtacagatgaggtctcactttgctgcctaggctggcctcgaacttctagccacaagtgatcctcccgtttcagcttcccaaagtgtggggattataggtgtgagccacctcacctggtccaaccattttatttataataatttttccttcattcttagctgtgtgagcgtctgcaggcaaatacctcagcacaaggatactcagtgaagcattgcttttaagggaaaatgcacagaaacaatctaggtatttattgattggtgattcatacaatggaatactatacagcaaattaaaggaacgaggtagatttatatacgtggaaagataggcaagatattgttaagtgagaaaagcaagatgccaaacagcatgtacagtatgagttaaaaaaaaa

SEQ ID NO: 381805 - DNA, 2954 bp, Homo sapiens
ggcagtgggcggcgtagagcactgcagcagcaatgacggagggcacgtgtctgcggcgccgagggggcccctacaagaccgagcccgccaccgacctcggccgctggcgactcaactgcgagaggggccggcagacgtggacctacctgcaggacgagcgcgccggccgcgagcagaccggcctggaagcctacgccctggggctggacaccaagaattactttaaggacttgcccaaagcccacaccgcctttgagggggctctgaacgggatgacattttacgtggggctgcaggctgaggatgggcactggacgggtgattatggtggcccacttttcctcctgccaggcctcctgatcacttgccacgtggcacgcatccctctgccagccggatacagagaagagattgtgcggtacctgcggtcagtgcagctccctgacggtggctggggcctgcacattgaggataagtccaccgtgtttgggactgcgctcaactatgtgtctctcagaattctgggtgttgggcctgacgatcctgacctggtacgagcccggaacattcttcacaagaaaggtggtgctgtggccatcccctcctgggggaagttctggctggctgtcctgaatgtttacagctgggaaggcctcaataccctgttcccagagatgtggctgtttcctgactgggcaccggcacacccctccacactctggtgccactgccggcaggtgtacctgcccatgagctactgctacgccgttcggctgagtgccgcggaagacccgctggtccagagcctccgccaggagctctatgtggaggacttcgccagcattgactggctggcgcagaggaacaacgtggcccccgacgagctgtacacgccgcacagctggctgctccgcgtggtatatgcgctcctcaacctgtatgagcaccaccacagtgcccacctgcggcagcgggccgtgcagaagctgtatgaacacattgtggccgacgaccgattcaccaagagcatcagcatcggcccgatctcgaaaaccatcaacatgcttgtgcgctggtatgtggacgggcccgcctccactgccttccaggagcatgtctccagaatcccggactatctctggatgggccttgacggcatgaaaatgcagggcaccaacggctcacagatctgggacaccgcattcgccatccaggctctgcttgaggcgggcgggcaccacaggcccgagttttcgtcctgcctgcagaaggctcatgagttcctgaggctctcacaggtcccagataaccctcccgactaccagaagtactaccgccagatgcgcaagggtggcttctccttcagtacgctggactgcggctggatcgtttctgactgcacggctgaggccttgaaggctgtgctgctcctgcaggagaagtgtccccatgtcaccgagcacatccccagagaacggctctgcgatgctgtggctgtgctgctgaacatgagaaatccagatggagggttcgccacctatgagaccaagcgtggggggcacttgctggagctgctgaacccctcggaggtcttcggggacatcatgattgactacacctatgtggagtgcacctcagccgtgatgcaggcgcttaagtatttccacaagcgtttcccggagcacagggcagcggagatccgggagaccctcacgcagggcttagagttctgtcggcggcagcagagggccgatggctcctgggaaggctcctggggagtttgcttcacctacggcacctggtttggcctggaggccttcgcctgtatggggcagacctaccgagatgggactgcctgtgcagaggtctcccgggcctgtgacttcctgctgtcccggcagatggcagacggaggctggggggaggactttgagtcctgcgaggagcggcgttatgtgcagagtgcccagtcccagatccataacacatgctgggccatgatggggctgatggccgttcggcatcctgacatcgaggcccaggagagaggagtccggtgtctacttgagaaacagctccccaatggcgactggccgcaggaaaacattgctggggtcttcaacaagtcctgtgccatctcctacacgagctacaggaacatcttccccatctgggccctcggccgcttctcccagctgtaccctgagagagcccttgctggccacccctgagaacatgcctacctgctgggtgccgtctgtgcgttccatggccttcaagtcacaggacgcagcgattccctgccctcttcggtgttattacacaggcaggacttcagtgtcagtatccctgccttcagtcttctttagaaatcacatctgtgttcaatccattgtttagagggagtgtatttttcctgttccacgaagaggactttttgttcacaattggatcacaatgcagaggagtctgttcctcccccgtcggcttctcggtgctgggagggtgacctgtcccagatgactcatcaccctgacatgctcttgacaaaggacaccaccaagaggagatggcagctgtaccggtgcagcctctgtctgagggggatatttgcctcagtgtgattaaaaatcagtcatgaaagatttttgaattcagattatttttatcaggaacagattttgaacatcctgaaatcttttccctggcatcatattaggttttctttgttcactatgatgtaaagtttcagactcttgatatttttaatatcaacatagacggtaggacaaggaacggtaccagaaatgagtaaagagacaataatgataagatcgatttatcaagacataacaaccccaaatgtatatgcactaaataacagcttcaaaatacatgaagcaaaatggcagaattgaagagaatgagataaaaacagaattttaacgggtgct

SEQ ID NO: 381806 - DNA, 556 bp, Homo sapiens
ggtgtgcagtcaatgacaggatctgagggtgtccagacgcagattgcctgcccagagtccttcaggggcacccctctgccttggtgtgcggtccagggctctcacccaggtgccgcaccctctggggtcttctgtccagctcccttgccccatgtgctgtcactgactctccttgggactcgcctgcctgctcagagccctgcagggcttggtcagctgcctgttcagtgtcaacacttccctgcacatcttaaaactgggctttattttcgctgaaggaactgtgttgggacccttgacatctgtcaggtttgcacatgctgtttttttttctcagcccacgtgttctcccccacgtggggtagcagcaggacagacagtgaatcacagagtctgccctgagcagaggctgctgtccctgggactcctagccatggtcagactgtacaaaacggttttccagaaatgaaatgtaaatccatttttatactgaaaatgttactgaaagtcacttttatgagcatctgccttaataaacagacattgattcccttat

SEQ ID NO: 381807 - DNA, 933 bp, Homo sapiens
gggctgtcatacgtcacctgcctgtggggcgagtgggaggcccagcctggtttagggaacaagagtgacgtgaggagtagcagggtgcgtctccagttacctgagggaaaacagatattttaagagataatagcatagcctattttaatatgttttaaaggccataagcatatccaggaagataaataaacgtgatacaatgtccacataggaggaactttctttcactgcattgttttccttcacagtggccttcaagtcacaggacgcagcgattccctgccctcttcggtgttattacacaggcaggacttcagtgtcagtatccctgccttcagtcttctttagaaatcacatctgtgttcaatccattgtttagagggagtgtatttttcctgttccacgaagaggactttttgttcacaattggatcacaatgcagaggagtctgttcctcccccgtcggcttctcggtgctgggagggtgacctgtcccagatgactcatcaccctgacatgctcttgacaaaggacaccaccaagaggagatggcagctgtaccggtgcagcctctgtctgagggggatatttgcctcagtgtgattaaaaatcagtcatgaaagatttttgaattcagattatttttatcaggaacagattttgaacatcctgaaatcttttccctggcatcatattaggttttctttgttcactatgatgtaaagtttcagactcttgatatttttaatatcaacatagacggtaggacaaggaacggtaccagaaatgagtaaagagacaataatgataagatcgatttatcaagacataacaaccccaaatgtatatgcactaaataacagcttcaaaatacatgaagcaaaatggcagaattgaagagaatgagataaaaacagaattttaacgggtgct

SEQ ID NO: 381808 - DNA, 4692 bp, Homo sapiens
cccttgcctactgctcatgggtgtggagactgatattctggaagactgataggcagatttactattaacaaacacatagtctgtggcccagcaaagccaccccaatccctgcacaagggtaaaaggccagcattagagcactgcagcagcaatgacggagggcacgtgtctgcggcgccgagggggcccctacaagaccgagcccgccaccgacctcggccgctggcgactcaactgcgagaggggccggcagacgtggacctacctgcaggacgagcgcgccggccgcgagcagaccggcctggaagcctacgccctggggctggacaccaagaattactttaaggacttgcccaaagcccacaccgcctttgagggggctctgaacgggatgacattttacgtggggctgcaggctgaggatgggcactggacgggtgattatggtggcccacttttcctcctgccaggcctcctgatcacttgccacgtggcacgcatccctctgccagccggatacagagaagagattgtgcggtacctgcggtcagtgcagctccctgacggtggctggggcctgcacattgaggataagtccaccgtgtttgggactgcgctcaactatgtgtctctcagaattctgggtgttgggcctgacgatcctgacctggtacgagcccggaacattcttcacaagaaaggtggtgctgtggccatcccctcctgggggaagttctggctggctgtcctgaatgtttacagctgggaaggcctcaataccctgttcccagagatgtggctgtttcctgactgggcaccggcacacccctccacactctggtgccactgccggcaggtgtacctgcccatgagctactgctacgccgttcggctgagtgccgcggaagacccgctggtccagagcctccgccaggagctctatgtggaggacttcgccagcattgactggctggcgcagaggaacaacgtggcccccgacgagctgtacacgccgcacagctggctgctccgcgtggtatatgcgctcctcaacctgtatgagcaccaccacagtgcccacctgcggcagcgggccgtgcagaagctgtatgaacacattgtggccgacgaccgattcaccaagagcatcagcatcggcccgatctcgaaaaccatcaacatgcttgtgcgctggtatgtggacgggcccgcctccactgccttccaggagcatgtctccagaatcccggactatctctggatgggccttgacggcatgaaaatgcagggcaccaacggctcacagatctgggacaccgcattcgccatccaggctctgcttgaggcgggcgggcaccacaggcccgagttttcgtcctgcctgcagaaggctcatgagttcctgaggctctcacaggtcccagataaccctcccgactaccagaagtactaccgccagatgcgcaagggtggcttctccttcagtacgctggactgcggctggatcgtttctgactgcacggctgaggccttgaaggctgtgctgctcctgcaggagaagtgtccccatgtcaccgagcacatccccagagaacggctctgcgatgctgtggctgtgctgctgaacatgagaaatccagatggagggttcgccacctatgagaccaagcgtggggggcacttgctggagctgctgaacccctcggaggtcttcggggacatcatgattgactacacctatgtggagtgcacctcagccgtgatgcaggcgcttaagtatttccacaagcgtttcccggagcacagggcagcggagatccgggagaccctcacgcagggcttagagttctgtcggcggcagcagagggccgatggctcctgggaaggctcctggggagtttgcttcacctacggcacctggtttggcctggaggccttcgcctgtatggggcagacctaccgagatgggactgcctgtgcagaggtctcccgggcctgtgacttcctgctgtcccggcagatggcagacggaggctggggggaggactttgagtcctgcgaggagcggcgttatgtgcagagtgcccagtcccagatccataacacatgctgggccatgatggggctgatggccgttcggcatcctgacatcgaggcccaggagagaggagtccggtgtctacttgagaaacagctccccaatggcgactggccgcaggaaaacattgctggggtcttcaacaagtcctgtgccatctcctacacgagctacaggaacatcttccccatctgggccctcggccgcttctcccagctgtaccctgagagagcccttgctggccacccctgagaacatgcctacctgctgggtgccgtctgtgcgttccagtgaggccaaggggtcctggccgggttggggagccctcccataaccctgtcttgggctccaacccctcaacctctatctcatagatgtgaatctgggggccaggctggaggcagggatggggacagggtgggtggcttagactcttgatttttactgtaggttcatttctgaaagtagcttgtcgggcttgggtgaggaagggggcacaggagccgtgacccctgaggaggcacagcgccttctgccacctctgggcacggcctcaaggtagtgaggctaggaggttttttctgaccaatagctgagttcttgggagaggagcagctgtgcctgtgtgattccttagtgtcgagtgggctctgggctggggtcggccctgggcaggcttctcctgcaccttttgtctgctgggctgagggacacgagggcaaccctgtgacaatggcaggtagtgtgcatccgtgaatagcccagtgcgggggttgctcatggagcatcctgaggccgtgcagcagggagccccatgcccctgggtcgtgagcttgcctgcgtatggggtggtgtcatggagcctcatgcccctgggtcgtgagctcgcctgagtatggggtggtgtcatggagccgcatacccctgggttgtgagctcgcctgcatatgcagggtctgtcatggaacatcccaagtctgtgcagcagggagccccatgcccctgggacatgaacccacctgcgtggaatgctgtttgtgaggtgtctacagggtttatagtagtcttgtggacacagaaatgcacaggggacacttacggacacagaaatgcacaggggaggccgagcataaccaggggtgaggggcaggcagcagttgtagttactgccgcggggcactgctatgtgcagggacagccagcgcccagcccatcaccactccctgggctggctggcaggtatggcaccctgggagcccggcatatacccagggcacccctacggctgccgccagtctcatgcccaggtgggtgctctgggctggagcgagggccaggttttgggccgaggcttccccaggcaatcctgtgagctcccttctagcctctgacccagtctggtctggcttgcatggatgtagggcttggggtgggaagttcaggtcctggctttgcctttgcctgatgtggatgagcagctcacatgctcagggccacctgagactgtcactgctctcccctggctactgggaggagtcactgagagcttcgttacccctgctgccttgcccagggcacaccctatacctccttatctgctcttcccctccctgccgccttctgggcaggtagcagtccctggcctctccccctggctgatcactctccctcaggcagtggagatctgcgtctggacaccctcagatcctgtcattgcctgcccagagtccttcaggggcacccctctgccttggtgtgcggtccagggctctcacccaggtgccgcaccctctggggtcttctgtccagctcccttgccccatgtgctgtcactgactctccttgggactcgcctgcctgctcagagccctgcagggcttggtcagctgcctgttcagtgtcaacacttccctgcacatcttaaaactgggctttattttcgctgaaggaactgtgttgggacccttgacatctgtcaggtttgcacatgctgtttttttttctcagcccacgtgttctcccccacgtggggtagcagcaggacagacagtgaatcacagagtctgccctgagcagaggctgctgtccctgggactcctagccatggtcagactgtacaaaacggttttccagaaatgaaatgtaaatccatttttatactgaaaatgttactgaaagtcacttttatgagcatctgccttaataaacagacattgattcccttataaaaaaaacaatgagtacttcaatagaacatggataagcactggtcgataacaacgagaaaaaagcggggggggggggcccacagaaaagattccaactctctgggaggggcacaacaaatgatgaaggttgaccacgccgctttgtttgttgaaacaaaagcgggcccccaataaaagaggcggtggtaataaatcataaagcaggacgggcccgggttctataaaaacaacgcttgtgtgtgtgcgaacaaaaggtcacgccgtgcgaccactgtggtgaaaacgaacccacaacctgctgcggtggaagaaattatgtcgacacacatccaccagacagattaaacggccgccgggctattattt

SEQ ID NO: 381809 - DNA, 3900 bp, Homo sapiens
cccttgcctactgctcatgggtgtggagactgatattctggaagactgataggcagatttactattaacaaacacatagtctgtggcccagcaaagccaccccaatccctgcacaagggtaaaaggccagcattagagcactgcagcagcaatgacggagggcacgtgtctgcggcgccgagggggcccctacaagaccgagcccgccaccgacctcggccgctggcgactcaactgcgagaggggccggcagacgtggacctacctgcaggacgagcgcgccggccgcgagcagaccggcctggaagcctacgccctggggctggacaccaagaattactttaaggacttgcccaaagcccacaccgcctttgagggggctctgaacgggatgacattttacgtggggctgcaggctgaggatgggcactggacgggtgattatggtggcccacttttcctcctgccaggcctcctgatcacttgccacgtggcacgcatccctctgccagccggatacagagaagagattgtgcggtacctgcggtcagtgcagctccctgacggtggctggggcctgcacattgaggataagtccaccgtgtttgggactgcgctcaactatgtgtctctcagaattctgggtgttgggcctgacgatcctgacctggtacgagcccggaacattcttcacaagaaaggtggtgctgtggccatcccctcctgggggaagttctggctggctgtcctgaatgtttacagctgggaaggcctcaataccctgttcccagagatgtggctgtttcctgactgggcaccggcacacccctccacactctggtgccactgccggcaggtgtacctgcccatgagctactgctacgccgttcggctgagtgccgcggaagacccgctggtccagagcctccgccaggagctctatgtggaggacttcgccagcattgactggctggcgcagaggaacaacgtggcccccgacgagctgtacacgccgcacagctggctgctccgcgtggtatatgcgctcctcaacctgtatgagcaccaccacagtgcccacctgcggcagcgggccgtgcagaagctgtatgaacacattgtggccgacgaccgattcaccaagagcatcagcatcggcccgatctcgaaaaccatcaacatgcttgtgcgctggtatgtggacgggcccgcctccactgccttccaggagcatgtctccagaatcccggactatctctggatgggccttgacggcatgaaaatgcagggcaccaacggctcacagatctgggacaccgcattcgccatccaggctctgcttgaggcgggcgggcaccacaggcccgagttttcgtcctgcctgcagaaggctcatgagttcctgaggctctcacaggtcccagataaccctcccgactaccagaagtactaccgccagatgcgcaagggtggcttctccttcagtacgctggactgcggctggatcgtttctgactgcacggctgaggccttgaaggctgtgctgctcctgcaggagaagtgtccccatgtcaccgagcacatccccagagaacggctctgcgatgctgtggctgtgctgctgaacatgagaaatccagatggagggttcgccacctatgagaccaagcgtggggggcacttgctggagctgctgaacccctcggaggtcttcggggacatcatgattgactacacctatgtggagtgcacctcagccgtgatgcaggcgcttaagtatttccacaagcgtttcccggagcacagggcagcggagatccgggagaccctcacgcagggcttagagttctgtcggcggcagcagagggccgatggctcctgggaaggctcctggggagtttgcttcacctacggcacctggtttggcctggaggccttcgcctgtatggggcagacctaccgagatgggactgcctgtgcagaggtctcccgggcctgtgacttcctgctgtcccggcagatggcagacggaggctggggggaggactttgagtcctgcgaggagcggcgttatgtgcagagtgcccagtcccagatccataacacatgctgggccatgatggggctgatggccgttcggcatcctgacatcgaggcccaggagagaggagtccggtgtctacttgagaaacagctccccaatggcgactggccgcaggaaaacattgctggggtcttcaacaagtcctgtgccatctcctacacgagctacaggaacatcttccccatctgggccctcggccgcttctcccagctgtaccctgagagagcccttgctggccacccctgagaacatgcctacctgctgggtgccgtctgtgcgttccagtgaggccaaggggtcctggccgggttggggagccctcccataaccctgtcttgggctccaacccctcaacctctatctcatagatgtgaatctgggggccaggctggaggcagggatggggacagggtgggtggcttagactcttgatttttactgtaggttcatttctgaaagtagcttgtcgggcttgggtgaggaagggggcacaggagccgtgacccctgaggaggcacagcgccttctgccacctctgggcacggcctcaaggtagtgaggctaggaggttttttctgaccaatagctgagttcttgggagaggagcagctgtgcctgtgtgattccttagtgtcgagtgggctctgggctggggtcggccctgggcaggcttctcctgcaccttttgtctgctgggctgagggacacgagggcaaccctgtgacaatggcaggtagtgtgcatccgtgaatagcccagtgcgggggttgctcatggagcatcctgaggccgtgcagcagggagccccatgcccctgggtcgtgagcttgcctgcgtatggggtggtgtcatggagcctcatgcccctgggtcgtgagctcgcctgagtatggggtggtgtcatggagccgcatacccctgggttgtgagctcgcctgcatatgcagggtctgtcatggaacatcccaagtctgtgcagcagggagccccatgcccctgggacatgaacccacctgcgtggaatgctgtttgtgaggtgtctacagggtttatagtagtcttgtggacacagaaatgcacaggggacacttacggacacagaaatgcacaggggaggccgagcataaccaggggtgaggggcaggcagcagttgtagttactgccgcggggcactgctatgtgcagggacagccagcgcccagcccatcaccactccctgggctggctggcaggtatggcaccctgggagcccggcatatacccagggcacccctacggctgccgccagtctcatgcccaggtgggtgctctgggctggagcgagggccaggttttgggccgaggcttccccaggcaatcctgtgagctcccttctagcctctgacccagtctggtctggcttgcatggatgtagggcttggggtgggaagttcaggtcctggctttgcctttgcctgatgtggatgagcagctcacatgctcagggccacctgagactgtcactgctctcccctggctactgggaggagtcactgagagcttcgttacccctgctgccttgcccagggcacaccctatacctccttatctgctcttcccctccctgccgccttctgggcaggtagcagtccctggcctctccccctggctgctgtccctgggactcctagccatggtcagactgtacaaaacggttttccagaaatgaaatgtaaatccatttttatactgaaaatgttactgaaagtcacttttatgagcatctgccttaataaacagacattgattcccttat

SEQ ID NO: 381810 - DNA, 4294 bp, Homo sapiens
accacatgcaagggtgaccaattttgtatttttcttcccagcagatgttaaagcaagaccaacagtctcccctcatggaaggcccactgatctaaaatgctggttccttttggaccttcagggcacttgggggagaccttcctgaggtgctgtgcagtgtctggtgtttctcagaccctggtggtcatgggagccaggcgtggctgagtgggctctacaggccctaggcagggagcatcgcctgtgctgtggctgacgttccttctggccctgttcccaaagttccccatgggggcctgggaggaatggcctttccagggggtgtttttatgagaaggaggtagctccctgttggagtgaggtgctcaggaggaaaggggcctggtcttagcagtcatgaccacctgtccccagtgaggaacatctctcctgccacacaggcctcctgatcacttgccacgtggcacgcatccctctgccagccggatacagagaagagattgtgcggtacctgcggtcagtgcagctccctgacggtggctggggcctgcacattgaggataagtccaccgtgtttgggactgcgctcaactatgtgtctctcagaattctgggtgttgggcctgacgatcctgacctggtacgagcccggaacattcttcacaagaaaggtggtgctgtggccatcccctcctgggggaagttctggctggctgtcctgaatgtttacagctgggaaggcctcaataccctgttcccagagatgtggctgtttcctgactgggcaccggcacacccctccacactctggtgccactgccggcaggtgtacctgcccatgagctactgctacgccgttcggctgagtgccgcggaagacccgctggtccagagcctccgccaggagctctatgtggaggacttcgccagcattgactggctggcgcagaggaacaacgtggcccccgacgagctgtacacgccgcacagctggctgctccgcgtggtatatgcgctcctcaacctgtatgagcaccaccacagtgcccacctgcggcagcgggccgtgcagaagctgtatgaacacattgtggccgacgaccgattcaccaagagcatcagcatcggcccgatctcgaaaaccatcaacatgcttgtgcgctggtatgtggacgggcccgcctccactgccttccaggagcatgtctccagaatcccggactatctctggatgggccttgacggcatgaaaatgcagggcaccaacggctcacagatctgggacaccgcattcgccatccaggctctgcttgaggcgggcgggcaccacaggcccgagttttcgtcctgcctgcagaaggctcatgagttcctgaggctctcacaggtcccagataaccctcccgactaccagaagtactaccgccagatgcgcaagggtggcttctccttcagtacgctggactgcggctggatcgtttctgactgcacggctgaggccttgaaggctgtgctgctcctgcaggagaagtgtccccatgtcaccgagcacatccccagagaacggctctgcgatgctgtggctgtgctgctgaacatgagaaatccagatggagggttcgccacctatgagaccaagcgtggggggcacttgctggagctgctgaacccctcggaggtcttcggggacatcatgattgactacacctatgtggagtgcacctcagccgtgatgcaggcgcttaagtatttccacaagcgtttcccggagcacagggcagcggagatccgggagaccctcacgcagggcttagagttctgtcggcggcagcagagggccgatggctcctgggaaggctcctggggagtttgcttcacctacggcacctggtttggcctggaggccttcgcctgtatggggcagacctaccgagatgggactgcctgtgcagaggtctcccgggcctgtgacttcctgctgtcccggcagatggcagacggaggctggggggaggactttgagtcctgcgaggagcggcgttatgtgcagagtgcccagtcccagatccataacacatgctgggccatgatggggctgatggccgttcggcatcctgacatcgaggcccaggagagaggagtccggtgtctacttgagaaacagctccccaatggcgactggccgcaggaaaacattgctggggtcttcaacaagtcctgtgccatctcctacacgagctacaggaacatcttccccatctgggccctcggccgcttctcccagctgtaccctgagagagcccttgctggccacccctgagaacatgcctacctgctgggtgccgtctgtgcgttccagtgaggccaaggggtcctggccgggttggggagccctcccataaccctgtcttgggctccaacccctcaacctctatctcatagatgtgaatctgggggccaggctggaggcagggatggggacagggtgggtggcttagactcttgatttttactgtaggttcatttctgaaagtagcttgtcgggcttgggtgaggaagggggcacaggagccgtgacccctgaggaggcacagcgccttctgccacctctgggcacggcctcaaggtagtgaggctaggaggttttttctgaccaatagctgagttcttgggagaggagcagctgtgcctgtgtgattccttagtgtcgagtgggctctgggctggggtcggccctgggcaggcttctcctgcaccttttgtctgctgggctgagggacacgagggcaaccctgtgacaatggcaggtagtgtgcatccgtgaatagcccagtgcgggggttgctcatggagcatcctgaggccgtgcagcagggagccccatgcccctgggtcgtgagcttgcctgcgtatggggtggtgtcatggagcctcatgcccctgggtcgtgagctcgcctgagtatggggtggtgtcatggagccgcatacccctgggttgtgagctcgcctgcatatgcagggtctgtcatggaacatcccaagtctgtgcagcagggagccccatgcccctgggacatgaacccacctgcgtggaatgctgtttgtgaggtgtctacagggtttatagtagtcttgtggacacagaaatgcacaggggacacttacggacacagaaatgcacaggggaggccgagcataaccaggggtgaggggcaggcagcagttgtagttactgccgcggggcactgctatgtgcagggacagccagcgcccagcccatcaccactccctgggctggctggcaggtatggcaccctgggagcccggcatatacccagggcacccctacggctgccgccagtctcatgcccaggtgggtgctctgggctggagcgagggccaggttttgggccgaggcttccccaggcaatcctgtgagctcccttctagcctctgacccagtctggtctggcttgcatggatgtagggcttggggtgggaagttcaggtcctggctttgcctttgcctgatgtggatgagcagctcacatgctcagggccacctgagactgtcactgctctcccctggctactgggaggagtcactgagagcttcgttacccctgctgccttgcccagggcacaccctatacctccttatctgctcttcccctccctgccgccttctgggcaggtagcagtccctggcctctccccctggctgatcactctccctcaggcagtggagatctgcgtctggacaccctcagatcctgtcattgcctgcccagagtccttcaggggcacccctctgccttggtgtgcggtccagggctctcacccaggtgccgcaccctctggggtcttctgtccagctcccttgccccatgtgctgtcactgactctccttgggactcgcctgcctgctcagagccctgcagggcttggtcagctgcctgttcagtgtcaacacttccctgcacatcttaaaactgggctttattttcgctgaaggaactgtgttgggacccttgacatctgtcaggtttgcacatgctgtttttttttctcagcccacgtgttctcccccacgtggggtagcagcaggacagacagtgaatcacagagtctgccctgagcagaggctgctgtccctgggactcctagccatggtcagactgtacaaaacggttttccagaaatgaaatgtaaatccatttttatactgaaaatgttactgaaagtcacttttatgagcatctgccttaataaacagacattgattcccttat

SEQ ID NO: 381811 - DNA, 4173 bp, Homo sapiens
tcctgacgaatgcggggtggtcctaggtgctgaggagagcgcgactggggcagtgggccggcggccggcgttggggcggggcctgggtcgctgatggccggtggtcctcaggtgtctgcggcgccgagggggcccctacaagaccgagcccgccaccgacctcggccgctggcgactcaactgcgagaggggccggcagacgtggacctacctgcaggacgagcgcgccggccgcgagcagaccggcctggaagcctacgccctggggctggacaccaagaattactttaaggacttgcccaaagcccacaccgcctttgagggggctctgaacgggatgacattttacgtggggctgcaggctgaggatgggcactggacgggtgattatggtggcccacttttcctcctgccaggcctcctgatcacttgccacgtggcacgcatccctctgccagccggatacagagaagagattgtgcggtacctgcggtcagtgcagctccctgacggtggctggggcctgcacattgaggataagtccaccgtgtttgggactgcgctcaactatgtgtctctcagaattctgggtgttgggcctgacgatcctgacctggtacgagcccggaacattcttcacaagaaaggctgtttcctgactgggcaccggcacacccctccacactctggtgccactgccggcaggtgtacctgcccatgagctactgctacgccgttcggctgagtgccgcggaagacccgctggtccagagcctccgccaggagctctatgtggaggacttcgccagcattgactggctggcgcagaggaacaacgtggcccccgacgagctgtacacgccgcacagctggctgctccgcgtggtatatgcgctcctcaacctgtatgagcaccaccacagtgcccacctgcggcagcgggccgtgcagaagctgtatgaacacattgtggccgacgaccgattcaccaagagcatcagcatcggcccgatctcgaaaaccatcaacatgcttgtgcgctggtatgtggacgggcccgcctccactgccttccaggagcatgtctccagaatcccggactatctctggatgggccttgacggcatgaaaatgcagggcaccaacggctcacagatctgggacaccgcattcgccatccaggctctgcttgaggcgggcgggcaccacaggcccgagttttcgtcctgcctgcagaaggctcatgagttcctgaggctctcacaggtcccagataaccctcccgactaccagaagtactaccgccagatgcgcaagggtggcttctccttcagtacgctggactgcggctggatcgtttctgactgcacggctgaggccttgaaggctgtgctgctcctgcaggagaagtgtccccatgtcaccgagcacatccccagagaacggctctgcgatgctgtggctgtgctgctgaacatgagaaatccagatggagggttcgccacctatgagaccaagcgtggggggcacttgctggagctgctgaacccctcggaggtcttcggggacatcatgattgactacacctatgtggagtgcacctcagccgtgatgcaggcgcttaagtatttccacaagcgtttcccggagcacagggcagcggagatccgggagaccctcacgcagggcttagagttctgtcggcggcagcagagggccgatggctcctgggaaggctcctggggagtttgcttcacctacggcacctggtttggcctggaggccttcgcctgtatggggcagacctaccgagatgggactgcctgtgcagaggtctcccgggcctgtgacttcctgctgtcccggcagatggcagacggaggctggggggaggactttgagtcctgcgaggagcggcgttatgtgcagagtgcccagtcccagatccataacacatgctgggccatgatggggctgatggccgttcggcatcctgacatcgaggcccaggagagaggagtccggtgtctacttgagaaacagctccccaatggcgactggccgcaggaaaacattgctggggtcttcaacaagtcctgtgccatctcctacacgagctacaggaacatcttccccatctgggccctcggccgcttctcccagctgtaccctgagagagcccttgctggccacccctgagaacatgcctacctgctgggtgccgtctgtgcgttccagtgaggccaaggggtcctggccgggttggggagccctcccataaccctgtcttgggctccaacccctcaacctctatctcatagatgtgaatctgggggccaggctggaggcagggatggggacagggtgggtggcttagactcttgatttttactgtaggttcatttctgaaagtagcttgtcgggcttgggtgaggaagggggcacaggagccgtgacccctgaggaggcacagcgccttctgccacctctgggcacggcctcaaggtagtgaggctaggaggttttttctgaccaatagctgagttcttgggagaggagcagctgtgcctgtgtgattccttagtgtcgagtgggctctgggctggggtcggccctgggcaggcttctcctgcaccttttgtctgctgggctgagggacacgagggcaaccctgtgacaatggcaggtagtgtgcatccgtgaatagcccagtgcgggggttgctcatggagcatcctgaggccgtgcagcagggagccccatgcccctgggtcgtgagcttgcctgcgtatggggtggtgtcatggagcctcatgcccctgggtcgtgagctcgcctgagtatggggtggtgtcatggagccgcatacccctgggttgtgagctcgcctgcatatgcagggtctgtcatggaacatcccaagtctgtgcagcagggagccccatgcccctgggacatgaacccacctgcgtggaatgctgtttgtgaggtgtctacagggtttatagtagtcttgtggacacagaaatgcacaggggacacttacggacacagaaatgcacaggggaggccgagcataaccaggggtgaggggcaggcagcagttgtagttactgccgcggggcactgctatgtgcagggacagccagcgcccagcccatcaccactccctgggctggctggcaggtatggcaccctgggagcccggcatatacccagggcacccctacggctgccgccagtctcatgcccaggtgggtgctctgggctggagcgagggccaggttttgggccgaggcttccccaggcaatcctgtgagctcccttctagcctctgacccagtctggtctggcttgcatggatgtagggcttggggtgggaagttcaggtcctggctttgcctttgcctgatgtggatgagcagctcacatgctcagggccacctgagactgtcactgctctcccctggctactgggaggagtcactgagagcttcgttacccctgctgccttgcccagggcacaccctatacctccttatctgctcttcccctccctgccgccttctgggcaggtagcagtccctggcctctccccctggctgatcactctccctcaggcagtggagatctgcgtctggacaccctcagatcctgtcattgcctgcccagagtccttcaggggcacccctctgccttggtgtgcggtccagggctctcacccaggtgccgcaccctctggggtcttctgtccagctcccttgccccatgtgctgtcactgactctccttgggactcgcctgcctgctcagagccctgcagggcttggtcagctgcctgttcagtgtcaacacttccctgcacatcttaaaactgggctttattttcgctgaaggaactgtgttgggacccttgacatctgtcaggtttgcacatgctgtttttttttctcagcccacgtgttctcccccacgtggggtagcagcaggacagacagtgaatcacagagtctgccctgagcagaggctgctgtccctgggactcctagccatggtcagactgtacaaaacggttttccagaaatgaaatgtaaatccatttttatactgaaaatgttactgaaagtcacttttatgagcatctgccttaataaacagacattgattcccttat

SEQ ID NO: 381812 - DNA, 4258 bp, Homo sapiens
cccttgcctactgctcatgggtgtggagactgatattctggaagactgataggcagatttactattaacaaacacatagtctgtggcccagcaaagccaccccaatccctgcacaagggtaaaaggccagcattagagcactgcagcagcaatgacggagggcacgtgtctgcggcgccgagggggcccctacaagaccgagcccgccaccgacctcggccgctggcgactcaactgcgagaggggccggcagacgtggacctacctgcaggacgagcgcgccggccgcgagcagaccggcctggaagcctacgccctggggctggacaccaagaattactttaaggacttgcccaaagcccacaccgcctttgagggggctctgaacgggatgacattttacgtggggctgcaggctgaggatgggcactggacgggtgattatggtggcccacttttcctcctgccaggcctcctgatcacttgccacgtggcacgcatccctctgccagccggatacagagaagagattgtgcggtacctgcggtcagtgcagctccctgacggtggctggggcctgcacattgaggataagtccaccgtgtttgggactgcgctcaactatgtgtctctcagaattctgggtgttgggcctgacgatcctgacctggtacgagcccggaacattcttcacaagaaaggtggtgctgtggccatcccctcctgggggaagttctggctggctgtcctgaatgtttacagctgggaaggcctcaataccctgttcccagagatgtggctgtttcctgactgggcaccggcacacccctccacactctggtgccactgccggcaggtgtacctgcccatgagctactgctacgccgttcggctgagtgccgcggaagacccgctggtccagagcctccgccaggagctctatgtggaggacttcgccagcattgactggctggcgcagaggaacaacgtggcccccgacgagctgtacacgccgcacagctggctgctccgcgtggtatatgcgctcctcaacctgtatgagcaccaccacagtgcccacctgcggcagcgggccgtgcagaagctgtatgaacacattgtggccgacgaccgattcaccaagagcatcagcatcggcccgatctcgaaaaccatcaacatgcttgtgcgctggtatgtggacgggcccgcctccactgccttccaggagcatgtctccagaatcccggactatctctggatgggccttgacggcatgaaaatgcagggcaccaacggctcacagatctgggacaccgcattcgccatccaggctctgcttgaggcgggcgggcaccacaggcccgagttttcgtcctgcctgcagaaggctcatgagttcctgaggctctcacaggtcccagataaccctcccgactaccagaagtactaccgccagatgcgcaagggtggcttctccttcagtacgctggactgcggctggatcgtttctgactgcacggctgaggccttgaaggctgtgctgctcctgcaggagaagtgtccccatgtcaccgagcacatccccagagaacggctctgcgatgctgtggctgtgctgctgaacatgagaaatccagatggagggttcgccacctatgagaccaagcgtggggggcacttgctggagctgctgaacccctcggaggtcttcggggacatcatgattgactacacctatgtggagtgcacctcagccgtgatgcaggcgcttaagtatttccacaagcgtttcccggagcacagggcagcggagatccgctcctggggagtttgcttcacctacggcacctggtttggcctggaggccttcgcctgtatggggcagacctaccgagatgggactgcctgtgcagaggtctcccgggcctgtgacttcctgctgtcccggcagatggcagacggaggctggggggaggactttgagtcctgcgaggagcggcgttatgtgcagagtgcccagtcccagatccataacacatgctgggccatgatggggctgatggccgttcggcatcctgacatcgaggcccaggagagaggagtccggtgtctacttgagaaacagctccccaatggcgactggccgcaggaaaacattgctggggtcttcaacaagtcctgtgccatctcctacacgagctacaggaacatcttccccatctgggccctcggccgcttctcccagctgtaccctgagagagcccttgctggccacccctgagaacatgcctacctgctgggtgccgtctgtgcgttccagtgaggccaaggggtcctggccgggttggggagccctcccataaccctgtcttgggctccaacccctcaacctctatctcatagatgtgaatctgggggccaggctggaggcagggatggggacagggtgggtggcttagactcttgatttttactgtaggttcatttctgaaagtagcttgtcgggcttgggtgaggaagggggcacaggagccgtgacccctgaggaggcacagcgccttctgccacctctgggcacggcctcaaggtagtgaggctaggaggttttttctgaccaatagctgagttcttgggagaggagcagctgtgcctgtgtgattccttagtgtcgagtgggctctgggctggggtcggccctgggcaggcttctcctgcaccttttgtctgctgggctgagggacacgagggcaaccctgtgacaatggcaggtagtgtgcatccgtgaatagcccagtgcgggggttgctcatggagcatcctgaggccgtgcagcagggagccccatgcccctgggtcgtgagcttgcctgcgtatggggtggtgtcatggagcctcatgcccctgggtcgtgagctcgcctgagtatggggtggtgtcatggagccgcatacccctgggttgtgagctcgcctgcatatgcagggtctgtcatggaacatcccaagtctgtgcagcagggagccccatgcccctgggacatgaacccacctgcgtggaatgctgtttgtgaggtgtctacagggtttatagtagtcttgtggacacagaaatgcacaggggacacttacggacacagaaatgcacaggggaggccgagcataaccaggggtgaggggcaggcagcagttgtagttactgccgcggggcactgctatgtgcagggacagccagcgcccagcccatcaccactccctgggctggctggcaggtatggcaccctgggagcccggcatatacccagggcacccctacggctgccgccagtctcatgcccaggtgggtgctctgggctggagcgagggccaggttttgggccgaggcttccccaggcaatcctgtgagctcccttctagcctctgacccagtctggtctggcttgcatggatgtagggcttggggtgggaagttcaggtcctggctttgcctttgcctgatgtggatgagcagctcacatgctcagggccacctgagactgtcactgctctcccctggctactgggaggagtcactgagagcttcgttacccctgctgccttgcccagggcacaccctatacctccttatctgctcttcccctccctgccgccttctgggcaggtagcagtccctggcctctccccctggctgatcactctccctcaggcagtggagatctgcgtctggacaccctcagatcctgtcattgcctgcccagagtccttcaggggcacccctctgccttggtgtgcggtccagggctctcacccaggtgccgcaccctctggggtcttctgtccagctcccttgccccatgtgctgtcactgactctccttgggactcgcctgcctgctcagagccctgcagggcttggtcagctgcctgttcagtgtcaacacttccctgcacatcttaaaactgggctttattttcgctgaaggaactgtgttgggacccttgacatctgtcaggtttgcacatgctgtttttttttctcagcccacgtgttctcccccacgtggggtagcagcaggacagacagtgaatcacagagtctgccctgagcagaggctgctgtccctgggactcctagccatggtcagactgtacaaaacggttttccagaaatgaaatgtaaatccatttttatactgaaaatgttactgaaagtcacttttatgagcatctgccttaataaacagacattgattcccttat

SEQ ID NO: 381813 - DNA, 2951 bp, Homo sapiens
tagacacttcgctctggccttttcagagaactggttattttttggaaatatcagttagatgtaggatgggtcttgtcttctaaatctattgttttctctctaattgattttttcctgtttttatttagttcactttgttgggtttgctcaagcctgggtcactggatctcagggatgctgctcctgtttgcagctgtgtctgcaggggcttcccaaggccttgctttcccctcacgtccctttctcagactctgccaatccgcttcccgctctggtgtcctgtggttgcttctttttaaaaccctcatcggtctgtgtaaactgtttatttttatgtggtttttaagggagaccattctcattcttttgagaccctggaaaggatggaattgggataggtaaactgctgttttaccagaatgttcactggaccaatctcgtgttccagggagaccctcacgcagggcttagagttctgtcggcggcagcagagggccgatggctcctgggaaggctcctggggagtttgcttcacctacggcacctggtttggcctggaggccttcgcctgtatggggcagacctaccgagatgggactgcctgtgcagaggtctcccgggcctgtgacttcctgctgtcccggcagatggcagacggaggctggggggaggactttgagtcctgcgaggagcggcgttatgtgcagagtgcccagtcccagatccataacacatgctgggccatgatggggctgatggccgttcggcatcctgacatcgaggcccaggagagaggagtccggtgtctacttgagaaacagctccccaatggcgactggccgcaggaaaacattgctggggtcttcaacaagtcctgtgccatctcctacacgagctacaggaacatcttccccatctgggccctcggccgcttctcccagctgtaccctgagagagcccttgctggccacccctgagaacatgcctacctgctgggtgccgtctgtgcgttccagtgaggccaaggggtcctggccgggttggggagccctcccataaccctgtcttgggctccaacccctcaacctctatctcatagatgtgaatctgggggccaggctggaggcagggatggggacagggtgggtggcttagactcttgatttttactgtaggttcatttctgaaagtagcttgtcgggcttgggtgaggaagggggcacaggagccgtgacccctgaggaggcacagcgccttctgccacctctgggcacggcctcaaggtagtgaggctaggaggttttttctgaccaatagctgagttcttgggagaggagcagctgtgcctgtgtgattccttagtgtcgagtgggctctgggctggggtcggccctgggcaggcttctcctgcaccttttgtctgctgggctgagggacacgagggcaaccctgtgacaatggcaggtagtgtgcatccgtgaatagcccagtgcgggggttgctcatggagcatcctgaggccgtgcagcagggagccccatgcccctgggtcgtgagcttgcctgcgtatggggtggtgtcatggagcctcatgcccctgggtcgtgagctcgcctgagtatggggtggtgtcatggagccgcatacccctgggttgtgagctcgcctgcatatgcagggtctgtcatggaacatcccaagtctgtgcagcagggagccccatgcccctgggacatgaacccacctgcgtggaatgctgtttgtgaggtgtctacagggtttatagtagtcttgtggacacagaaatgcacaggggacacttacggacacagaaatgcacaggggaggccgagcataaccaggggtgaggggcaggcagcagttgtagttactgccgcggggcactgctatgtgcagggacagccagcgcccagcccatcaccactccctgggctggctggcaggtatggcaccctgggagcccggcatatacccagggcacccctacggctgccgccagtctcatgcccaggtgggtgctctgggctggagcgagggccaggttttgggccgaggcttccccaggcaatcctgtgagctcccttctagcctctgacccagtctggtctggcttgcatggatgtagggcttggggtgggaagttcaggtcctggctttgcctttgcctgatgtggatgagcagctcacatgctcagggccacctgagactgtcactgctctcccctggctactgggaggagtcactgagagcttcgttacccctgctgccttgcccagggcacaccctatacctccttatctgctcttcccctccctgccgccttctgggcaggtagcagtccctggcctctccccctggctgatcactctccctcaggcagtggagatctgcgtctggacaccctcagatcctgtcattgcctgcccagagtccttcaggggcacccctctgccttggtgtgcggtccagggctctcacccaggtgccgcaccctctggggtcttctgtccagctcccttgccccatgtgctgtcactgactctccttgggactcgcctgcctgctcagagccctgcagggcttggtcagctgcctgttcagtgtcaacacttccctgcacatcttaaaactgggctttattttcgctgaaggaactgtgttgggacccttgacatctgtcaggtttgcacatgctgtttttttttctcagcccacgtgttctcccccacgtggggtagcagcaggacagacagtgaatcacagagtctgccctgagcagaggctgctgtccctgggactcctagccatggtcagactgtacaaaacggttttccagaaatgaaatgtaaatccatttttatactgaaaatgttactgaaagtcacttttatgagcatctgccttaataaacagacattgattcccttat

SEQ ID NO: 381814 - DNA, 2406 bp, Homo sapiens
  misc_feature (75)..(76): n is a, c, g, or t
  misc_feature (162)..(162): n is a, c, g, or t
ttaactctcaggcctatgtacagaggcactgcgtgtctcaattctgtgcacggaggcgtctatattgtcagaganntgcccgagatcggcgcagaattcactacacaatccatgcgtgcggaccattgattgtggtgctgatctggccgacttcgggcattnctgaccatctgaagcgcctcgagtgacgagagtgacgtccaggctgtcgtacttgtgagaacaacagctacccgctaaatggctgtactggcccgtcggtatttacatatgctgggtgttcttcgatacaagatctctgtggcctatctccgtacatccgagcttactagggtgaacttcattccgctcaattcttgtggtccacttcgagtacgcgttcatcgctcaattcatgttagccctgagagagcccttgctggccacccctgagaacatgcctacctgctgggtgccgtctgtgcgttccagtgaggccaaggggtcctggccgggttggggagccctcccataaccctgtcttgggctccaacccctcaacctctatctcatagatgtgaatctgggggccaggctggaggcagggatggggacagggtgggtggcttagactcttgatttttactgtaggttcatttctgaaagtagcttgtcgggcttgggtgaggaagggggcacaggagccgtgacccctgaggaggcacagcgccttctgccacctctgggcacggcctcaaggtagtgaggctaggaggttttttctgaccaatagctgagttcttgggagaggagcagctgtgcctgtgtgattccttagtgtcgagtgggctctgggctggggtcggccctgggcaggcttctcctgcaccttttgtctgctgggctgagggacacgagggcaaccctgtgacaatggcaggtagtgtgcatccgtgaatagcccagtgcgggggttgctcatggagcatcctgaggccgtgcagcagggagccccatgcccctgggtcgtgagcttgcctgcgtatggggtggtgtcatggagcctcatgcccctgggtcgtgagctcgcctgagtatggggtggtgtcatggagccgcatacccctgggttgtgagctcgcctgcatatgcagggtctgtcatggaacatcccaagtctgtgcagcagggagccccatgcccctgggacatgaacccacctgcgtggaatgctgtttgtgaggtgtctacagggtttatagtagtcttgtggacacagaaatgcacaggggacacttacggacacagaaatgcacaggggaggccgagcataaccaggggtgaggggcaggcagcagttgtagttactgccgcggggcactgctatgtgcagggacagccagcgcccagcccatcaccactccctgggctggctggcaggtatggcaccctgggagcccggcatatacccagggcacccctacggctgccgccagtctcatgcccaggtgggtgctctgggctggagcgagggccaggttttgggccgaggcttccccaggcaatcctgtgagctcccttctagcctctgacccagtctggtctggcttgcatggatgtagggcttggggtgggaagttcaggtcctggctttgcctttgcctgatgtggatgagcagctcacatgctcagggccacctgagactgtcactgctctcccctggctactgggaggagtcactgagagcttcgttacccctgctgccttgcccagggcacaccctatacctccttatctgctcttcccctccctgccgccttctgggcaggtagcagtccctggcctctccccctggctgatcactctccctcaggcagtggagatctgcgtctggacaccctcagatcctgtcattgcctgcccagagtccttcaggggcacccctctgccttggtgtgcggtccagggctctcacccaggtgccgcaccctctggggtcttctgtccagctcccttgccccatgtgctgtcactgactctccttgggactcgcctgcctgctcagagccctgcagggcttggtcagctgcctgttcagtgtcaacacttccctgcacatcttaaaactgggctttattttcgctgaaggaactgtgttgggacccttgacatctgtcaggtttgcacatgctgtttttttttctcagcccacgtgttctcccccacgtggggtagcagcaggacagacagtgaatcacagagtctgccctgagcagaggctgctgtccctgggactcctagccatggtcagactgtacaaaacggttttccagaaatgaaatgtaaatccatttttatactgaaaatgttactgaaagtcacttttatgagcatctgccttaataaacagacattgattcccttat

SEQ ID NO: 381815 - DNA, 3216 bp, Homo sapiens
cccttgcctactgctcatgggtgtggagactgatattctggaagactgataggcagatttactattaacaaacacatagtctgtggcccagcaaagccaccccaatccctgcacaagggtaaaaggccagcattagagcactgcagcagcaatgacggagggcacgtgtctgcggcgccgagggggcccctacaagaccgagcccgccaccgacctcggccgctggcgactcaactgcgagaggggccggcagacgtggacctacctgcaggacgagcgcgccggccgcgagcagaccggcctggaagcctacgccctggggctggacaccaagaattactttaaggacttgcccaaagcccacaccgcctttgagggggctctgaacgggatgacattttacgtggggctgcaggctgaggatgggcactggacgggtgattatggtggcccacttttcctcctgccaggcctcctgatcacttgccacgtggcacgcatccctctgccagccggatacagagaagagattgtgcggtacctgcggtcagtgcagctccctgacggtggctggggcctgcacattgaggataagtccaccgtgtttgggactgcgctcaactatgtgtctctcagaattctgggtgttgggcctgacgatcctgacctggtacgagcccggaacattcttcacaagaaaggtggtgctgtggccatcccctcctgggggaagttctggctggctgtcctgaatgtttacagctgggaaggcctcaataccctgttcccagagatgtggctgtttcctgactgggcaccggcacacccctccacactctggtgccactgccggcaggtgtacctgcccatgagctactgctacgccgttcggctgagtgccgcggaagacccgctggtccagagcctccgccaggagctctatgtggaggacttcgccagcattgactggctggcgcagaggaacaacgtggcccccgacgagctgtacacgccgcacagctggctgctccgcgtggtatatgcgctcctcaacctgtatgagcaccaccacagtgcccacctgcggcagcgggccgtgcagaagctgtatgaacacattgtggccgacgaccgattcaccaagagcatcagcatcggcccgatctcgaaaaccatcaacatgcttgtgcgctggtatgtggacgggcccgcctccactgccttccaggagcatgtctccagaatcccggactatctctggatgggccttgacggcatgaaaatgcagggcaccaacggctcacagatctgggacaccgcattcgccatccaggctctgcttgaggcgggcgggcaccacaggcccgagttttcgtcctgcctgcagaaggctcatgagttcctgaggctctcacaggtcccagataaccctcccgactaccagaagtactaccgccagatgcgcaagggtggcttctccttcagtacgctggactgcggctggatcgtttctgactgcacggctgaggccttgaaggctgtgctgctcctgcaggagaagtgtccccatgtcaccgagcacatccccagagaacggctctgcgatgctgtggctgtgctgctgaacatgagaaatccagatggagggttcgccacctatgagaccaagcgtggggggcacttgctggagctgctgaacccctcggaggtcttcggggacatcatgattgactacacctatgtggagtgcacctcagccgtgatgcaggcgcttaagtatttccacaagcgtttcccggagcacagggcagcggagatccgggagaccctcacgcagggcttagagttctgtcggcggcagcagagggccgatggctcctgggaaggctcctggggagtttgcttcacctacggcacctggtttggcctggaggccttcgcctgtatggggcagacctaccgagatgggactgcctgtgcagaggtctcccgggcctgtgacttcctgctgtcccggcagatggcagacggaggctggggggaggactttgagtcctgcgaggagcggcgttatgtgcagagtgcccagtcccagatccataacacatgctgggccatgatggggctgatggccgttcggcatcctgacatcgaggcccaggagagaggagtccggtgtctacttgagaaacagctccccaatggcgactggccgcaggaaaacattgctggggtcttcaacaagtcctgtgccatctcctacacgagctacaggaacatcttccccatctgggccctcggccgcttctcccagctgtaccctgagagagcccttgctggccacccctgagaacatgcctacctgctgggtgccgtctgtgcgttccagtgaggccaaggggtcctggccgggttggggagccctcccataaccctgtcttgggctccaacccctcaacctctatctcatagatgtgaatctgggggccaggtactgggaggagtcactgagagcttcgttacccctgctgccttgcccagggcacaccctatacctccttatctgctcttcccctccctgccgccttctgggcaggtagcagtccctggcctctccccctggctgatcactctccctcaggcagtggagatctgcgtctggacaccctcagatcctgtcattgcctgcccagagtccttcaggggcacccctctgccttggtgtgcggtccagggctctcacccaggtgccgcaccctctggggtcttctgtccagctcccttgccccatgtgctgtcactgactctccttgggactcgcctgcctgctcagagccctgcagggcttggtcagctgcctgttcagtgtcaacacttccctgcacatcttaaaactgggctttattttcgctgaaggaactgtgttgggacccttgacatctgtcaggtttgcacatgctgtttttttttctcagcccacgtgttctcccccacgtggggtagcagcaggacagacagtgaatcacagagtctgccctgagcagaggctgctgtccctgggactcctagccatggtcagactgtacaaaacggttttccagaaatgaaatgtaaatccatttttatactgaaaatgttactgaaagtcacttttatgagcatctgccttaataaacagacattgattcccttataagcctgtcacactgtgtttcg

SEQ ID NO: 381816 - DNA, 559 bp, Homo sapiens
  misc_feature (12)..(12): n is a, c, g, or t
gtgttgctgtgnttgctctagatggtccctgtcttgatgtcactgattgcctgcccagagtccttcaggggcacccctctgccttggtgtgcggtccagggctctcacccaggtgccgcaccctctggggtcttctgtccagctcccttgccccatgtgctgtcactgactctccttgggactcgcctgcctgctcagagccctgcagggcttggtcagctgcctgttcagtgtcaacacttccctgcacatcttaaaactgggctttattttcgctgaaggaactgtgttgggacccttgacatctgtcaggtttgcacatgctgtttttttttctcagcccacgtgttctcccccacgtggggtagcagcaggacagacagtgaatcacagagtctgccctgagcagaggctgctgtccctgggactcctagccatggtcagactgtacaaaacggttttccagaaatgaaatgtaaatccatttttatactgaaaatgttactgaaagtcacttttatgagcatctgccttaataaacagacattgattcccttat

SEQ ID NO: 381817 - DNA, 966 bp, Homo sapiens
tagacacttcgctctggccttttcagagaactggttattttttggaaatatcagttagatgtaggatgggtcttgtcttctaaatctattgttttctctctaattgattttttcctgtttttatttagttcactttgttgggtttgctcaagcctgggtcactggatctcagggatgctgctcctgtttgcagctgtgtctgcaggggcttcccaaggccttgctttcccctcacgtccctttctcagactctgccaatccgcttcccgctctggtgtcctgtggttgcttctttttaaaaccctcatcggtctgtgtaaactgtttatttttatgtggtttttaagggagaccattctcattcttttgagaccctggaaaggatggaattgggataggtaaactgctgttttaccagaatgttcactggaccaatctcgtgttccagggagaccctcacgcagggcttagagttctgtcggcggcagcagagggccgatggctcctgggaagggtgagtgagcctccactcgtgagtgcagagatgcatgggatccagaggtttctgctctcacacactgcgttcataaatgttggcttgtatgttgttgctacaccagaagtttctggaagtgagctgccagcccgtgacttctgggggacctcgttcctttgtggcatgcgtggcctttgccccggtggaaattgctcagtacgttgctgggcgcagccgggctgctgggagcgcgctgtagcctgagcgtggctattccctccaccctttctgcttgctcttagggtccagcagacagagctgctgtcttccacggccttaatgcctgaggcactggagttggtgggctggctggggcacgtggatccacaatggcacgtggatcacaatggcacgtggatcacaatggcacgtggatcacaatggcacgtggatcacaatggcacgtggat

SEQ ID NO: 381818 - DNA, 241 bp, Homo sapiens
atgaacgtgggcctattactctcccccctcaggtggtgctgtggccatcccctcctgggggaagttctggctggctgtcctgaatgtttacagctgggaaggcctcaataccctgttcccagagatgtggtatgtctgctgttgattgggttgttgggtcgctgctgctgtcccggggagtagagtgacagggaccgtgggtcaggtgcaggctgtgacagcagagaggggtgggcattct

SEQ ID NO: 381819 - DNA, 4324 bp, Homo sapiens
cccttgcctactgctcatgggtgtggagactgatattctggaagactgataggcagatttactattaacaaacacatagtctgtggcccagcaaagccaccccaatccctgcacaagggtaaaaggccagcattagagcactgcagcagcaatgacggagggcacgtgtctgcggcgccgagggggcccctacaagaccgagcccgccaccgacctcggccgctggcgactcaactgcgagaggggccggcagacgtggacctacctgcaggacgagcgcgccggccgcgagcagaccggcctggaagcctacgccctggggctggacaccaagaattactttaaggacttgcccaaagcccacaccgcctttgagggggctctgaacgggatgacattttacgtggggctgcaggctgaggatgggcactggacgggtgattatggtggcccacttttcctcctgccaggcctcctgatcacttgccacgtggcacgcatccctctgccagccggatacagagaagagattgtgcggtacctgcggtcagtgcagctccctgacggtggctggggcctgcacattgaggataagtccaccgtgtttgggactgcgctcaactatgtgtctctcagaattctgggtgttgggcctgacgatcctgacctggtacgagcccggaacattcttcacaagaaaggtggtgctgtggccatcccctcctgggggaagttctggctggctgtcctgaatgtttacagctgggaaggcctcaataccctgttcccagagatgtggctgtttcctgactgggcaccggcacacccctccacactctggtgccactgccggcaggtgtacctgcccatgagctactgctacgccgttcggctgagtgccgcggaagacccgctggtccagagcctccgccaggagctctatgtggaggacttcgccagcattgactggctggcgcagaggaacaacgtggcccccgacgagctgtacacgccgcacagctggctgctccgcgtggtatatgcgctcctcaacctgtatgagcaccaccacagtgcccacctgcggcagcgggccgtgcagaagctgtatgaacacattgtggccgacgaccgattcaccaagagcatcagcatcggcccgatctcgaaaaccatcaacatgcttgtgcgctggtatgtggacgggcccgcctccactgccttccaggagcatgtctccagaatcccggactatctctggatgggccttgacggcatgaaaatgcagggcaccaacggctcacagatctgggacaccgcattcgccatccaggctctgcttgaggcgggcgggcaccacaggcccgagttttcgtcctgcctgcagaaggctcatgagttcctgaggctctcacaggtcccagataaccctcccgactaccagaagtactaccgccagatgcgcaagggtggcttctccttcagtacgctggactgcggctggatcgtttctgactgcacggctgaggccttgaaggctgtgctgctcctgcaggagaagtgtccccatgtcaccgagcacatccccagagaacggctctgcgatgctgtggctgtgctgctgaacatgagaaatccagatggagggttcgccacctatgagaccaagcgtggggggcacttgctggagctgctgaacccctcggaggtcttcggggacatcatgattgactacacctatgtggagtgcacctcagccgtgatgcaggcgcttaagtatttccacaagcgtttcccggagcacagggcagcggagatccgggagaccctcacgcagggcttagagttctgtcggcggcagcagagggccgatggctcctgggaaggctcctggggagtttgcttcacctacggcacctggtttggcctggaggccttcgcctgtatggggcagacctaccgagatgggactgcctgtgcagaggtctcccgggcctgtgacttcctgctgtcccggcagatggcagacggaggctggggggaggactttgagtcctgcgaggagcggcgttatgtgcagagtgcccagtcccagatccataacacatgctgggccatgatggggctgatggccgttcggcatcctgacatcgaggcccaggagagaggagtccggtgtctacttgagaaacagctccccaatggcgactggccgcaggaaaacattgctggggtcttcaacaagtcctgtgccatctcctacacgagctacaggaacatcttccccatctgggccctcggccgcttctcccagctgtaccctgagagagcccttgctggccacccctgagaacatgcctacctgctgggtgccgtctgtgcgttccagtgaggccaaggggtcctggccgggttggggagccctcccataaccctgtcttgggctccaacccctcaacctctatctcatagatgtgaatctgggggccaggctggaggcagggatggggacagggtgggtggcttagactcttgatttttactgtaggttcatttctgaaagtagcttgtcgggcttgggtgaggaagggggcacaggagccgtgacccctgaggaggcacagcgccttctgccacctctgggcacggcctcaaggtagtgaggctaggaggttttttctgaccaatagctgagttcttgggagaggagcagctgtgcctgtgtgattccttagtgtcgagtgggctctgggctggggtcggccctgggcaggcttctcctgcaccttttgtctgctgggctgagggacacgagggcaaccctgtgacaatggcaggtagtgtgcatccgtgaatagcccagtgcgggggttgctcatggagcatcctgaggccgtgcagcagggagccccatgcccctgggtcgtgagcttgcctgcgtatggggtggtgtcatggagcctcatgcccctgggtcgtgagctcgcctgagtatggggtggtgtcatggagccgcatacccctgggttgtgagctcgcctgcatatgcagggtctgtcatggaacatcccaagtctgtgcagcagggagccccatgcccctgggacatgaacccacctgcgtggaatgctgtttgtgaggtgtctacagggtttatagtagtcttgtggacacagaaatgcacaggggacacttacggacacagaaatgcacaggggaggccgagcataaccaggggtgaggggcaggcagcagttgtagttactgccgcggggcactgctatgtgcagggacagccagcgcccagcccatcaccactccctgggctggctggcaggtatggcaccctgggagcccggcatatacccagggcacccctacggctgccgccagtctcatgcccaggtgggtgctctgggctggagcgagggccaggttttgggccgaggcttccccaggcaatcctgtgagctcccttctagcctctgacccagtctggtctggcttgcatggatgtagggcttggggtgggaagttcaggtcctggctttgcctttgcctgatgtggatgagcagctcacatgctcagggccacctgagactgtcactgctctcccctggctactgggaggagtcactgagagcttcgttacccctgctgccttgcccagggcacaccctatacctccttatctgctcttcccctccctgccgccttctgggcaggtagcagtccctggcctctccccctggctgatcactctccctcaggcagtggagatctgcgtctggacaccctcagatcctgtcattgcctgcccagagtccttcaggggcacccctctgccttggtgtgcggtccagggctctcacccaggtgccgcaccctctggggtcttctgtccagctcccttgccccatgtgctgtcactgactctccttgggactcgcctgcctgctcagagccctgcagggcttggtcagctgcctgttcagtgtcaacacttccctgcacatcttaaaactgggctttattttcgctgaaggaactgtgttgggacccttgacatctgtcaggtttgcacatgctgtttttttttctcagcccacgtgttctcccccacgtggggtagcagcaggacagacagtgaatcacagagtctgccctgagcagaggctgctgtccctgggactcctagccatggtcagactgtacaaaacggttttccagaaatgaaatgtaaatccatttttatactgaaaatgttactgaaagtcacttttatgagcatctgccttaataaacagacattgattcccttat

SEQ ID NO: 381820 - DNA, 4392 bp, Homo sapiens
  misc_feature (4333)..(4333): n is a, c, g, or t
  misc_feature (4338)..(4338): n is a, c, g, or t
  misc_feature (4342)..(4343): n is a, c, g, or t
  misc_feature (4346)..(4346): n is a, c, g, or t
  misc_feature (4350)..(4351): n is a, c, g, or t
  misc_feature (4361)..(4361): n is a, c, g, or t
  misc_feature (4364)..(4364): n is a, c, g, or t
cccttgcctactgctcatgggtgtggagactgatattctggaagactgataggcagatttactattaacaaacacatagtctgtggcccagcaaagccaccccaatccctgcacaagggtaaaaggccagcattagagcactgcagcagcaatgacggagggcacgtgtctgcggcgccgagggggcccctacaagaccgagcccgccaccgacctcggccgctggcgactcaactgcgagaggggccggcagacgtggacctacctgcaggacgagcgcgccggccgcgagcagaccggcctggaagcctacgccctggggctggacaccaagaattactttaaggacttgcccaaagcccacaccgcctttgagggggctctgaacgggatgacattttacgtggggctgcaggctgaggatgggcactggacgggtgattatggtggcccacttttcctcctgccaggcctcctgatcacttgccacgtggcacgcatccctctgccagccggatacagagaagagattgtgcggtacctgcggtcagtgcagctccctgacggtggctggggcctgcacattgaggataagtccaccgtgtttgggactgcgctcaactatgtgtctctcagaattctgggtgttgggcctgacgatcctgacctggtacgagcccggaacattcttcacaagaaaggtggtgctgtggccatcccctcctgggggaagttctggctggctgtcctgaatgtttacagctgggaaggcctcaataccctgttcccagagatgtggctgtttcctgactgggcaccggcacacccctccacactctggtgccactgccggcaggtgtacctgcccatgagctactgctacgccgttcggctgagtgccgcggaagacccgctggtccagagcctccgccaggagctctatgtggaggacttcgccagcattgactggctggcgcagaggaacaacgtggcccccgacgagctgtacacgccgcacagctggctgctccgcgtggtatatgcgctcctcaacctgtatgagcaccaccacagtgcccacctgcggcagcgggccgtgcagaagctgtatgaacacattgtggccgacgaccgattcaccaagagcatcagcatcggcccgatctcgaaaaccatcaacatgcttgtgcgctggtatgtggacgggcccgcctccactgccttccaggagcatgtctccagaatcccggactatctctggatgggccttgacggcatgaaaatgcagggcaccaacggctcacagatctgggacaccgcattcgccatccaggctctgcttgaggcgggcgggcaccacaggcccgagttttcgtcctgcctgcagaaggctcatgagttcctgaggctctcacaggtcccagataaccctcccgactaccagaagtactaccgccagatgcgcaagggtggcttctccttcagtacgctggactgcggctggatcgtttctgactgcacggctgaggccttgaaggctgtgctgctcctgcaggagaagtgtccccatgtcaccgagcacatccccagagaacggctctgcgatgctgtggctgtgctgctgaacatgagaaatccagatggagggttcgccacctatgagaccaagcgtggggggcacttgctggagctgctgaacccctcggaggtcttcggggacatcatgattgactacacctatgtggagtgcacctcagccgtgatgcaggcgcttaagtatttccacaagcgtttcccggagcacagggcagcggagatccgggagaccctcacgcagggcttagagttctgtcggcggcagcagagggccgatggctcctgggaaggctcctggggagtttgcttcacctacggcacctggtttggcctggaggccttcgcctgtatggggcagacctaccgagatgggactgcctgtgcagaggtctcccgggcctgtgacttcctgctgtcccggcagatggcagacggaggctggggggaggactttgagtcctgcgaggagcggcgttatgtgcagagtgcccagtcccagatccataacacatgctgggccatgatggggctgatggccgttcggcatcctgacatcgaggcccaggagagaggagtccggtgtctacttgagaaacagctccccaatggcgactggccgcaggaaaacattgctggggtcttcaacaagtcctgtgccatctcctacacgagctacaggaacatcttccccatctgggccctcggccgcttctcccagctgtaccctgagagagcccttgctggccacccctgagaacatgcctacctgctgggtgccgtctgtgcgttccagtgaggccaaggggtcctggccgggttggggagccctcccataaccctgtcttgggctccaacccctcaacctctatctcatagatgtgaatctgggggccaggctggaggcagggatggggacagggtgggtggcttagactcttgatttttactgtaggttcatttctgaaagtagcttgtcgggcttgggtgaggaagggggcacaggagccgtgacccctgaggaggcacagcgccttctgccacctctgggcacggcctcaaggtagtgaggctaggaggttttttctgaccaatagctgagttcttgggagaggagcagctgtgcctgtgtgattccttagtgtcgagtgggctctgggctggggtcggccctgggcaggcttctcctgcaccttttgtctgctgggctgagggacacgagggcaaccctgtgacaatggcaggtagtgtgcatccgtgaatagcccagtgcgggggttgctcatggagcatcctgaggccgtgcagcagggagccccatgcccctgggtcgtgagcttgcctgcgtatggggtggtgtcatggagcctcatgcccctgggtcgtgagctcgcctgagtatggggtggtgtcatggagccgcatacccctgggttgtgagctcgcctgcatatgcagggtctgtcatggaacatcccaagtctgtgcagcagggagccccatgcccctgggacatgaacccacctgcgtggaatgctgtttgtgaggtgtctacagggtttatagtagtcttgtggacacagaaatgcacaggggacacttacggacacagaaatgcacaggggaggccgagcataaccaggggtgaggggcaggcagcagttgtagttactgccgcggggcactgctatgtgcagggacagccagcgcccagcccatcaccactccctgggctggctggcaggtatggcaccctgggagcccggcatatacccagggcacccctacggctgccgccagtctcatgcccaggtgggtgctctgggctggagcgagggccaggttttgggccgaggcttccccaggcaatcctgtgagctcccttctagcctctgacccagtctggtctggcttgcatggatgtagggcttggggtgggaagttcaggtcctggctttgcctttgcctgatgtggatgagcagctcacatgctcagggccacctgagactgtcactgctctcccctggctactgggaggagtcactgagagcttcgttacccctgctgccttgcccagggcacaccctatacctccttatctgctcttcccctccctgccgccttctgggcaggtagcagtccctggcctctccccctggctgatcactctccctcaggcagtggagatctgcgtctggacaccctcagatcctgtcattgcctgcccagagtccttcaggggcacccctctgccttggtgtgcggtccagggctctcacccaggtgccgcaccctctggggtcttctgtccagctcccttgccccatgtgctgtcactgactctccttgggactcgcctgcctgctcagagccctgcagggcttggtcagctgcctgttcagtgtcaacacttccctgcacatcttaaaactgggctttattttcgctgaaggaactgtgttgggacccttgacatctgtcaggtttgcacatgctgtttttttttctcagcccacgtgttctcccccacgtggggtagcagcaggacagacagtgaatcacagagtctgccctgagcagaggctgctgtccctgggactcctagccatggtcagactgtacaaaacggttttccagaaatgaaatgtaaatccatttttatactgaaaatgttactgaaagtcacttttatgagcatctgccttaataaacagacattgattcccttataaaaaaaanaacanaaannacnacanncacacacacnacnacacaccaccaccacacaacaacacaga

SEQ ID NO: 381821 - DNA, 4279 bp, Homo sapiens
cccttgcctactgctcatgggtgtggagactgatattctggaagactgataggcagatttactattaacaaacacatagtctgtggcccagcaaagccaccccaatccctgcacaagggtaaaaggccagcattagagcactgcagcagcaatgacggagggcacgtgtctgcggcgccgagggggcccctacaagaccgagcccgccaccgacctcggccgctggcgactcaactgcgagaggggccggcagacgtggacctacctgcaggacgagcgcgccggccgcgagcagaccggcctggaagcctacgccctggggctggacaccaagaattactttaaggacttgcccaaagcccacaccgcctttgagggggctctgaacgggatgacattttacgtggggctgcaggctgaggatgggcactggacgggtgattatggtggcccacttttcctcctgccaggcctcctgatcacttgccacgtggcacgcatccctctgccagccggatacagagaagagattgtgcggtacctgcggtcagtgcagctccctgacggtggctggggcctgcacattgaggataagtccaccgtgtttgggactgcgctcaactatgtgtctctcagaattctgggtgttgggcctgacgatcctgacctggtacgagcccggaacattcttcacaagaaaggtggtgctgtggccatcccctcctgggggaagttctggctggctgtcctgaatgtttacagctgggaaggcctcaataccctgttcccagagatgtggctgtttcctgactgggcaccggcacacccctccacactctggtgccactgccggcaggtgtacctgcccatgagctactgctacgccgttcggctgagtgccgcggaagacccgctggtccagagcctccgccaggagctctatgtggaggacttcgccagcattgactggctggcgcagaggaacaacgtggcccccgacgagctgtacacgccgcacagctggctgctccgcgtggtatatgcgctcctcaacctgtatgagcaccaccacagtgcccacctgcggcagcgggccgtgcagaagctgtatgaacacattgtggccgacgaccgattcaccaagagcatcagcatcggcccgatctcgaaaaccatcaacatgcttgtgcgctggtatgtggacgggcccgcctccactgccttccaggagcatgtctccagaatcccggactatctctggatgggccttgacggcatgaaaatgcagggcaccaacggctcacagatctgggacaccgcattcgccatccaggctctgcttgaggcgggcgggcaccacaggcccgagttttcgtcctgcctgcagaaggctcatgagttcctgaggctctcacaggtcccagataaccctcccgactaccagaagtactaccgccagatgcgcaagggtggcttctccttcagtacgctggactgcggctggatcgtttctgactgcacggctgaggccttgaaggctgtgctgctcctgcaggagaagtgtccccatgtcaccgagcacatccccagagaacggctctgcgatgctgtggctgtgctgctgaacatgagaaatccagatggagggttcgccacctatgagaccaagcgtggggggcacttgctggagctgctgaacccctcggaggtcttcggggacatcatgattgactacacctatgtggagtgcacctcagccgtgatgcaggcgcttaagtatttccacaagcgtttcccggagcacagggcagcggagatccgggagaccctcacgcagggcttagagttctgtcggcggcagcagagggccgatggctcctgggaaggctcctggggagtttgcttcacctacggcacctggtttggcctggaggccttcgcctgtatggggcagacctaccgagatgggactgcctgtgcagaggtctcccgggcctgtgacttcctgctgtcccggcagatggcagacggaggctggggggaggactttgagtcctgcgaggagcggcgttatgtgcagagtgcccagtcccagatccataacacatgctgggccatgatggggctgatggccgttcggcatcctgacatcgaggcccaggagagaggagtccggtgtctacttgagaaacagctccccaatggcgactggccgcaggaaaacattgctggggtcttcaacaagtcctgtgccatctcctacacgagctacaggaacatcttccccatctgggccctcggccgcttctcccagctgtaccctgagagagcccttgctggccacccctgagaacatgcctacctgctgggtgccgtctgtgcgttccagtgaggccaaggggtcctggccgggttggggagccctcccataaccctgtcttgggctccaacccctcaacctctatctcatagatgtgaatctgggggccaggctggaggcagggatggggacagggtgggtggcttagactcttgatttttactgtaggttcatttctgaaagtagcttgtcgggcttgggtgaggaagggggcacaggagccgtgacccctgaggaggcacagcgccttctgccacctctgggcacggcctcaaggtagtgaggctaggaggttttttctgaccaatagctgagttcttgggagaggagcagctgtgcctgtgtgattccttagtgtcgagtgggctctgggctggggtcggccctgggcaggcttctcctgcaccttttgtctgctgggctgagggacacgagggcaaccctgtgacaatggcaggtagtgtgcatccgtgaatagcccagtgcgggggttgctcatggagcatcctgaggccgtgcagcagggagccccatgcccctgggtcgtgagcttgcctgcgtatggggtggtgtcatggagcctcatgcccctgggtcgtgagctcgcctgagtatggggtggtgtcatggagccgcatacccctgggttgtgagctcgcctgcatatgcagggtctgtcatggaacatcccaagtctgtgcagcagggagccccatgcccctgggacatgaacccacctgcgtggaatgctgtttgtgaggtgtctacagggtttatagtagtcttgtggacacagaaatgcacaggggacacttacggacacagaaatgcacaggggaggccgagcataaccaggggtgaggggcaggcagcagttgtagttactgccgcggggcactgctatgtgcagggacagccagcgcccagcccatcaccactccctgggctggctggcaggtatggcaccctgggagcccggcatatacccagggcacccctacggctgccgccagtctcatgcccaggtgggtgctctgggctggagcgagggccaggttttgggccgaggcttccccaggcaatcctgtgagctcccttctagcctctgacccagtctggtctggcttgcatggatgtagggcttggggtgggaagttcaggtcctggctttgcctttgcctgatgtggatgagcagctcacatgctcagggccacctgagactgtcactgctctcccctggctactgggaggagtcactgagagcttcgttacccctgctgccttgcccagggcacaccctatacctccttatctgctcttcccctccctgccgccttctgggcaggtagcagtccctggcctctccccctggctgatcactctccctcaggcagtggagatctgcgtctggacaccctcagatcctgtcattgcctgcccagagtccttcaggggcaccccctctggggtcttctgtccagctcccttgccccatgtgctgtcactgactctccttgggactcgcctgcctgctcagagccctgcagggcttggtcagctgcctgttcagtgtcaacacttccctgcacatcttaaaactgggctttattttcgctgaaggaactgtgttgggacccttgacatctgtcaggtttgcacatgctgtttttttttctcagcccacgtgttctcccccacgtggggtagcagcaggacagacagtgaatcacagagtctgccctgagcagaggctgctgtccctgggactcctagccatggtcagactgtacaaaacggttttccagaaatgaaatgtaaatccatttttatactgaaaatgttactgaaagtcacttttatgagcatctgccttaataaacagacattgattcccttat

SEQ ID NO: 381822 - DNA, 3865 bp, Homo sapiens
  misc_feature (3788)..(3788): n is a, c, g, or t
  misc_feature (3791)..(3791): n is a, c, g, or t
  misc_feature (3793)..(3793): n is a, c, g, or t
  misc_feature (3800)..(3801): n is a, c, g, or t
  misc_feature (3806)..(3806): n is a, c, g, or t
  misc_feature (3809)..(3809): n is a, c, g, or t
  misc_feature (3812)..(3812): n is a, c, g, or t
  misc_feature (3815)..(3815): n is a, c, g, or t
  misc_feature (3819)..(3819): n is a, c, g, or t
  misc_feature (3834)..(3834): n is a, c, g, or t
cccttgcctactgctcatgggtgtggagactgatattctggaagactgataggcagatttactattaacaaacacatagtctgtggcccagcaaagccaccccaatccctgcacaagggtaaaaggccagcattagagcactgcagcagcaatgacggagggcacgtgtctgcggcgccgagggggcccctacaagaccgagcccgccaccgacctcggccgctggcgactcaactgcgagaggggccggcagacgtggacctacctgcaggacgagcgcgccggccgcgagcagaccggcctggaagcctacgccctggggctggacaccaagaattactttaaggacttgcccaaagcccacaccgcctttgagggggctctgaacgggatgacattttacgtggggctgcaggctgaggatgggcactggacgggtgattatggtggcccacttttcctcctgccaggcctcctgatcacttgccacgtggcacgcatccctctgccagccggatacagagaagagattgtgcggtacctgcggtcagtgcagctccctgacggtggctggggcctgcacattgaggataagtccaccgtgtttgggactgcgctcaactatgtgtctctcagaattctgggtgttgggcctgacgatcctgacctggtacgagcccggaacattcttcacaagaaaggtggtgctgtggccatcccctcctgggggaagttctggctggctgtcctgaatgtttacagctgggaaggcctcaataccctgttcccagagatgtggctgtttcctgactgggcaccggcacacccctccacactctggtgccactgccggcaggtgtacctgcccatgagctactgctacgccgttcggctgagtgccgcggaagacccgctggtccagagcctccgccaggagctctatgtggaggacttcgccagcattgactggctggcgcagaggaacaacgtggcccccgacgagctgtacacgccgcacagctggctgctccgcgtggtatatgcgctcctcaacctgtatgagcaccaccacagtgcccacctgcggcagcgggccgtgcagaagctgtatgaacacattgtggccgacgaccgattcaccaagagcatcagcatcggcccgatctcgaaaaccatcaacatgcttgtgcgctggtatgtggacgggcccgcctccactgccttccaggagcatgtctccagaatcccggactatctctggatgggccttgacggcatgaaaatgcagggcaccaacggctcacagatctgggacaccgcattcgccatccaggctctgcttgaggcgggcgggcaccacaggcccgagttttcgtcctgcctgcagaaggctcatgagttcctgaggctctcacaggtcccagataaccctcccgactaccagaagtactaccgccagatgcgcaagggtggcttctccttcagtacgctggactgcggctggatcgtttctgactgcacggctgaggccttgaaggctgtgctgctcctgcaggagaagtgtccccatgtcaccgagcacatccccagagaacggctctgcgatgctgtggctgtgctgctgaacatgagaaatccagatggagggttcgccacctatgagaccaagcgtggggggcacttgctggagctgctgaacccctcggaggtcttcggggacatcatgattgactacacctatgtggagtgcacctcagccgtgatgcaggcgcttaagtatttccacaagcgtttcccggagcacagggcagcggagatccgggagaccctcacgcagggcttagagttctgtcggcggcagcagagggccgatggctcctgggaaggctcctggggagtttgcttcacctacggcacctggtttggcctggaggccttcgcctgtatggggcagacctaccgagatgggactgcctgtgcagaggtctcccgggcctgtgacttcctgctgtcccggcagatggcagacggaggctggggggaggactttgagtcctgcgaggagcggcgttatgtgcagagtgcccagtcccagatccataacacatgctgggccatgatggggctgatggccgttcggcatcctgacatcgaggcccaggagagaggagtccggtgtctacttgagaaacagctccccaatggcgactggccgcaggaaaacattgctggggtcttcaacaagtcctgtgccatctcctacacgagctacaggaacatcttccccatctgggccctcggccgcttctcccagctgtaccctgagagagcccttgctggccacccctgagaacatgcctacctgctgggtgccgtctgtgcgttccagtgaggccaaggggtcctggccgggttggggagccctcccataaccctgtcttgggctccaacccctcaacctctatctcatagatgtgaatctgggggccaggctggaggcagggatggggacagggtgggtggcttagactcttgatttttactgtaggttcatttctgaaagtagcttgtcgggcttgggtgaggaagggggcacaggagccgtgacccctgaggaggcacagcgccttctgccacctctgggcacggcctcaaggtagtgaggctaggaggttttttctgaccaatagctgagttcttgggagaggagcagctgtgcctgtgtgattccttagtgtcgagtgggctctgggctggggtcggccctgggcaggcttctcctgcaccttttgtctgctgggctgagggacacgagggcaaccctgtgacaatggcaggtagtgtgcatccgtgaatagcccagtgcgggggttgctcatggagcatcctgaggccgtgcagcagggagccccatgcccctgggtcgtgagcttgcctgcgtatggggtggtgtcatggagcctcatgcccctgggtcgtgagctcgcctgagtatggggtggtgtcatggagccgcatacccctgggttgtgagctcgcctgcatatgcagggtctgtcatggaacatcccaagtctgtgcagcagggagccccatgcccctgggacatgaacccacctgcgtggaatgctgtttgtgaggtgtctacagggtttatagtagtcttgtggacacagaaatgcacaggggacacttacggacacagaaatgcacaggggaggccgagcataaccaggggtgaggggcaggcagcagttgtagttactgccgcggggcactgctatgtgcagggacagccagcgcccagcccatcaccactccctgggctggctggcaggtatggcaccctgggagcccggcatatacccagggcacccctacggctgccgccagtctcatgcccaggtgggtgctctgggctggagcgagggccaggttttgggccgaggcttccccaggcaatcctgtgagctcccttctagcctctgacccagtctggtctggcttgcatggatgtagggcttggggtgggaagttcaggtcctggctttgcctttgcctgatgtggatgagcagctcacatgctcagggccacctgagactgtcactgctctcccctggctactgggaggagtcactgagagcttcgttacccctgctgccttgcccagggcacaccctatacctccttatctgctcttcccctccctgccgccttctgggcaggtagcagtccctggcctctccccctggctgatcactctccctcaggcagtggagattggttngcncntcatctnnttgcngcnagnctngggnccctgcttggtggcnggctctccgggggccttggttttgcggccgg

SEQ ID NO: 381823 - DNA, 4205 bp, Homo sapiens
ggcagtgggcggcgtagagcactgcagcagcaatgacggagggcacgtgtctgcggcgccgagggggcccctacaagaccgagcccgccaccgacctcggccgctggcgactcaactgcgagaggggccggcagacgtggacctacctgcaggacgagcgcgccggccgcgagcagaccggcctggaagcctacgccctggggctggacaccaagaattactttaaggacttgcccaaagcccacaccgcctttgagggggctctgaacgggatgacattttacgtggggctgcaggctgaggatgggcactggacgggtgattatggtggcccacttttcctcctgccaggcctcctgatcacttgccacgtggcacgcatccctctgccagccggatacagagaagagattgtgcggtacctgcggtcagtgcagctccctgacggtggctggggcctgcacattgaggataagtccaccgtgtttgggactgcgctcaactatgtgtctctcagaattctgggtgttgggcctgacgatcctgacctggtacgagcccggaacattcttcacaagaaaggtggtgctgtggccatcccctcctgggggaagttctggctggctgtcctgaatgtttacagctgggaaggcctcaataccctgttcccagagatgtggctgtttcctgactgggcaccggcacacccctccacactctggtgccactgccggcaggtgtacctgcccatgagctactgctacgccgttcggctgagtgccgcggaagacccgctggtccagagcctccgccaggagctctatgtggaggacttcgccagcattgactggctggcgcagaggaacaacgtggcccccgacgagctgtacacgccgcacagctggctgctccgcgtggtatatgcgctcctcaacctgtatgagcaccaccacagtgcccacctgcggcagcgggccgtgcagaagctgtatgaacacattgtggccgacgaccgattcaccaagagcatcagcatcggcccgatctcgaaaaccatcaacatgcttgtgcgctggtatgtggacgggcccgcctccactgccttccaggagcatgtctccagaatcccggactatctctggatgggccttgacggcatgaaaatgcagggcaccaacggctcacagatctgggacaccgcattcgccatccaggctctgcttgaggcgggcgggcaccacaggcccgagttttcgtcctgcctgcagaaggctcatgagttcctgaggctctcacaggtcccagataaccctcccgactaccagaagtactaccgccagatgcgcaagggtggcttctccttcagtacgctggactgcggctggatcgtttctgactgcacggctgaggccttgaaggctgtgctgctcctgcaggagaagtgtccccatgtcaccgagcacatccccagagaacggctctgcgatgctgtggctgtgctgctgaacatgagaaatccagatggagggttcgccacctatgagaccaagcgtggggggcacttgctggagctgctgaacccctcggaggtcttcggggacatcatgattgactacacctatgtggagtgcacctcagccgtgatgcaggcgcttaagtatttccacaagcgtttcccggagcacagggcagcggagatccgggagaccctcacgcagggcttagagttctgtcggcggcagcagagggccgatggctcctgggaaggctcctggggagtttgcttcacctacggcacctggtttggcctggaggccttcgcctgtatggggcagacctaccgagatgggactgcctgtgcagaggtctcccgggcctgtgacttcctgctgtcccggcagatggcagacggaggctggggggaggactttgagtcctgcgaggagcggcgttatgtgcagagtgcccagtcccagatccataacacatgctgggccatgatggggctgatggccgttcggcatcctgacatcgaggcccaggagagaggagtccggtgtctacttgagaaacagctccccaatggcgactggccgcaggaaaacattgctggggtcttcaacaagtcctgtgccatctcctacacgagctacaggaacatcttccccatctgggccctcggccgcttctcccagctgtaccctgagagagcccttgctggccacccctgagaacatgcctacctgctgggtgccgtctgtgcgttccagtgaggccaaggggtcctggccgggttggggagccctcccataaccctgtcttgggctccaacccctcaacctctatctcatagatgtgaatctgggggccaggctggaggcagggatggggacagggtgggtggcttagactcttgatttttactgtaggttcatttctgaaagtagcttgtcgggcttgggtgaggaagggggcacaggagccgtgacccctgaggaggcacagcgccttctgccacctctgggcacggcctcaaggtagtgaggctaggaggttttttctgaccaatagctgagttcttgggagaggagcagctgtgcctgtgtgattccttagtgtcgagtgggctctgggctggggtcggccctgggcaggcttctcctgcaccttttgtctgctgggctgagggacacgagggcaaccctgtgacaatggcaggtagtgtgcatccgtgaatagcccagtgcgggggttgctcatggagcatcctgaggccgtgcagcagggagccccatgcccctgggtcgtgagcttgcctgcgtatggggtggtgtcatggagcctcatgcccctgggtcgtgagctcgcctgagtatggggtggtgtcatggagccgcatacccctgggttgtgagctcgcctgcatatgcagggtctgtcatggaacatcccaagtctgtgcagcagggagccccatgcccctgggacatgaacccacctgcgtggaatgctgtttgtgaggtgtctacagggtttatagtagtcttgtggacacagaaatgcacaggggacacttacggacacagaaatgcacaggggaggccgagcataaccaggggtgaggggcaggcagcagttgtagttactgccgcggggcactgctatgtgcagggacagccagcgcccagcccatcaccactccctgggctggctggcaggtatggcaccctgggagcccggcatatacccagggcacccctacggctgccgccagtctcatgcccaggtgggtgctctgggctggagcgagggccaggttttgggccgaggcttccccaggcaatcctgtgagctcccttctagcctctgacccagtctggtctggcttgcatggatgtagggcttggggtgggaagttcaggtcctggctttgcctttgcctgatgtggatgagcagctcacatgctcagggccacctgagactgtcactgctctcccctggctactgggaggagtcactgagagcttcgttacccctgctgccttgcccagggcacaccctatacctccttatctgctcttcccctccctgccgccttctgggcaggtagcagtccctggcctctccccctggctgatcactctccctcaggcagtggagatctgcgtctggacaccctcagatcctgtcattgcctgcccagagtccttcaggggcacccctctgccttggtgtgcggtccagggctctcacccaggtgccgcaccctctggggtcttctgtccagctcccttgccccatgtgctgtcactgactctccttgggactcgcctgcctgctcagagccctgcagggcttggtcagctgcctgttcagtgtcaacacttccctgcacatcttaaaactgggctttattttcgctgaaggaactgtgttgggacccttgacatctgtcaggtttgcacatgctgtttttttttctcagcccacgtgttctcccccacgtggggtagcagcaggacagacagtgaatcacagagtctgccctgagcagaggctgctgtccctgggactcctagccatggtcagactgtacaaaacggttttccagaaatgaaatgtaaatccatttttatactgaaaatgttactgaaagtcacttttatgagcatctgccttaataaacagacattgattcccttat

SEQ ID NO: 381824 - DNA, 3764 bp, Homo sapiens
gcaagatccacatgaggctgcccttgcctcatggagaggggcacacgtgactcccagagggtgaagcttcccagctagaggcagtgcagactttgctgacaggaagcagatgaacgtgggcctattactctcccccctcaggtggtgctgtggccatcccctcctgggggaagttctggctggctgtcctgaatgtttacagctgggaaggcctcaataccctgttcccagagatgtggctgtttcctgactgggcaccggcacacccctccacactctggtgccactgccggcaggtgtacctgcccatgagctactgctacgccgttcggctgagtgccgcggaagacccgctggtccagagcctccgccaggagctctatgtggaggacttcgccagcattgactggctggcgcagaggaacaacgtggcccccgacgagctgtacacgccgcacagctggctgctccgcgtggtatatgcgctcctcaacctgtatgagcaccaccacagtgcccacctgcggcagcgggccgtgcagaagctgtatgaacacattgtggccgacgaccgattcaccaagagcatcagcatcggcccgatctcgaaaaccatcaacatgcttgtgcgctggtatgtggacgggcccgcctccactgccttccaggagcatgtctccagaatcccggactatctctggatgggccttgacggcatgaaaatgcagggcaccaacggctcacagatctgggacaccgcattcgccatccaggctctgcttgaggcgggcgggcaccacaggcccgagttttcgtcctgcctgcagaaggctcatgagttcctgaggctctcacaggtcccagataaccctcccgactaccagaagtactaccgccagatgcgcaagggtggcttctccttcagtacgctggactgcggctggatcgtttctgactgcacggctgaggccttgaaggctgtgctgctcctgcaggagaagtgtccccatgtcaccgagcacatccccagagaacggctctgcgatgctgtggctgtgctgctgaacatgagaaatccagatggagggttcgccacctatgagaccaagcgtggggggcacttgctggagctgctgaacccctcggaggtcttcggggacatcatgattgactacacctatgtggagtgcacctcagccgtgatgcaggcgcttaagtatttccacaagcgtttcccggagcacagggcagcggagatccgggagaccctcacgcagggcttagagttctgtcggcggcagcagagggccgatggctcctgggaaggctcctggggagtttgcttcacctacggcacctggtttggcctggaggccttcgcctgtatggggcagacctaccgagatgggactgcctgtgcagaggtctcccgggcctgtgacttcctgctgtcccggcagatggcagacggaggctggggggaggactttgagtcctgcgaggagcggcgttatgtgcagagtgcccagtcccagatccataacacatgctgggccatgatggggctgatggccgttcggcatcctgacatcgaggcccaggagagaggagtccggtgtctacttgagaaacagctccccaatggcgactggccgcaggaaaacattgctggggtcttcaacaagtcctgtgccatctcctacacgagctacaggaacatcttccccatctgggccctcggccgcttctcccagctgtaccctgagagagcccttgctggccacccctgagaacatgcctacctgctgggtgccgtctgtgcgttccagtgaggccaaggggtcctggccgggttggggagccctcccataaccctgtcttgggctccaacccctcaacctctatctcatagatgtgaatctgggggccaggctggaggcagggatggggacagggtgggtggcttagactcttgatttttactgtaggttcatttctgaaagtagcttgtcgggcttgggtgaggaagggggcacaggagccgtgacccctgaggaggcacagcgccttctgccacctctgggcacggcctcaaggtagtgaggctaggaggttttttctgaccaatagctgagttcttgggagaggagcagctgtgcctgtgtgattccttagtgtcgagtgggctctgggctggggtcggccctgggcaggcttctcctgcaccttttgtctgctgggctgagggacacgagggcaaccctgtgacaatggcaggtagtgtgcatccgtgaatagcccagtgcgggggttgctcatggagcatcctgaggccgtgcagcagggagccccatgcccctgggtcgtgagcttgcctgcgtatggggtggtgtcatggagcctcatgcccctgggtcgtgagctcgcctgagtatggggtggtgtcatggagccgcatacccctgggttgtgagctcgcctgcatatgcagggtctgtcatggaacatcccaagtctgtgcagcagggagccccatgcccctgggacatgaacccacctgcgtggaatgctgtttgtgaggtgtctacagggtttatagtagtcttgtggacacagaaatgcacaggggacacttacggacacagaaatgcacaggggaggccgagcataaccaggggtgaggggcaggcagcagttgtagttactgccgcggggcactgctatgtgcagggacagccagcgcccagcccatcaccactccctgggctggctggcaggtatggcaccctgggagcccggcatatacccagggcacccctacggctgccgccagtctcatgcccaggtgggtgctctgggctggagcgagggccaggttttgggccgaggcttccccaggcaatcctgtgagctcccttctagcctctgacccagtctggtctggcttgcatggatgtagggcttggggtgggaagttcaggtcctggctttgcctttgcctgatgtggatgagcagctcacatgctcagggccacctgagactgtcactgctctcccctggctactgggaggagtcactgagagcttcgttacccctgctgccttgcccagggcacaccctatacctccttatctgctcttcccctccctgccgccttctgggcaggtagcagtccctggcctctccccctggctgatcactctccctcaggcagtggagatctgcgtctggacaccctcagatcctgtcattgcctgcccagagtccttcaggggcacccctctgccttggtgtgcggtccagggctctcacccaggtgccgcaccctctggggtcttctgtccagctcccttgccccatgtgctgtcactgactctccttgggactcgcctgcctgctcagagccctgcagggcttggtcagctgcctgttcagtgtcaacacttccctgcacatcttaaaactgggctttattttcgctgaaggaactgtgttgggacccttgacatctgtcaggtttgcacatgctgtttttttttctcagcccacgtgttctcccccacgtggggtagcagcaggacagacagtgaatcacagagtctgccctgagcagaggctgctgtccctgggactcctagccatggtcagactgtacaaaacggttttccagaaatgaaatgtaaatccatttttatactgaaaatgttactgaaagtcacttttatgagcatctgccttaataaacagacattgattcccttat

SEQ ID NO: 381825 - DNA, 4296 bp, Homo sapiens
cccttgcctactgctcatgggtgtggagactgatattctggaagactgataggcagatttactattaacaaacacatagtctgtggcccagcaaagccaccccaatccctgcacaagggtaaaaggccagcattagagcactgcagcagcaatgacggagggcacgtgtctgcggcgccgagggggcccctacaagaccgagcccgccaccgacctcggccgctggcgactcaactgcgagaggggccggcagacgtggacctacctgcaggacgagcgcgccggccgcgagcagaccggcctggaagcctacgccctggggctggacaccaagaattactttaaggacttgcccaaagcccacaccgcctttgagggggctctgaacgggatgacattttacgtggggctgcaggctgaggatgggcactggacgggtgattatggtggcccacttttcctcctgccaggcctcctgatcacttgccacgtggcacgcatccctctgccagccggatacagagaagagattgtgcggtacctgcggtcagtgcagctccctgacggtggctggggcctgcacattgaggataagtccaccgtgtttgggactgcgctcaactatgtgtctctcagaattctgggtgttgggcctgacgatcctgacctggtacgagcccggaacattcttcacaagaaaggtggtgctgtggccatcccctcctgggggaagttctggctggctgtcctgaatgtttacagctgggaaggcctcaataccctgttcccagagatgtggctgtttcctgactgggcaccggcacacccctccacactctggtgccactgccggcaggtgtacctgcccatgagctactgctacgccgttcggctgagtgccgcggaagacccgctggtccagagcctccgccaggagctctatgtggaggacttcgccagcattgactggctggcgcagaggaacaacgtggcccccgacgagctgtacacgccgcacagctggctgctccgcgtggtatatgcgctcctcaacctgtatgagcaccaccacagtgcccacctgcggcagcgggccgtgcagaagctgtatgaacacattgtggccgacgaccgattcaccaagagcatcagcatcggcccgatctcgaaaaccatcaacatgcttgtgcgctggtatgtggacgggcccgcctccactgccttccaggagcatgtctccagaatcccggactatctctggatgggccttgacggcatgaaaatgcagggcaccaacggctcacagatctgggacaccgcattcgccatccaggctctgcttgaggcgggcgggcaccacaggcccgagttttcgtcctgcctgcagaaggctcatgagttcctgaggctctcacaggtcccagataaccctcccgactaccagaagtactaccgccagatgcgcaagggtggcttctccttcagtacgctggactgcggctggatcgtttctgactgcacggctgaggccttgaaggctgtgctgctcctgcaggagaagtgtccccatgtcaccgagcacatccccagagaacggctctgcgatgctgtggctgtgctgctgaacatgagaaatccagatggagggttcgccacctatgagaccaagcgtggggggcacttgctggagctgctgaacccctcggaggtcttcggggacatcatgattgactacacctatgtggagtgcacctcagccgtgatgcaggcgcttaagtatttccacaagcgtttcccggagcacagggcagcggagatccgggagaccctcacgcagggcttagagttctgtcggcggcagcagagggccgatggctcctgggaaggctcctggggagtttgcttcacctacggcacctggtttggcctggaggccttcgcctgtatggggcagacctaccgagatgggactgcctgtgcagaggtctcccgggcctgtgacttcctgctgtcccggcagatggcagacggaggctggggggaggactttgagtcctgcgaggagcggcgttatgtgcagagtgcccagtcccagatccataacacatgctgggccatgatggggctgatggccgttcggcatcctgacatcgaggcccaggagagaggagtccggtgtctacttgagaaacagctccccaatggcgactggccgcaggaaaacattgctggggtcttcaacaagtcctgtgccatctcctacacgagctacaggaacatcttccccatctgggccctcggccgcttctcccagctgtaccctgagagagcccttgctggccacccctgagaacatgcctacctgctgggtgccgtctgtgcgttccagtgaggccaaggggtcctggccgggttggggagccctcccataaccctgtcttgggctccaacccctcaacctctatctcatagatgtgaatctgggggccaggctggaggcagggatggggacagggtgggtggcttagactcttgatttttactgtaggttcatttctgaaagtagcttgtcgggcttgggtgaggaagggggcacaggagccgtgacccctgaggaggcacagcgccttctgccacctctgggcacggcctcaaggtagtgaggctaggaggttttttctgaccaatagctgagttcttgggagaggagcagctgtgcctgtgtgattccttagtgtcgagtgggctctgggctggggtcggccctgggcaggcttctcctgcaccttttgtctgctgggctgagggacacgagggcaaccctgtgacaatggcaggtagtgtgcatccgtgaatagcccagtgcgggggttgctcatggagcatcctgaggccgtgcagcagggagccccatgcccctgggtcgtgagcttgcctgcgtatggggtggtgtcatggagcctcatgcccctgggtcgtgagctcgcctgagtatggggtggtgtcatggagccgcatacccctgggttgtgagctcgcctgcatatgcagggtctgtcatggaacatcccaagtctgtgcagcagggagccccatgcccctgggacatgaacccacctgcgtggaatgctgtttgtgaggtgtctacagggtttatagtagtcttgtggacaacagaaatgcacaggggaggccgagcataaccaggggtgaggggcaggcagcagttgtagttactgccgcggggcactgctatgtgcagggacagccagcgcccagcccatcaccactccctgggctggctggcaggtatggcaccctgggagcccggcatatacccagggcacccctacggctgccgccagtctcatgcccaggtgggtgctctgggctggagcgagggccaggttttgggccgaggcttccccaggcaatcctgtgagctcccttctagcctctgacccagtctggtctggcttgcatggatgtagggcttggggtgggaagttcaggtcctggctttgcctttgcctgatgtggatgagcagctcacatgctcagggccacctgagactgtcactgctctcccctggctactgggaggagtcactgagagcttcgttacccctgctgccttgcccagggcacaccctatacctccttatctgctcttcccctccctgccgccttctgggcaggtagcagtccctggcctctccccctggctgatcactctccctcaggcagtggagatctgcgtctggacaccctcagatcctgtcattgcctgcccagagtccttcaggggcacccctctgccttggtgtgcggtccagggctctcacccaggtgccgcaccctctggggtcttctgtccagctcccttgccccatgtgctgtcactgactctccttgggactcgcctgcctgctcagagccctgcagggcttggtcagctgcctgttcagtgtcaacacttccctgcacatcttaaaactgggctttattttcgctgaaggaactgtgttgggacccttgacatctgtcaggtttgcacatgctgtttttttttctcagcccacgtgttctcccccacgtggggtagcagcaggacagacagtgaatcacagagtctgccctgagcagaggctgctgtccctgggactcctagccatggtcagactgtacaaaacggttttccagaaatgaaatgtaaatccatttttatactgaaaatgttactgaaagtcacttttatgagcatctgccttaataaacagacattgattcccttat

SEQ ID NO: 381826 - DNA, 2724 bp, Homo sapiens
tcccgtctgtgctgccctattaggtttgtggccatttggggaatcttcctaaaaccctaaaagctagggcaggtctgcttgagcaggagcagcagggtctgggggacccctgagggcaggacagtcagggacccacagttgagctgggcccgctgagccctggatccttcttggtgtcttatcctggccagcaagcaagtgtgagctcctgtgggtctccagaggcccatgaggaccagtgggccagttgggaacaaggcttggcgtcctcttcaggggggaacaccagggcaggcctgaggaggctgtgtccccagcctgtcattgctgtggctccgcttctcagggagcctaggaagaaggtgtggcaagagcccgaggcgctggctgcacctggcggggcctgtgggcgtcagtttagacccatccattctcactgcagcattccagggtttgcccttatgctcggctgtgtgagggtgaggatgatgctgtgggggcatgcatgctgggtgtgtttcagccttctcttccaccaggcatcctgacatcgaggcccaggagagaggagtccggtgtctacttgagaaacagctccccaatggcgactggccgcaggaaaacattgctggggtcttcaacaagtcctgtgccatctcctacacgagctacaggaacatcttccccatctgggccctcggccgcttctcccagctgtaccctgagagagcccttgctggccacccctgagaacatgcctacctgctgggtgccgtctgtgcgttccagtgaggccaaggggtcctggccgggttggggagccctcccataaccctgtcttgggctccaacccctcaacctctatctcatagatgtgaatctgggggccaggctggaggcagggatggggacagggtgggtggcttagactcttgatttttactgtaggttcatttctgaaagtagcttgtcgggcttgggtgaggaagggggcacaggagccgtgacccctgaggaggcacagcgccttctgccacctctgggcacggcctcaaggtagtgaggctaggaggttttttctgaccaatagctgagttcttgggagaggagcagctgtgcctgtgtgattccttagtgtcgagtgggctctgggctggggtcggccctgggcaggcttctcctgcaccttttgtctgctgggctgagggacacgagggcaaccctgtgacaatggcaggtagtgtgcatccgtgaatagcccagtgcgggggttgctcatggagcatcctgaggccgtgcagcagggagccccatgcccctgggtcgtgagcttgcctgcgtatggggtggtgtcatggagcctcatgcccctgggtcgtgagctcgcctgagtatggggtggtgtcatggagccgcatacccctgggttgtgagctcgcctgcatatgcagggtctgtcatggaacatcccaagtctgtgcagcagggagccccatgcccctgggacatgaacccacctgcgtggaatgctgtttgtgaggtgtctacagggtttatagtagtcttgtggacacagaaatgcacaggggacacttacggacacagaaatgcacaggggaggccgagcataaccaggggtgaggggcaggcagcagttgtagttactgccgcggggcactgctatgtgcagggacagccagcgcccagcccatcaccactccctgggctggctggcaggtatggcaccctgggagcccggcatatacccagggcacccctacggctgccgccagtctcatgcccaggtgggtgctctgggctggagcgagggccaggttttgggccgaggcttccccaggcaatcctgtgagctcccttctagcctctgacccagtctggtctggcttgcatggatgtagggcttggggtgggaagttcaggtcctggctttgcctttgcctgatgtggatgagcagctcacatgctcagggccacctgagactgtcactgctctcccctggctactgggaggagtcactgagagcttcgttacccctgctgccttgcccagggcacaccctatacctccttatctgctcttcccctccctgccgccttctgggcaggtagcagtccctggcctctccccctggctgatcactctccctcaggcagtggagatctgcgtctggacaccctcagatcctgtcattgcctgcccagagtccttcaggggcacccctctgccttggtgtgcggtccagggctctcacccaggtgccgcaccctctggggtcttctgtccagctcccttgccccatgtgctgtcactgactctccttgggactcgcctgcctgctcagagccctgcagggcttggtcagctgcctgttcagtgtcaacacttccctgcacatcttaaaactgggctttattttcgctgaaggaactgtgttgggacccttgacatctgtcaggtttgcacatgctgtttttttttctcagcccacgtgttctcccccacgtggggtagcagcaggacagacagtgaatcacagagtctgccctgagcagaggctgctgtccctgggactcctagccatggtcagactgtacaaaacggttttccagaaatgaaatgtaaatccatttttatactgaaaatgttactgaaagtcacttttatgagcatctgccttaataaacagacattgattcccttat

SEQ ID NO: 381827 - DNA, 2339 bp, Homo sapiens
cccttgcctactgctcatgggtgtggagactgatattctggaagactgataggcagatttactattaacaaacacatagtctgtggcccagcaaagccaccccaatccctgcacaagggtaaaaggccagcattagagcactgcagcagcaatgacggagggcacgtgtctgcggcgccgagggggcccctacaagaccgagcccgccaccgacctcggccgctggcgactcaactgcgagaggggccggcagacgtggacctacctgcaggacgagcgcgccggccgcgagcagaccggcctggaagcctacgccctggggctggacaccaagaattactttaaggacttgcccaaagcccacaccgcctttgagggggctctgaacgggatgacattttacgtggggctgcaggctgaggatgggcactggacgggtgattatggtggcccacttttcctcctgccaggcctcctgatcacttgccacgtggcacgcatccctctgccagccggatacagagaagagattgtgcggtacctgcggtcagtgcagctccctgacggtggctggggcctgcacattgaggataagtccaccgtgtttgggactgcgctcaactatgtgtctctcagaattctgggtgttgggcctgacgatcctgacctggtacgagcccggaacattcttcacaagaaaggtggtgctgtggccatcccctcctgggggaagttctggctggctgtcctgaatgtttacagctgggaaggcctcaataccctgttcccagagatgtggctgtttcctgactgggcaccggcacacccctccacactctggtgccactgccggcaggtgtacctgcccatgagctactgctacgccgttcggctgagtgccgcggaagacccgctggtccagagcctccgccaggagctctatgtggaggacttcgccagcattgactggctggcgcagaggaacaacgtggcccccgacgagctgtacacgccgcacagctggctgctccgcgtggtatatgcgctcctcaacctgtatgagcaccaccacagtgcccacctgcggcagcgggccgtgcagaagctgtatgaacacattgtggccgacgaccgattcaccaagagcatcagcatcggcccgatctcgaaaaccatcaacatgcttgtgcgctggtatgtggacgggcccgcctccactgccttccaggagcatgtctccagaatcccggactatctctggatgggccttgacggcatgaaaatgcagggcaccaacggctcacagatctgggacaccgcattcgccatccaggctctgcttgaggcgggcgggcaccacaggcccgagttttcgtcctgcctgcagaaggctcatgagttcctgaggctctcacaggtcccagataaccctcccgactaccagaagtactaccgccagatgcgcaagggtggcttctccttcagtacgctggactgcggctggatcgtttctgactgcacggctgaggccttgaaggctgtgctgctcctgcaggagaagtgtccccatgtcaccgagcacatccccagagaacggctctgcgatgctgtggctgtgctgctgaacatgagaaatccagatggagggttcgccacctatgagaccaagcgtggggggcacttgctggagctgctgaacccctcggaggtcttcggggacatcatgattgactacacctatgtggagtgcacctcagccgtgatgcaggcgcttaagtatttccacaagcgtttcccggagcacagggcagcggagatccgggagaccctcacgcagggcttagagttctgtcggcggcagcagagggccgatggctcctgggaagggtgagtgagcctccactcgtgagtgcagagatgcatgggatccagaggtttctgctctcacacactgcgttcataaatgttggcttgtatgttgttgctacaccagaagtttctggaagtgagctgccagcccgtgacttctgggggacctcgttcctttgtggcatgcgtggcctttgccccggtggaaattgctcagtacgttgctgggcgcagccgggctgctgggagcgcgctgtagcctgagcgtggctattccctccaccctttctgcttgctcttagggtccagcagacagagctgctgtcttccacggccttaatgcctgaggcactggagttggtgggctggctggggcacgtggatccacaatggcacgtggatcacaatggcacgtggatcacaatggcacgtggatcacaatggcacgtggatcacaatggcacgtggat

SEQ ID NO: 381828 - DNA, 375 bp, Homo sapiens
tcgggacttgcggaaccccgggttgtgttgtgaatcttcgcgtggttcaattccttcctttattgctctattgcttgctttagaatttagcacactgagcccttcatgaatgccattccatgctgagcctttgagagtacaggtctgggatcctgggctctgtctagaaaattctctgatctaaaataccaacaaggatggaagcctttgggtctccctgtgcccatgcttctttctagctgccctgggcctgcagacgcaggcagagagagcttcgcagaggaggaggtggaatgaggattgctgggaagcaggcactgtgcccagcgcctctcaggatacatcctccacaggactctgcatggggaacagcgc

SEQ ID NO: 381829 - DNA, 279 bp, Homo sapiens
acccagctgacccctcccccttccccagggctggctgggaatggtggtctgttgcccagcctaggaggaagaggggctgtggcttccactctagaggtctctctcccggtccctcccccggtgctggtctaactgcaggcctgccttaggccgtgccggcacctgctgactgacgcttagcggatgctgataggagagggctgggatggggaagcagcaagtcccggtcactgcgggctcgggttacagatggttgaggcacctcctggccatccccag

SEQ ID NO: 381830 - DNA, 486 bp, Homo sapiens
gctgtggcatttcctcacctcatcctctgccgctggtataaagatattacagtatcgattcccagcactgcacggcttctgggtccattcatcactgcctggggctggagagcaattattggggtcattgcttgtcctcctgcaggagcgcgggccctggaagcccaggacctctctggagaagggcagggcccggaggagtgcagccagctgagtgcttcccagatgccacccaggggaccccacgaaaccccctcaggcaggtggaaaggcctcagggtggctgggaagctagggcagctctagaggacgtagagcttctgcagcccagcacacggcacagctgacttcagagcttgctcaccgtgcctgcgggtgaatggccacttcgccgcagggagggctggtgcctgcctgggccactcggagctgtccaggtctgcacccagagctggctctttctccccacactccaccgtcctgacc

SEQ ID NO: 381831 - DNA, 355 bp, Homo sapiens
aatctcatagctactgggtctactccacaaggaggaaatcaagactggtaagagttggctacctgacctgtacttgcaaaacactgacacaaatgagagagagagagaaaaaaagaaaaccaccacctttactcactcaagtaataaggtcacctcagaacactggcccatgttttgaaaggaaataatttttagaggtgaaaaacaatggttgataggtaccaggcataaccctttgagatgcaagtactattgccaattaatgccattggacagatgagaaagttaaggctcggagcaatcccataagctgcctacagttacatagcccagtaaaagccagagctggtatttg

SEQ ID NO: 381832 - DNA, 314 bp, Homo sapiens
actccatgtcttttctccctctcttcaaataggcacagagaagggaagtgggcatgggataataagcaactctaacacacaagcagaggtccaactgagaggtgagataccagtcttcccttcttactaatcttttagatgaactctcgcttgatttggactctcagcaacagcactattcagctacattaagtcagtgaagcaaactctgatgattgcctcatgatggggacaggagaaggcacttctggataaggaagaactaaggaaggtaaagatgtttaagttatggaggtggagttggctctcatttg

SEQ ID NO: 381833 - DNA, 556 bp, Homo sapiens
ccgtggaggaatactatgtgcccaggcaggagtgtgctgtggcgccatcttggctcactgcaacttcctctttccagtttcaagagaccacagcctcccgagtgctgggattacaggcctgagttactgcacccggcctgtccccgaaattcgattgcagccggcgataaagcttttttttaccccgcttctcggcaaagcgttgtgtttttattttagcagactcacctggcactaaggactgctctggtggtcttcggaggctcctgggatcgactgcttggacagaggtgacatcacccaggtagtgagagccaagacctaaggctgcagctgccttccaggtatctgccactcactgtagaacgatcccacagttctgcatttctgccctatgcccgccagtcacaagaagctccggtctcttatcccatgtctgattcctgaaaccttgctaattttcctaccatcctccctattcccagcctcctttcttcttcttcttcttcttcttcttcttcttcttcctcttcctcttcctcttcctcttcctctt

SEQ ID NO: 381834 - DNA, 297 bp, Homo sapiens
atgcttggtgaggggcaacctttgctgtcctgaagtcttaggatagggaggatagggctgtcccagtggccactgctttggcccacaggaatgagacttgctttcgtctcacaccccagtcccagcaaagttccctcctccatcctggctatggcagccaacttggccacccagtcagtcctggcaggctgcacctagtccacaactcagtcctaggccataggagatgccattcagcttaaggccaagcctccacaacaactctcctcttgcttaggacctgggatggtggtgtgc

SEQ ID NO: 381835 - DNA, 395 bp, Homo sapiens
ccccgcgggcctcccaaggcagccccctgttagcccgaccggcttcgaagcccgcgccggttgcggatcctccgccgcgcccacctgtcagcgcctcggccggccggggctcccgccgcatgcaagcagcgaggcgaggtcgcgctgaggcctggccatgccacggacggccgggcctcaccctgccgctctctcgccgtccagaggcccctgctccacacctgggtaccctgggtcctgactcagggcagctgggtgagaagctaacggcctgaaggaacagggctacaaggggagtttgtgctgggcctggcgtcccaggctgtggactggaactggacatgagaacccccctacaccctcccaagtcaaagacactccaaaaagacagtttc

SEQ ID NO: 381836 - DNA, 392 bp, Homo sapiens
cttcgcccagtgtcctgcggccgggcccggcggattcagaatgggacctggcgttctgagacacagccccagtgccggtagtggggggtggtggactgcactccggggccatttaatgtctttaggccttgagtctcggcttcggtcccagtcaacgccaacgggagaggaaagaggaaccaagtggggtccccagacttccaagcaaggtgggctggctaacgtccctcctacctgtcgcagggcagctgggtgagaagctaacggcctgaaggaacagggctacaaggggagtttgtgctgggcctggcgtcccaggctgtggactggaactggacatgagaacccccctacaccctcccaagtcaaagacactccaaaaagacagtttc

SEQ ID NO: 381837 - DNA, 242 bp, Homo sapiens
tccactttattagcctggagctcctccctgccagccccaggggctggtcgctggtccctgggcacagtgagcagggctgaggtcagacgggttcggcccttggccatggcagcttggttgggacagccgggccaagggaaaaaaaggtgcaaaagtccaaatgctggcacttcaggtgtggccggcacccagccaggcgcagtgggtgggcagggcgccatgcttctctcctggcgacaggt

SEQ ID NO: 381838 - DNA, 2317 bp, Homo sapiens
  misc_feature (1090)..(1090): n is a, c, g, or t
  misc_feature (1401)..(1401): n is a, c, g, or t
  misc_feature (1629)..(1629): n is a, c, g, or t
accactttgtccaccatgggtgaattatgaatcagtagctatgccaggcctcagctgggccacatctggagaactggggtgagggcacaacatcacaaaatatctggccccagtctggtcactcatcccttttagggcaacaaggaaactatcctgtggcctgagagcacaatacctgagacaaaggccagcagaaacatttgtctgccctcaccctttctgccccagcttccacctgctccccatctgcccacccactaaagcccatgtggcatgccatctctcgaacatccaggatgtcccagagtggatgtccatcaggtctgctggcagacaaaaatatctcttcaagtgccactcgagtgatagtgaagactgcaggcaaccagaaagactttatggtagctgatgacatctcggtaaggcagttcaaggagatgctattggctcacttccaatgccagatggaccaactagtgctggtcttcatgggttgccttctcaaagaccatgacacactgagccagaggggcatcatggatggccacaccatctacttggtcatcaagtccaagcagggctccagatctctagcccattccttccgggacctgccaacgaatgatccctgccaccgggacagaaacaccaaaggaaacagcagcagagtgcaccaaccaactggtatgaatcaagctccagtggaactggcccactttgtggggtctgatgcacccaaagtgcatacccaaaacttggaagtgagccacccagagtgcaaagcacagatgctggagaatcctagcatccagcggcttctgtccaacatggagttcatgtggcagttcatttcagaacatctagacacgcaacaattgatgcagcagaacccagaagtttcccgccttcttcttgataattctgagatcctattgcagactctggagctggccaggaaccttgctatgatccaagagataatgcagatccaacaaccttcacaaaaccttgagtatccactgaacccacagccatatctgggcttagagacaatgccaggtgggaataatgccctgggtcagaactatgntgatatcaatgatcaaatgctgaacagcatgcaagatccttttggaggaaaccctttcacagctctcctggcaggacaagtgctagaacaagtccagtcttcacccccacctccaccaccatcacaggaacaacaagaccagctcacacagcatcctgcaacccgagtcatctataatagctctggtggtttctcttcaaacacctcagccaatgacacccttaacaaggtcaaccacacttccaaagccaacactgctatgatttccaccaagggccagagccatatctgtgccactcggcagccagctnggataccagccttacctagcatagagcttacccagcagcttcaagaagaatacaaggatgccactgtttctctaagtagctccagacagacattaaagggtgatctccagctgtcagatgagcagagcagctcccagatcacaggaggcatgatgcagttgcttatgaacaacccctacctggcagctcagattatgttgttcacaagtatgccccagctgagtgaanagtggaggcagcagctgcccacattcctgcagcagacacagatttctgatctgcttagtgcttaggcaaccctaaagcattccaagcaatattgcagattgagcaggccctccagctgctggccacagaggctcctgttcttctgccttgggttgcaccctacctatggggcctgggttggcttcctgcccccagctgcagctatcctgacacagtgccctgttcctggaatgtttcagatacagctgagcccaagggacctgagtgctgccacaagcctggaacagtcctgcagaggctacaatccccggatggggacccttcccaccctctgcaagctcctgagatttgttttagcaaacagatggattctctccaggccatgggatttgggaaccaccatgccaatctacaggcactcattgctactgaaggggacaccaatgctgctatccgcaagctcaagagatcccagagattctaaccaccatgcctacttgtttgcttgctacctgcctgctgacccacctgaccatctcatttgccttttgcacctttcctgatgcttccagccaggagaagtcctggaataagagttatcaaccaatgtgtcttgtactgaataatagatcattggtcgtggctgaaacatctgtcaataaaatggctacactcacttgctgcgatc

SEQ ID NO: 381839 - DNA, 385 bp, Homo sapiens
aaaacataaattgaggcaaggacaccctatttaataaatggtgctgggaaaactggatagccacatgtagaagaatgaaactgaatccctgtctctcactttacacaaaaataaactcaagatggataaaagacttaaacctaagacctgaaaccataaaaattctagaatataacctaggagaaactcctctggacattggcctaggcaaagaattcatggctaagactcctaaagcaaatgcaactaaaacagaaataaataaatgggttgggcgcagtagctcaggcctgtaatcctaggactttgggaggccaaggtgggcagatcccttgagcacagcaggtcgaaaccagcctgggcaacagggcaaaacgtctctaca

SEQ ID NO: 381840 - DNA, 406 bp, Homo sapiens
ctgtattttaagatggacaaaaaaaatactttcttacattttgccttccaaactcttcgtagtatgtaaaactcctagggcaaaatgtcattttcaatgctttgtaaaaagaatacttgatattggccaggcacagtgtctcacgcctgtaatcccagcgctttggaaggccaaggcggtcaaatcactaggtcaggagttcgagaccagcctggccaacatggtaaaaccccgtctctactaaaaatacaaaaaattagctgggcgtagtggtgggtgcctgtaatcccagctacttgggaggctgaggcaggagaatcgcttgaacccaagaggcggaggttgcagtgagccaagatagcgtcactgcactccagccctggtgacagagtgagactccatctaa

SEQ ID NO: 381841 - DNA, 270 bp, Homo sapiens
tggggtgatgaaaatgttttggagtcagatagaagtaatgattgtataacaatatgagtgtactgaatgccattgaattgtacactttataaggatgacttcatgatgtgtgagtaaagttattagccacaaaagaaagaaggaacataatattaagaagtgctggggatgtattggacattgggtcagctttaccttactctaaactaattttcatgaaaactccattcagtaattactattaaaaacccacttgaagctgggcacggt

SEQ ID NO: 381842 - DNA, 369 bp, Homo sapiens
atgtgtttgtgtggcggggggcaggttgtacttttaaatagtgggtcagggcagaactcactgtaaaggtgaggtttaagcaaaggcttgtaggaggtataggaagagcgttccagacaaagggaagggccagaggaaaacagatagaggcatggtcagacagctcgaggagtagcctggagaccagtgtggtggggcagagtgagaaggggaggatggtgggaggtggagaaacagaggtgagggtggggaattggtggggggtagggaagactcaaggcggacaatctggggcttgtgtccaaaatggtagccagttggctacctaaagcattaaataaaataaaaacgttcagtttcttagtcgta

SEQ ID NO: 381843 - DNA, 415 bp, Homo sapiens
acagctaaagactaatggtcctaccttgcatgtagcaactggaagacactggtgactgatgaaaacagaagggtggccaggaagccagacaacatttagactggtgagtgagtaagtagtgaagacttgaaccgatgaatatagactaccatttcaagaaacttgactttcaaggaaaggagaggaatgaagtagttagagctaggtttgatctcttaatgctattcacttggcatagaatgccatttatttcctcaatttgcagtcctccctggcagcctgcctgtcttctccctctcctccctgcccctctccctgtcctcattctctcccttcccctccaaaccatctagcagtcggtttttaaacatctatcaaacctgacctcttttttccattttcctaataaactcta

SEQ ID NO: 381844 - DNA, 1287 bp, Homo sapiens
gcaaaggccaaggccagccaggacaccccctgggatcacactgagcttgccacatccccaaggcggccgaaccctccgcaaccaccagcccaggttaatccccagaggctccatggagttccctggcctggggtccctggggacctcagagcccctcccccagtttgtggatcctgctctggtgtcctccacaccagaatcaggggttttcttcccctctgggcctgagggcttggatgcagcagcttcctccactgccccgagcacagccaccgctgcagctgcggcactggcctactacagggacgctgaggcctacagacactccccagtctttcaggtgtacccattgctcaactgtatggaggggatcccagggggctcaccatatgccggctgggcctacggcaagacggggctctaccctgcctcaactgtgtgtcccacccgcgaggactctcctccccaggccgtggaagatctggatggaaaaggcagcaccagcttcctggagactttgaagacagagcggctgagcccagacctcctgaccctgggacctgcactgccttcatcactccctgtccccaatagtgcttatgggggccctgacttttccagtaccttcttttctcccaccgggagccccctcaattcagcagcctattcctctcccaagcttcgtggaactctccccctgcctccctgtgaggccagggagtgtgtgaactgcggagcaacagccactccactgtggcggagggacaggacaggccactacctatgcaacgcctgcggcctctatcacaagatgaatgggcagaacaggcccctcatccggcccaagaagcgcctgattgtcagtaaacgggcaggtactcagtgcaccaactgccagacgaccaccacgacactgtggcggagaaatgccagtggggatcccgtgtgcaatgcctgcggcctctactacaagctacaccaggtgaaccggccactgaccatgcggaaggatggtattcagactcgaaaccgcaaggcatctggaaaagggaaaaagaaacggggctccagtctgggaggcacaggagcagccgaaggaccagagcactactgtggtggctccgctcagctcatgagggcacagagcatggcctccagaggaggggtggtgtccttctcctcttgtagccagaattctggacaacccaagtctctgggccccaggcaccccctggcttgaaccttcaaagcttttgtaaaataaaaccaccaaagtcctgaaaaaat

SEQ ID NO: 381845 - DNA, 1505 bp, Homo sapiens
gcaaaggccaaggccagccaggacaccccctgggatcacactgagcttgccacatccccaaggcggccgaaccctccgcaaccaccagcccaggttaatccccagaggctccatggagttccctggcctggggtccctggggacctcagagcccctcccccagtttgtggatcctgctctggtgtcctccacaccagaatcaggggttttcttcccctctgggcctgagggcttggatgcagcagcttcctccactgccccgagcacagccaccgctgcagctgcggcactggcctactacagggacgctgaggcctacagacactccccagtctttcaggtgtacccattgctcaactgtatggaggggatcccagggggctcaccatatgccggctgggcctacggcaagacggggctctaccctgcctcaactgtgtgtcccacccgcgaggactctcctccccaggccgtggaagatctggatggaaaaggcagcaccagcttcctggagactttgaagacagagcggctgagcccagacctcctgaccctgggacctgcactgccttcatcactccctgtccccaatagtgcttatgggggccctgacttttccagtaccttcttttctcccaccgggagccccctcaattcagcagcctattcctctcccaagcttcgtggaactctccccctgcctccctgtgaggccagggagtgtgtgaactgcggagcaacagccactccactgtggcggagggacaggacaggccactacctatgcaacgcctgcggcctctatcacaagatgaatgggcagaacaggcccctcatccggcccaagaagcgcctgattgtcagtaaacgggcaggtactcagtgcaccaactgccagacgaccaccacgacactgtggcggagaaatgccagtggggatcccgtgtgcaatgcctgcggcctctactacaagctacaccaggtgaaccggccactgaccatgcggaaggatggtattcagactcgaaaccgcaaggcatctggaaaagggaaaaagaaacggggctccagtctgggaggcacaggagcagccgaaggaccagctggtggctttatggtggtggctgggggcagcggtagcgggaattgtggggaggtggcttcaggcctgacactgggccccccaggtactgcccatctctaccaaggcctgggccctgtggtgctgtcagggcctgttagccacctcatgcctttccctggacccctactgggctcacccacgggctccttccccacaggccccatgccccccaccaccagcactactgtggtggctccgctcagctcatgagggcacagagcatggcctccagaggaggggtggtgtccttctcctcttgtagccagaattctggacaacccaagtctctgggccccaggcaccccctggcttgaaccttcaaagcttttgtaaaataaaaccaccaaagtcctgaaaaaat

SEQ ID NO: 381846 - DNA, 1166 bp, Homo sapiens
gcaaaggccaaggccagccaggacaccccctgggatcacactgagcttgccacatccccaaggcggccgaaccctccgcaaccaccagcccaggttaatccccagaggctccatggagttccctggcctggggtccctggggacctcagagcccctcccccagtttgtggatcctgctctggtgtcctccacaccagaatcaggggttttcttcccctctgggcctgagggcttggatgcagcagcttcctccactgccccgagcacagccaccgctgcagctgcggcactggcctactacagggacgctgaggcctacagacactccccagtctttcaggtgtacccattgctcaactgtatggaggggatcccagggggctcaccatatgccggctgggcctacggcaagacggggctctaccctgcctcaactgtgtgtcccacccgcgaggactctcctccccaggccgtggaagatctggatggaaaaggcagcaccagcttcctggagactttgaagacagagcggctgagcccagacctcctgaccctgggacctgcactgccttcatcactccctgtccccaatagtgcttatgggggccctgacttttccagtaccttcttttctcccaccgggagccccctcaattcagcagcctattcctctcccaagcttcgtggaactctccccctgcctccctgtgaggccagggagtgtgtgaactgcggagcaacagccactccactgtggcggagggacaggacaggccactacctatgcaacgcctgcggcctctatcacaagatgaatgggcagaacaggcccctcatccggcccaagaagcgcctgattgtcagtaaacgggcaggtactcagtgcaccaactgccagacgaccaccacgacactgtggcggagaaatgccagtggggatcccgtgtgcaatgcctgcggcctctactacaagctacaccagagcactactgtggtggctccgctcagctcatgagggcacagagcatggcctccagaggaggggtggtgtccttctcctcttgtagccagaattctggacaacccaagtctctgggccccaggcaccccctggcttgaaccttcaaagcttttgtaaaataaaaccaccaaagtcctgaaaaaat

SEQ ID NO: 381847 - DNA, 3787 bp, Homo sapiens
  misc_feature (106)..(106): n is a, c, g, or t
  misc_feature (1275)..(1275): n is a, c, g, or t
  misc_feature (1866)..(1866): n is a, c, g, or t
tgctttttctttgttttatggtgatttttactttttcaagtagcttgttaaaggagaaatcagaaatgcacatgattgttttatacagaggtataaagctataaangaatgtgttgactgattcagctaacttagaaaataaaccaggcataagtttttagatgatttaattacatggtgtttagagctacttacctatggattgattcaattgctttcacgtatcataagcttaggtagatagcttttagctaacattcatttgataagcatagtgttttaaaaattttctgacttatgtaagtattctttcattttacttttaaaggagaagaaatattctaattttatatttattaagaatattttctctactgaaattgtaacttttaaaaaattgaggtaaatggaataatggtctataatttttttagtttctaaagattattttctttggaaaaatctcaagatttttggatgggcaagaaatttaaagtaatttctttaattgttttaaaattagaccatagcacagtggcggaagtcaggataccaggatatgcctgagtatgaaaatttccgccaccttctgcaagccccagtggatgatgcacaggaaattcttcactccagatttccaatgccaagatacattgacactgaacatggaggcagccagagtagtgttaatttgtttgtgtgtttgtttgttgttaggtttgcagtgaggtgtacctgcttgccttctgattttaatagattgcttcataaagcagacagaaaggtaaggagataggtggggaaggtatcagtgcttactttttgcattagcttttgagagcaaaacagtaagattattgactagttgcctaaacctggcactttccatcatcttctgtctctagcctagcttcctgaacagggccaggatggcattgtggtggtatactagctttggttgaacaagaaaatgtgaacagcttggaaagtaatatacttttcttaaagccgtttatttactgttaaagtctatgaatatgacatttgtggtaacttacattttttcattgtcttcattctatcattccaattttctagaaaataaaattttatgtaataggaaaacactgtagtattatgaaaaggttttgtggcttttaggattttgaggatacatatacgttagatacatatacatacatacacagttgctttgagaccttcagaaggctaagttaggttccttaacatactctcataaaatacttcttactnctcttttgtaattcttataagagttataataaattaattataagttgttattaatttgttttacatgctctttgaaggcagggactatgctttgtattccctagtgcctagtacggtattataaaataggtagcaaatatcagtaactgttattcagaaatgataattactattagttttactgtatttatatgagagttatttcatattgagaatttgcaaagtacttctgcatgccttatctcatttgatcctcataagaattctagtgttattttcatttaacagataataaaactgagatctaggttacttatggccaagggaacacagtaaatacaggagtgggatttgagtcctggtactccagggccagtgctcttcactgttaggttaaactgattccttagagagtagaaaaagattttgtatgatactaaatttcaaaagatgttactgtctatgtgcttccattatgagttaaaaatcttactggttctttcattgatgtctcactgtgtgtattaccattttcctcttttattctggttattattttcatgatgataagccatagtgggtagaaggatnaaatgttggatcacttgtctcatagaatcacctgtggtttaagaaagcttaagggtcattattttaagcaaaagaacatacagattttcatggcttttgtttttatcattatttgggattttgaacttctgaccaagtgtttagtaatttcacaccaaccttgtcataattgttgcacacataatttttatatgctgagttttggactcaacaatgtatttgttattttggatgtatgatttggagagaagaggtgcatttattatttatttgtaacacttagtgacctatacatttcaaagtttaatcttttaaaaattaagttaataaaattaattttaccaacacatactaaataaaattgattttgcatgatataattattcagctgatattgactgaaaccatttttgatggataatgttatttcttctttgcttttaaggcccgtttcctcctttcaaaagtcaacccttcacagactcataataatatgtatgcctgggggcaggagtctggagcacctattcttacagatgatgttagtttacaagtgtttatggatcacttgaagaaacttgctgtgtccagtgctgcttgaagtgctaataatgttaaagacacttaagaagatgaaataatattcaaatttcattttttcctttttccatttatctgtggaaaccaacagatattgctctatattttttgtattagtatggtttgagacaacatatggaaaatgttcacatttgtagattaagctggaattataatgagagcaataagaacaaatttattttgcttaccacagtgttatagctggttctagaaatttgaagtctttataacttaattatgtttaataaaaaatagagtctgcctcgtactacagatgtaactcatttgtatattgcagacagacccaaagtggcactgaattttcttgctcaccttttaaaaacttgttccttaattttagccagaaagcaaaaaaacaatagtaatgataaatgtgaacatttttgcttattcattgaatatttttctgtaattttcagcacttatgtatacactttttctgtacttactaggttaaggcagatttatttttatgatttgtttaggaattatttgattttataatggtaattttcatgatgataatgtttttggttatttggaaagatagtttagagatgaaaggtttttttgggtaacaatcccgcagctgacaaaaaatgtgaaatttccacaaaatatccaacttatgtgactaaacgcagtagtttttttaaaaggggagatagaaaataaatggttttgttggagtgcattttagtaagcctttgcagtaaaatgacggttgtaactactaaaccaaatttagttttcacagcatggttttgttgttttccccttgtttttcagaggtaaattttgcattatatccttcagtattttaacactattttggcagtttacacattactttttgtttttccttcctttttgtgaaatgtattaagttgtggttcttattgaaacagtattatataatgtttgcttaattatatcatgtgatgctcagttctattttgatttattcattagtattcacttttacctttaaagtttacttgtagcaaatatgtttacattgataaagccagatatgttttgacaatgaaatttacatatcaagtactgcaaataaaaggtggtgctatgatatatgcttaggaggacagttttaatgattgtacttgcatgaacacaatcatatgatggtaaagcagaaacttaagaaaaaattgtttatgtgttatattcaattagcttaaataagttgctttgttatattttatttgaattgaactacgctaggcctaaatgccaataaaatatacttttcactgtt

SEQ ID NO: 381848 - DNA, 1082 bp, Homo sapiens
ctagtttgtggctgggcatggtggctcacacctgtaatcccagcactttgggaggctgaggtgggtggatcacctgaggttgggagttcgagaccagcctgaccaacatggagaaaccccatctctactaaaaatacaaaatattagccaggtatggtggcatgtctgtaatcccaggtacttgggaagctgaggcaggaggattgcttaagcccaggagttagagaccagctcaggcaacatagagagaccctgttcccctcctgttatccccccaaaaaagaaaaaaagacacagcgaacgcacaggacagcaccaataaaaacttggggtggcagcctatagcattcctttcaaaattcttatattgattgttttaggtagttcagctcccattggtatacctctattcatggttgctctttctgcatacccttttcccatccatccctaattaaaacttttgtactgtcaccagtcttctattttttatgcctaaattatgtcttgccccagtgtgcctaaaaaaaaacaaaaacaaaaaaaactcatgatttggaaatttggagacttctgaaagtcaaaattagctctaaattgatttttgataccagaattttcaaaaaagtaaccaaattagccagatttggaatttcagttctttatgttctttttatccaatttaatggaagtataacgtactctaaaatggtagaatcatgtagctgtggagaggatgatgggacaaataatacaaagtgggtaatcaactttaaaaatgacaaagctaaaaaattaatatgtacaagcagtttgcgtggtaaaggtctgtctatatctatgacgttttcttgggaatcagagtgcttaacaattctcatccagagaacatgtgttcgtaaatgcatatattatatgttaaatcagtttctctttatacagatcaagtagttggatagaaggataatgttagttgcaattacttcattaaatagcatatacttttattttttattttattttttttgagacggagtctcgctttgcctcgcaggttggagtgcagtggcgccttctcggct

SEQ ID NO: 381849 - DNA, 3848 bp, Homo sapiens
agcgggtggcagaggcggcgccagccatgttggccgggcggaggtcttcgctgaggcccggggcggggtggcgccacccctgattgcggtgccacggactgctcctgctgggcggagaggacagattttgcaaagcggaggctgcgacgggtcctgcagggggacagtgaggaaagggccgcctcgtctccgctcctgggggaccgcagaaataagaatcaaactccacaatgacaacctatttggaattcattcaacaaaatgaagaacgagatggagtccgatttagttggaatgtttggccatcaagtcgactggaagctacaagaatggttgttcctgtggcagccctgtttacaccactgaaagagagacctgacttaccacctattcaatatgaacctgttctgtgtagtaggaccacttgccgtgcagttttgaatcctttatgtcaagtggattatcgagcaaaactttgggcttgcaacttttgttaccaaaggaatcagtttccacctagttatgctggtatatctgaactgaatcagcctgctgaacttttacctcagttttctagcattgaatatgtagttctgcgtggtcctcagatgcctttgatattcctctatgtggttgatacttgcatggaagatgaagatttacaagccctgaaagaatccatgcagatgtcattaagtcttttaccacctacagctttggttggacttattacttttgggagaatggttcaggttcatgaacttggatgtgaaggcatttcaaaaagctatgtcttcagaggaacaaaagatttgtctgccaaacaactgcaggaaatgctggggctctctaaagtaccagttactcaagcaacacgtggtcctcaggtacagcagccacctccttccaacagattcttacaaccagtacagaaaatagacatgaatctcacagatcttctgggagaactccagcgagacccttggcctgtaccacagggaaagagacctttgcgttcctctggggtggcactttccatagctgtaggactgctggagtgtacttttcccaacactggtgctcgtatcatgatgttcattggtggtcctgctactcaggggcctggaatggtggttggagatgagttgaagacacctataagatcgtggcatgacattgacaaagacaatgccaaatatgttaaaaagggaactaagcattttgaagcattggctaatcgagctgctacaactggccatgttattgatatctatgcgtgtgcattagatcagacaggtctcctggagatgaaatgctgtcccaaccttactggaggatacatggtaatgggtgattctttcaatacttccttattcaaacaaacttttcaaagagtctttaccaaagacatgcatggacagtttaaaatgggctttggtggtacgctagaaataaagacctcaagggaaataaagatttcaggagctattggaccctgtgtgtcactcaattctaaaggaccctgtgtgtctgaaaatgagataggaacaggtggcacatgtcagtggaagatatgtggacttagtcccactacaaccttagccatatattttgaggttgtcaatcagcataatgctccaattcctcaaggagggcgtggtgcaatccagtttgtgactcagtatcagcattcaagtgggcagagacgcatccgagtgaccaccattgctaggaactgggcagatgctcaaactcaaatccaaaacattgctgcatcttttgaccaggaggcagctgccattcttatggcccggctagcaatatatagagcagaaacagaagaaggtccagatgtgcttaggtggctggacagacagctcattcgactgtgtcagaaatttggagaatatcataaagatgacccaagttccttcagattttcagaaactttctccctttatccacagtttatgtttcatttaagaagatcttctttcctgcaagtttttaacaatagtcctgatgagagttcatattatcgtcaccattttatgcgtcaagatctgacccagtctctaattatgattcagcctatcctgtatgcgtattcttttagtggaccaccagagccggttcttcttgatagcagtagcattcttgcagatcgtattcttctcatggacacattcttccagattttgatttatcatggtgagaccatagcacagtggcggaagtcaggataccaggatatgcctgagtatgaaaatttccgccaccttctgcaagccccagtggatgatgcacaggaaattcttcactccagatttccaatgccaagatacattgacactgaacatggaggcagccaggcccgtttcctcctttcaaaagtcaacccttcacagactcataataatatgtatgcctgggggcaggagtctggagcacctattcttacagatgatgttagtttacaagtgtttatggatcacttgaagaaacttgctgtgtccagtgctgcttgaagtgctaataatgttaaagacacttaagaagatgaaataatattcaaatttcattttttcctttttccatttatctgtggaaaccaacagatattgctctatattttttgtattagtatggtttgagacaacatatggaaaatgttcacatttgtagattaagctggaattataatgagagcaataagaacaaatttattttgcttaccacagtgttatagctggttctagaaatttgaagtctttataacttaattatgtttaataaaaaatagagtctgcctcgtactacagatgtaactcatttgtatattgcagacagacccaaagtggcactgaattttcttgctcaccttttaaaaacttgttccttaattttagccagaaagcaaaaaaacaatagtaatgataaatgtgaacatttttgcttattcattgaatatttttctgtaattttcagcacttatgtatacactttttctgtacttactaggttaaggcagatttatttttatgatttgtttaggaattatttgattttataatggtaattttcatgatgataatgtttttggttatttggaaagatagtttagagatgaaaggtttttttgggtaacaatcccgcagctgacaaaaaatgtgaaatttccacaaaatatccaacttatgtgactaaacgcagtagtttttttaaaaggggagatagaaaataaatggttttgttggagtgcattttagtaagcctttgcagtaaaatgacggttgtaactactaaaccaaatttagttttcacagcatggttttgttgttttccccttgtttttcagaggtaaattttgcattatatccttcagtattttaacactattttggcagtttacacattactttttgtttttccttcctttttgtgaaatgtattaagttgtggttcttattgaaacagtattatataatgtttgcttaattatatcatgtgatgctcagttctattttgatttattcattagtattcacttttacctttaaagtttacttgtagcaaatatgtttacattgataaagccagatatgttttgacaatgaaatttacatatcaagtactgcaaataaaaggtggtgctatgatatatgcttaggaggacagttttaatgattgtacttgcatgaacacaatcatatgatggtaaagcagaaacttaagaaaaaattgtttatgtgttatattcaattagcttaaataagttgctttgttatattttatttgaattgaactacgctaggcctaaatgccaataaaatatacttttcactgtt

SEQ ID NO: 381850 - DNA, 2779 bp, Homo sapiens
tttttttagaaaaaagtttttaatttttgttggtggtcctgctactcaggggcctggaatggtggttggagatgagttgaagacacctataagatcgtggcatgacattgacaaagacaatgccaaatatgttaaaaagggaactaagcattttgaagcattggctaatcgagctgctacaactggccatgttattgatatctatgcgtgtgcattagatcagacaggtctcctggagatgaaatgctgtcccaaccttactggaggatacatggtaatgggtgattctttcaatacttccttattcaaacaaacttttcaaagagtctttaccaaagacatgcatggacagtttaaaatgggctttggtggtacgctagaaataaagacctcaagggaaataaagatttcaggagctattggaccctgtgtgtcactcaattctaaaggaccctgtgtgtctgaaaatgagataggaacaggtggcacatgtcagtggaagatatgtggacttagtcccactacaaccttagccatatattttgaggttgtcaatcagcataatgctccaattcctcaaggagggcgtggtgcaatccagtttgtgactcagtatcagcattcaagtgggcagagacgcatccgagtgaccaccattgctaggaactgggcagatgctcaaactcaaatccaaaacattgctgcatcttttgaccaggaggcagctgccattcttatggcccggctagcaatatatagagcagaaacagaagaaggtccagatgtgcttaggtggctggacagacagctcattcgactgtgtcagaaatttggagaatatcataaagatgacccaagttccttcagattttcagaaactttctccctttatccacagtttatgtttcatttaagaagatcttctttcctgcaagtttttaacaatagtcctgatgagagttcatattatcgtcaccattttatgcgtcaagatctgacccagtctctaattatgattcagcctatcctgtatgcgtattcttttagtggaccaccagagccggttcttcttgatagcagtagcattcttgcagatcgtattcttctcatggacacattcttccagattttgatttatcatggtgagaccatagcacagtggcggaagtcaggataccaggatatgcctgagtatgaaaatttccgccaccttctgcaagccccagtggatgatgcacaggaaattcttcactccagatttccaatgccaagatacattgacactgaacatggaggcagccaggcccgtttcctcctttcaaaagtcaacccttcacagactcataataatatgtatgcctgggggcaggagtctggagcacctattcttacagatgatgttagtttacaagtgtttatggatcacttgaagaaacttgctgtgtccagtgctgcttgaagtgctaataatgttaaagacacttaagaagatgaaataatattcaaatttcattttttcctttttccatttatctgtggaaaccaacagatattgctctatattttttgtattagtatggtttgagacaacatatggaaaatgttcacatttgtagattaagctggaattataatgagagcaataagaacaaatttattttgcttaccacagtgttatagctggttctagaaatttgaagtctttataacttaattatgtttaataaaaaatagagtctgcctcgtactacagatgtaactcatttgtatattgcagacagacccaaagtggcactgaattttcttgctcaccttttaaaaacttgttccttaattttagccagaaagcaaaaaaacaatagtaatgataaatgtgaacatttttgcttattcattgaatatttttctgtaattttcagcacttatgtatacactttttctgtacttactaggttaaggcagatttatttttatgatttgtttaggaattatttgattttataatggtaattttcatgatgataatgtttttggttatttggaaagatagtttagagatgaaaggtttttttgggtaacaatcccgcagctgacaaaaaatgtgaaatttccacaaaatatccaacttatgtgactaaacgcagtagtttttttaaaaggggagatagaaaataaatggttttgttggagtgcattttagtaagcctttgcagtaaaatgacggttgtaactactaaaccaaatttagttttcacagcatggttttgttgttttccccttgtttttcagaggtaaattttgcattatatccttcagtattttaacactattttggcagtttacacattactttttgtttttccttcctttttgtgaaatgtattaagttgtggttcttattgaaacagtattatataatgtttgcttaattatatcatgtgatgctcagttctattttgatttattcattagtattcacttttacctttaaagtttacttgtagcaaatatgtttacattgataaagccagatatgttttgacaatgaaatttacatatcaagtactgcaaataaaaggtggtgctatgatatatgcttaggaggacagttttaatgattgtacttgcatgaacacaatcatatgatggtaaagcagaaacttaagaaaaaattgtttatgtgttatattcaattagcttaaataagttgctttgttatattttatttgaattgaactacgctaggcctaaatgccaataaaatatacttttcactgtt

SEQ ID NO: 381851 - DNA, 3782 bp, Homo sapiens
agcgggtggcagaggcggcgccagccatgttggccgggcggaggtcttcgctgaggcccggggcggggtggcgccacccctgattgcggtgccacggactgctcctgctgggcggagaggacagattttgcaaagcggaggctgcgacgggtcctgcagggggacagtgaggaaagggccgcctcgtctccgctcctgggggaccgcagaaataagaatcaaactccacaatgacaacctatttggaattcattcaacaaaatgaagaacgagatggagtccgatttagttggaatgtttggccatcaagtcgactggaagctacaagaatggttgttcctgtggcagccctgtttacaccactgaaagagagacctgacttaccacctattcaatatgaacctgttctgtgtagtaggaccacttgccgtgcagttttgaatcctttatgtcaagtggattatcgagcaaaactttgggcttgcaacttttgttaccaaaggaatcagtttccacctagttatgctggtatatctgaactgaatcagcctgctgaacttttacctcagttttctagcattgaatatgtagttctgcgtggtcctcagatgcctttgatattcctctatgtggttgatacttgcatggaagatgaagatttacaagccctgaaagaatccatgcagatgtcattaagtcttttaccacctacagctttggttggacttattacttttgggagaatggttcaggttcatgaacttggatgtgaaggcatttcaaaaagctatgtcttcagaggaacaaaagatttgtctgccaaacaactgcaggaaatgctggggctctctaaagtaccagttactcaagcaacacgtggtcctcaggtacagcagccacctccttccaacagattcttacaaccagtacagaaaatagacatgaatctcacagatcttctgggagaactccagcgagacccttggcctgtaccacagggaaagagacctttgcgttcctctggggtggcactttccatagctgtaggactgctggagtgtacttttcccaacactggtgctcgtatcatgatgttcattggtggtcctgctactcaggggcctggaatggtggttggagatgagttgaagacacctataagatcgtggcatgacattgacaaagacaatgccaaatatgttaaaaagggaactaagcattttgaagcattggctaatcgagctgctacaactggccatgttattgatatctatgcgtgtgcattagatcagacaggtctcctggagatgaaatgctgtcccaaccttactggaggatacatggtaatgggtgattctttcaatacttccttattcaaacaaacttttcaaagagtctttaccaaagacatgcatggacagtttaaaatgggctttggtggtacgctagaaataaagacctcaagggaaataaagatttcaggagctattggaccctgtgtgtcactcaattctaaaggaccctgtgtgtctgaaaatgagataggaacaggtggcacatgtcagtggaagatatgtggacttagtcccactacaaccttagccatatattttgaggttgtcaatcagcataatgctccaattcctcaaggagggcgtggtgcaatccagtttgtgactcagtatcagcattcaagtgggcagagacgcatccgagtgaccaccattgctaggaactgggcagatgctcaaactcaaatccaaaacattgctgcatcttttgaccaggaggcagctgccattcttatggcccggctagcaatatatagagcagaaacagaagaaggtccagatgtgcttaggtggctggacagacagctcattcgactgtgtcagaaatttggagaatatcataaagatgacccaagttccttcagattttcagaaactttctccctttatccacagtttatgtttcatttaagaagatcttctttcctgcaagtttttaacaatagtcctgatgagagttcatattatcgtcaccattttatgcgtcaagatctgacccagtctctaattatgattcagcctatcctgtatgcgtattcttttagtggaccaccagagccggttcttcttgatagcagtagcattcttgcagatcgtattcttctcatggacacattcttccagattttgatttatcatggtgagaccatagcacagtggcggaagtcaggataccaggatatgcctgagtatgaaaatttccgccaccttctgcaagccccagtggatgatgcacaggaaattcttcactccagatttccaatgccaagatacattgacactgaacatggaggcagccaggagtctggagcacctattcttacagatgatgttagtttacaagtgtttatggatcacttgaagaaacttgctgtgtccagtgctgcttgaagtgctaataatgttaaagacacttaagaagatgaaataatattcaaatttcattttttcctttttccatttatctgtggaaaccaacagatattgctctatattttttgtattagtatggtttgagacaacatatggaaaatgttcacatttgtagattaagctggaattataatgagagcaataagaacaaatttattttgcttaccacagtgttatagctggttctagaaatttgaagtctttataacttaattatgtttaataaaaaatagagtctgcctcgtactacagatgtaactcatttgtatattgcagacagacccaaagtggcactgaattttcttgctcaccttttaaaaacttgttccttaattttagccagaaagcaaaaaaacaatagtaatgataaatgtgaacatttttgcttattcattgaatatttttctgtaattttcagcacttatgtatacactttttctgtacttactaggttaaggcagatttatttttatgatttgtttaggaattatttgattttataatggtaattttcatgatgataatgtttttggttatttggaaagatagtttagagatgaaaggtttttttgggtaacaatcccgcagctgacaaaaaatgtgaaatttccacaaaatatccaacttatgtgactaaacgcagtagtttttttaaaaggggagatagaaaataaatggttttgttggagtgcattttagtaagcctttgcagtaaaatgacggttgtaactactaaaccaaatttagttttcacagcatggttttgttgttttccccttgtttttcagaggtaaattttgcattatatccttcagtattttaacactattttggcagtttacacattactttttgtttttccttcctttttgtgaaatgtattaagttgtggttcttattgaaacagtattatataatgtttgcttaattatatcatgtgatgctcagttctattttgatttattcattagtattcacttttacctttaaagtttacttgtagcaaatatgtttacattgataaagccagatatgttttgacaatgaaatttacatatcaagtactgcaaataaaaggtggtgctatgatatatgcttaggaggacagttttaatgattgtacttgcatgaacacaatcatatgatggtaaagcagaaacttaagaaaaaattgtttatgtgttatattcaattagcttaaataagttgctttgttatattttatttgaattgaactacgctaggcctaaatgccaataaaatatacttttcactgtt

SEQ ID NO: 381852 - DNA, 2155 bp, Homo sapiens
  misc_feature (106)..(106): n is a, c, g, or t
tgctttttctttgttttatggtgatttttactttttcaagtagcttgttaaaggagaaatcagaaatgcacatgattgttttatacagaggtataaagctataaangaatgtgttgactgattcagctaacttagaaaataaaccaggcataagtttttagatgatttaattacatggtgtttagagctacttacctatggattgattcaattgctttcacgtatcataagcttaggtagatagcttttagctaacattcatttgataagcatagtgttttaaaaattttctgacttatgtaagtattctttcattttacttttaaaggagaagaaatattctaattttatatttattaagaatattttctctactgaaattgtaacttttaaaaaattgaggtaaatggaataatggtctataatttttttagtttctaaagattattttctttggaaaaatctcaagatttttggatgggcaagaaatttaaagtaatttctttaattgttttaaaattagaccatagcacagtggcggaagtcaggataccaggatatgcctgagtatgaaaatttccgccaccttctgcaagccccagtggatgatgcacaggaaattcttcactccagatttccaatgccaagatacattgacactgaacatggaggcagccaggcccgtttcctcctttcaaaagtcaacccttcacagactcataataatatgtatgcctgggggcaggagtctggagcacctattcttacagatgatgttagtttacaagtgtttatggatcacttgaagaaacttgctgtgtccagtgctgcttgaagtgctaataatgttaaagacacttaagaagatgaaataatattcaaatttcattttttcctttttccatttatctgtggaaaccaacagatattgctctatattttttgtattagtatggtttgagacaacatatggaaaatgttcacatttgtagattaagctggaattataatgagagcaataagaacaaatttattttgcttaccacagtgttatagctggttctagaaatttgaagtctttataacttaattatgtttaataaaaaatagagtctgcctcgtactacagatgtaactcatttgtatattgcagacagacccaaagtggcactgaattttcttgctcaccttttaaaaacttgttccttaattttagccagaaagcaaaaaaacaatagtaatgataaatgtgaacatttttgcttattcattgaatatttttctgtaattttcagcacttatgtatacactttttctgtacttactaggttaaggcagatttatttttatgatttgtttaggaattatttgattttataatggtaattttcatgatgataatgtttttggttatttggaaagatagtttagagatgaaaggtttttttgggtaacaatcccgcagctgacaaaaaatgtgaaatttccacaaaatatccaacttatgtgactaaacgcagtagtttttttaaaaggggagatagaaaataaatggttttgttggagtgcattttagtaagcctttgcagtaaaatgacggttgtaactactaaaccaaatttagttttcacagcatggttttgttgttttccccttgtttttcagaggtaaattttgcattatatccttcagtattttaacactattttggcagtttacacattactttttgtttttccttcctttttgtgaaatgtattaagttgtggttcttattgaaacagtattatataatgtttgcttaattatatcatgtgatgctcagttctattttgatttattcattagtattcacttttacctttaaagtttacttgtagcaaatatgtttacattgataaagccagatatgttttgacaatgaaatttacatatcaagtactgcaaataaaaggtggtgctatgatatatgcttaggaggacagttttaatgattgtacttgcatgaacacaatcatatgatggtaaagcagaaacttaagaaaaaattgtttatgtgttatattcaattagcttaaataagttgctttgttatattttatttgaattgaactacgctaggcctaaatgccaataaaatatacttttcactgtt

SEQ ID NO: 381853 - DNA, 3553 bp, Homo sapiens
  misc_feature (2733)..(2733): n is a, c, g, or t
  misc_feature (2760)..(2761): n is a, c, g, or t
  misc_feature (3375)..(3375): n is a, c, g, or t
  misc_feature (3403)..(3403): n is a, c, g, or t
  misc_feature (3440)..(3440): n is a, c, g, or t
agcgggtggcagaggcggcgccagccatgttggccgggcggaggtcttcgctgaggcccggggcggggtggcgccacccctgattgcggtgccacggactgctcctgctgggcggagaggacagattttgcaaagcggaggctgcgacgggtcctgcagggggacagtgaggaaagggccgcctcgtctccgctcctgggggaccgcagaaataagaatcaaactccacaatgacaacctatttggaattcattcaacaaaatgaagaacgagatggagtccgatttagttggaatgtttggccatcaagtcgactggaagctacaagaatggttgttcctgtggcagccctgtttacaccactgaaagagagacctgacttaccacctattcaatatgaacctgttctgtgtagtaggaccacttgccgtgcagttttgaatcctttatgtcaagtggattatcgagcaaaactttgggcttgcaacttttgttaccaaaggaatcagtttccacctagttatgctggtatatctgaactgaatcagcctgctgaacttttacctcagttttctagcattgaatatgtagttctgcgtggtcctcagatgcctttgatattcctctatgtggttgatacttgcatggaagatgaagatttacaagccctgaaagaatccatgcagatgtcattaagtcttttaccacctacagctttggttggacttattacttttgggagaatggttcaggttcatgaacttggatgtgaaggcatttcaaaaagctatgtcttcagaggaacaaaagatttgtctgccaaacaactgcaggaaatgctggggctctctaaagtaccagttactcaagcaacacgtggtcctcaggtacagcagccacctccttccaacagattcttacaaccagtacagaaaatagacatgaatctcacagatcttctgggagaactccagcgagacccttggcctgtaccacagggaaagagacctttgcgttcctctggggtggcactttccatagctgtaggactgctggagtgtacttttcccaacactggtgctcgtatcatgatgttcattggtggtcctgctactcaggggcctggaatggtggttggagatgagttgaagacacctataagatcgtggcatgacattgacaaagacaatgccaaatatgttaaaaagggaactaagcattttgaagcattggctaatcgagctgctacaactggccatgttattgatatctatgcgtgtgcattagatcagacaggtctcctggagatgaaatgctgtcccaaccttactggaggatacatggtaatgggtgattctttcaatacttccttattcaaacaaacttttcaaagagtctttaccaaagacatgcatggacagtttaaaatgggctttggtggtacgctagaaataaagacctcaagggaaataaagatttcaggagctattggaccctgtgtgtcactcaattctaaaggaccctgtgtgtctgaaaatgagataggaacaggtggcacatgtcagtggaagatatgtggacttagtcccactacaaccttagccatatattttgaggttgtcaatcagcataatgctccaattcctcaaggagggcgtggtgcaatccagtttgtgactcagtatcagcattcaagtgggcagagacgcatccgagtgaccaccattgctaggaactgggcagatgctcaaactcaaatccaaaacattgctgcatcttttgaccaggaggcagctgccattcttatggcccggctagcaatatatagagcagaaacagaagaaggtccagatgtgcttaggtggctggacagacagctcattcgactgtgtcagaaatttggagaatatcataaagatgacccaagttccttcagattttcagaaactttctccctttatccacagtttatgtttcatttaagaagatcttctttcctgcaagtttttaacaatagtcctgatgagagttcatattatcgtcaccattttatgcgtcaagatctgacccagtctctaattatgattcagcctatcctgtatgcgtattcttttagtggaccaccagagccggttcttcttgatagcagtagcattcttgcagatcgtattcttctcatggacacattcttccagattttgatttatcatggtgagaccatagcacagtggcggaagtcaggataccaggatatgcctgagtatgaaaatttccgccaccttctgcaagccccagtggatgatgcacaggaaattcttcactccagatttccaatgccaagatacattgacactgaacatggaggcagccaggcccgtttcctcctttcaaaagtcaacccttcacagactcataataatatgtatgcctgggggcaggagtctggagcacctattcttacagatgatgttagtttacaagtgtttatggatcacttgaagaaacttgctgtgtccagtgctgcttgaagtgctaataatgttaaagacacttaagaagatgaaataatattcaaatttcattttttcctttttccatttatctgtggaaaccaacagatattgctctatattttttgtattagtatggtttgagacaacatatggaaaatgttcacatttgtagattaagctggaattatagaaaaatattcaatgaataagcaaaaatgtncacatttatcattactattgttttttnncttctcaaactcaaatccaaaacattgctgcatcttttgaccaggaggcagctgccattcttatggcccggctagcaatatatagagcagaaacagaagaaggtccagatgtgcttaggtggctggacagacagctcattcgactggtaagaaataaacactgtgcttttctaaatctgtatgctttcatttgtagtaaatgtttgttgcagataatctctttcaaagtacttaacagtgtatctgaaatactgtatgagaaactcctattcaaattactgagacagtagcacagtaatgaatagtagaactcattaatctcttccagtaaactagattgccttttttccttaaaatgtaagagtgacaattatgtaacctattatttttctattcttattggctggaatgaggttagttcccaatttaattctatattattgtaacaatttttagtgcttttttacatatttcttcattgctgtggctttagttctttactttcattttaatggaactattatatgtgcatctcttaaaagaaattaggccaggaatggtggctaatggcagtaatcccagcactttgaaccaggagttcaagatcagcctgngcaacatggcgaaacccctgtctctccnaaaaaaattgcccagcatggtactgtgtgcctgaatnccaactacttcaaaacttactcactaacatcactacaccaattaattttatactttataaatcgtcattaacctactcatcgcaacctcgtcatcatattaacctcttttgaa

SEQ ID NO: 381854 - DNA, 2688 bp, Homo sapiens
agcgggtggcagaggcggcgccagccatgttggccgggcggaggtcttcgctgaggcccggggcggggtggcgccacccctgattgcggtgccacggactgctcctgctgggcggagaggacagattttgcaaagcggaggctgcgacgggtcctgcagggggacagtgaggaaagggccgcctcgtctccgctcctgggggaccgcagaaataagaatcaaactccacaatgacaacctatttggaattcattcaacaaaatgaagaacgagatggagtccgatttagttggaatgtttggccatcaagtcgactggaagctacaagaatggttgttcctgtggcagccctgtttacaccactgaaagagagacctgacttaccacctattcaatatgaacctgttctgtgtagtaggaccacttgccgtgcagttttgaatcctttatgtcaagtggattatcgagcaaaactttgggcttgcaacttttgttaccaaaggaatcagtttccacctagttatgctggtatatctgaactgaatcagcctgctgaacttttacctcagttttctagcattgaatatgtagttctgcgtggtcctcagatgcctttgatattcctctatgtggttgatacttgcatggaagatgaagatttacaagccctgaaagaatccatgcagatgtcattaagtcttttaccacctacagctttggttggacttattacttttgggagaatggttcaggttcatgaacttggatgtgaaggcatttcaaaaagctatgtcttcagaggaacaaaagatttgtctgccaaacaactgcaggaaatgctggggctctctaaagtaccagttactcaagcaacacgtggtcctcaggtacagcagccacctccttccaacagattcttacaaccagtacagaaaatagacatgaatctcacagatcttctgggagaactccagcgagacccttggcctgtaccacagggaaagagacctttgcgttcctctggggtggcactttccatagctgtaggactgctggagtgtacttttcccaacactggtgctcgtatcatgatgttcattggtggtcctgctactcaggggcctggaatggtggttggagatgagttgaagacacctataagatcgtggcatgacattgacaaagacaatgccaaatatgttaaaaagggaactaagcattttgaagcattggctaatcgagctgctacaactggccatgttattgatatctatgcgtgtgcattagatcagacaggtctcctggagatgaaatgctgtcccaaccttactggaggatacatggtaatgggtgattctttcaatacttccttattcaaacaaacttttcaaagagtctttaccaaagacatgcatggacagtttaaaatgggctttggtggtacgctagaaataaagacctcaagggaaataaagatttcaggagctattggaccctgtgtgtcactcaattctaaaggaccctgtgtgtctgaaaatgagataggaacaggtggcacatgtcagtggaagatatgtggacttagtcccactacaaccttagccatatattttgaggttgtcaatcagcataatgctccaattcctcaaggagggcgtggtgcaatccagtttgtgactcagtatcagcattcaagtgggcagagacgcatccgagtgaccaccattgctaggaactgggcagatgctcaaactcaaatccaaaacattgctgcatcttttgaccaggaggcagctgccattcttatggcccggctagcaatatatagagcagaaacagaagaaggtccagatgtgcttaggtggctggacagacagctcattcgactgtgtcagaaatttggagaatatcataaagatgacccaagttccttcagattttcagaaactttctccctttatccacagtttatgtttcatttaagaagatcttctttcctgcaagtttttaacaatagtcctgatgagagttcatattatcgtcaccattttatgcgtcaagatctgacccagtctctaattatgattcagcctatcctgtatgcgtattcttttagtggaccaccagagccggttcttcttgatagcagtagcattcttgcagatcgtattcttctcatggacacattcttccagattttgatttatcatggtgagaccatagcacagtggcggaagtcaggataccaggatatgcctgagtatgaaaatttccgccaccttctgcaagccccagtggatgatgcacaggaaattcttcactccagatttccaatgccaagatacattgacactgaacatggaggcagccaggcccgtttcctcctttcaaaagtcaacccttcacagactcataataatatgtatgcctgggggcaggagatacatcctgaagtatttaggaataaaatgtcatgatggcttcaacttccagaagttattcaacaaaaagaagaaaaaaggaaaaataatgtagaaacataaagcatacgtggcaaaatgttaacagtcagtgaatgtaggtatgctatatgggtgtttattgtacttctctctcaactttaatgtagtcttgaatttttaaaaaaacaagtgttggggataacatacgtgttgggcgatacatcac

SEQ ID NO: 381855 - DNA, 745 bp, Homo sapiens
  misc_feature (37)..(38): n is a, c, g, or t
ctttgcaaaataatcaccaaaggaaagagtacttttnntcattaccacagatcctctgacaaaaaatgtgaaatttccacaaaatatccaacttatgtgactaaacgcagtagtttttttaaaaggggagatagaaaataaatggttttgttggagtgcattttagtaagcctttgcagtaaaatgacggttgtaactactaaaccaaatttagttttcacagcatggttttgttgttttccccttgtttttcagaggtaaattttgcattatatccttcagtattttaacactattttggcagtttacacattactttttgtttttccttcctttttgtgaaatgtattaagttgtggttcttattgaaacagtattatataatgtttgcttaattatatcatgtgatgctcagttctattttgatttattcattagtattcacttttacctttaaagtttacttgtagcaaatatgtttacattgataaagccagatatgttttgacaatgaaatttacatatcaagtactgcaaataaaaggtggtgctatgatatatgcttaggaggacagttttaatgattgtacttgcatgaacacaatcatatgatggtaaagcagaaacttaagaaaaaattgtttatgtgttatattcaattagcttaaataagttgctttgttatattttatttgaattgaactacgctaggcctaaatgccaataaaatatacttttcactgtt

SEQ ID NO: 381856 - DNA, 693 bp, Homo sapiens
agaagttgagtatttatttggtaagtaatggagagtcattgaaggtggacagagggcagatttgagtcttagtatagttgaatcttaagattaaatggaagcagtctgtaggttgaaagtatatttacgaaaataatccaagtgagagggagtaaaggcaagatggtgaaaggaatagatttgggagatattttaaaagtagactcaataggacttgattagaagttgcaggaaagtaattattccagggcatggcaactatgcacaaaatctgaattctgattgaatcctggattaaagggagagaatagctataaagaacataattgggataatttgtgagatttgaatatagatcatatatcagataactagtacagaattattaaatttcttgagagtgataatggtgtggttatgtaggagattcttcttgatcttaggagatacatcctgaagtatttaggaataaaatgtcatgatggcttcaacttccagaagttattcaacaaaaagaagaaaaaaggaaaaataatgtagaaacataaagcatacgtggcaaaatgttaacagtcagtgaatgtaggtatgctatatgggtgtttattgtacttctctctcaactttaatgtagtcttgaatttttaaaaaaacaagtgttggggataacatacgtgttgggcgatacatcac

SEQ ID NO: 381857 - DNA, 156 bp, Homo sapiens
aaacataaagcatacgtggcaaaatgttaacagtcagtgaatgtaggtatgctatatgggtgtttattgtacttctctctcaactttaatgtagtcttgaatttttaaaaaaacaagtgttggggataacagggtattttggggttttaagcctga

SEQ ID NO: 381858 - DNA, 3794 bp, Homo sapiens
agcgggtggcagaggcggcgccagccatgttggccgggcggaggtcttcgctgaggcccggggcggggtggcgccacccctgattgcggtgccacggactgctcctgctgggcggagaggacagattttgcaaagcggaggctgcgacgggtcctgcagggggacagtgaggaaagggccgcctcgtctccgctcctgggggaccgcagaaataagaatcaaactccacaatgacaacctatttggaattcattcaacaaaatgaagaacgagatggagtccgatttagttggaatgtttggccatcaagtcgactggaagctacaagaatggttgttcctgtggcagccctgtttacaccactgaaagagagacctgacttaccacctattcaatatgaacctgttctgtgtagtaggaccacttgccgtgcagttttgaatcctttatgtcaagtggattatcgagcaaaactttgggcttgcaacttttgttaccaaaggaatcagtttccacctagttatgctggtatatctgaactgaatcagcctgctgaacttttacctcagttttctagcattgaatatgtagttctgcgtggtcctcagatgcctttgatattcctctatgtggttgatacttgcatggaagatgaagatttacaagccctgaaagaatccatgcagatgtcattaagtcttttaccacctacagctttggttggacttattacttttgggagaatggttcaggttcatgaacttggatgtgaaggcatttcaaaaagctatgtcttcagaggaacaaaagatttgtctgccaaacaactgcaggaaatgctggggctctctaaagtaccagttactcaagcaacacgtggtcctcaggtacagcagccacctccttccaacagattcttacaaccagtacagaaaatagacatgaatctcacagatcttctgggagaactccagcgagacccttggcctgtaccacagggaaagagacctttgcgttcctctggggtggcactttccatagctgtaggactgctggagtgtacttttcccaacactggtgctcgtatcatgatgttcattggtggtcctgctactcaggggcctggaatggtggttggagatgagttgaagacacctataagatcgtggcatgacattgacaaagacaatgccaaatatgttaaaaagggaactaagcattttgaagcattggctaatcgagctgctacaactggccatgttattgatatctatgcgtgtgcattagatcagacaggtctcctggagatgaaatgctgtcccaaccttactggaggatacatggtaatgggtgattctttcaatacttccttattcaaacaaacttttcaaagagtctttaccaaagacatgcatggacagtttaaaatgggctttggtggtacgctagaaataaagacctcaagggaaataaagatttcaggagctattggaccctgtgtgtcactcaattctaaaggaccctgtgtgtctgaaaatgagataggaacaggtggcacatgtcagtggaagatatgtggacttagtcccactacaaccttagccatatattttgaggttgtcaatcagcataatgctccaattcctcaaggagggcgtggtgcaatccagtttgtgactcagtatcagcattcaagtgggcagagacgcatccgagtgaccaccattgctaggaactgggcagatgctcaaactcaaatccaaaacattgctgcatcttttgaccaggaggcagctgccattcttatggcccggctagcaatatatagagcagaaacagaagaaggtccagatgtgcttaggtggctggacagacagctcattcgactgtgtcagaaatttggagaatatcataaagatgacccaagttccttcagattttcagaaactttctccctttatccacagtttatgtttcatttaagaagatcttctttcctgcaagtttttaacaatagtcctgatgagagttcatattatcgtcaccattttatgcgtcaagatctgacccagtctctaattatgattcagcctatcctgtatgcgtattcttttagtggaccaccagagccggttcttcttgatagcagtagcattcttgcagatcgtattcttctcatggacacattcttccagattttgatttatcatggtgagaccatagcacagtggcggaagtcaggataccaggatatgcctgagtatgaaaatttccgccaccttctgcaagccccagtggatgatgcacaggaaattcttcactccagatttccaatgccaagatacattgacactgaacatggaggcagccaggcccgtttcctcctttcaaaagtcaacccttcacagactcataataatatgtatgcctgggggcaggagtctggagcacctattcttacagatgatgttagtttacaagtgtttatggatcacttgaagaaacttgctgtgtccagtgctgcttgaagtgctaataatgttaaagacacttaagaagatgaaataatattcaaatttcattttttcctttttccatttatctgtggaaaccaacagatattgctctatattttttgtattagtatggtttgagacaacatatggaaaatgttcacatttgtagattaagctggaattataatgagagcaataagaacaaatttattttgcttaccacagtgttatagctggttctagaaatttgaagtctttataacttaattatgtttaataaaaaatagagtctgcctcgtactacagatgtaactcatttgtatattgcagacagacccaaagtggcactgaattttcttgctcaccttttaaaaacttgttccttaattttagccagaaagcaaactgtaattttcagcacttatgtatacactttttctgtacttactaggttaaggcagatttatttttatgatttgtttaggaattatttgattttataatggtaattttcatgatgataatgtttttggttatttggaaagatagtttagagatgaaaggtttttttgggtaacaatcccgcagctgacaaaaaatgtgaaatttccacaaaatatccaacttatgtgactaaacgcagtagtttttttaaaaggggagatagaaaataaatggttttgttggagtgcattttagtaagcctttgcagtaaaatgacggttgtaactactaaaccaaatttagttttcacagcatggttttgttgttttccccttgtttttcagaggtaaattttgcattatatccttcagtattttaacactattttggcagtttacacattactttttgtttttccttcctttttgtgaaatgtattaagttgtggttcttattgaaacagtattatataatgtttgcttaattatatcatgtgatgctcagttctattttgatttattcattagtattcacttttacctttaaagtttacttgtagcaaatatgtttacattgataaagccagatatgttttgacaatgaaatttacatatcaagtactgcaaataaaaggtggtgctatgatatatgcttaggaggacagttttaatgattgtacttgcatgaacacaatcatatgatggtaaagcagaaacttaagaaaaaattgtttatgtgttatattcaattagcttaaataagttgctttgttatattttatttgaattgaactacgctaggcctaaatgccaataaaatatacttttcactgtt

SEQ ID NO: 381859 - DNA, 5480 bp, Homo sapiens
  misc_feature (2968)..(2968): n is a, c, g, or t
  misc_feature (3559)..(3559): n is a, c, g, or t
agcgggtggcagaggcggcgccagccatgttggccgggcggaggtcttcgctgaggcccggggcggggtggcgccacccctgattgcggtgccacggactgctcctgctgggcggagaggacagattttgcaaagcggaggctgcgacgggtcctgcagggggacagtgaggaaagggccgcctcgtctccgctcctgggggaccgcagaaataagaatcaaactccacaatgacaacctatttggaattcattcaacaaaatgaagaacgagatggagtccgatttagttggaatgtttggccatcaagtcgactggaagctacaagaatggttgttcctgtggcagccctgtttacaccactgaaagagagacctgacttaccacctattcaatatgaacctgttctgtgtagtaggaccacttgccgtgcagttttgaatcctttatgtcaagtggattatcgagcaaaactttgggcttgcaacttttgttaccaaaggaatcagtttccacctagttatgctggtatatctgaactgaatcagcctgctgaacttttacctcagttttctagcattgaatatgtagttctgcgtggtcctcagatgcctttgatattcctctatgtggttgatacttgcatggaagatgaagatttacaagccctgaaagaatccatgcagatgtcattaagtcttttaccacctacagctttggttggacttattacttttgggagaatggttcaggttcatgaacttggatgtgaaggcatttcaaaaagctatgtcttcagaggaacaaaagatttgtctgccaaacaactgcaggaaatgctggggctctctaaagtaccagttactcaagcaacacgtggtcctcaggtacagcagccacctccttccaacagattcttacaaccagtacagaaaatagacatgaatctcacagatcttctgggagaactccagcgagacccttggcctgtaccacagggaaagagacctttgcgttcctctggggtggcactttccatagctgtaggactgctggagtgtacttttcccaacactggtgctcgtatcatgatgttcattggtggtcctgctactcaggggcctggaatggtggttggagatgagttgaagacacctataagatcgtggcatgacattgacaaagacaatgccaaatatgttaaaaagggaactaagcattttgaagcattggctaatcgagctgctacaactggccatgttattgatatctatgcgtgtgcattagatcagacaggtctcctggagatgaaatgctgtcccaaccttactggaggatacatggtaatgggtgattctttcaatacttccttattcaaacaaacttttcaaagagtctttaccaaagacatgcatggacagtttaaaatgggctttggtggtacgctagaaataaagacctcaagggaaataaagatttcaggagctattggaccctgtgtgtcactcaattctaaaggaccctgtgtgtctgaaaatgagataggaacaggtggcacatgtcagtggaagatatgtggacttagtcccactacaaccttagccatatattttgaggttgtcaatcagcataatgctccaattcctcaaggagggcgtggtgcaatccagtttgtgactcagtatcagcattcaagtgggcagagacgcatccgagtgaccaccattgctaggaactgggcagatgctcaaactcaaatccaaaacattgctgcatcttttgaccaggaggcagctgccattcttatggcccggctagcaatatatagagcagaaacagaagaaggtccagatgtgcttaggtggctggacagacagctcattcgactgtgtcagaaatttggagaatatcataaagatgacccaagttccttcagattttcagaaactttctccctttatccacagtttatgtttcatttaagaagatcttctttcctgcaagtttttaacaatagtcctgatgagagttcatattatcgtcaccattttatgcgtcaagatctgacccagtctctaattatgattcagcctatcctgtatgcgtattcttttagtggaccaccagagccggttcttcttgatagcagtagcattcttgcagatcgtattcttctcatggacacattcttccagattttgatttatcatggtgagaccatagcacagtggcggaagtcaggataccaggatatgcctgagtatgaaaatttccgccaccttctgcaagccccagtggatgatgcacaggaaattcttcactccagatttccaatgccaagatacattgacactgaacatggaggcagccagagtagtgttaatttgtttgtgtgtttgtttgttgttaggtttgcagtgaggtgtacctgcttgccttctgattttaatagattgcttcataaagcagacagaaaggtaaggagataggtggggaaggtatcagtgcttactttttgcattagcttttgagagcaaaacagtaagattattgactagttgcctaaacctggcactttccatcatcttctgtctctagcctagcttcctgaacagggccaggatggcattgtggtggtatactagctttggttgaacaagaaaatgtgaacagcttggaaagtaatatacttttcttaaagccgtttatttactgttaaagtctatgaatatgacatttgtggtaacttacattttttcattgtcttcattctatcattccaattttctagaaaataaaattttatgtaataggaaaacactgtagtattatgaaaaggttttgtggcttttaggattttgaggatacatatacgttagatacatatacatacatacacagttgctttgagaccttcagaaggctaagttaggttccttaacatactctcataaaatacttcttactnctcttttgtaattcttataagagttataataaattaattataagttgttattaatttgttttacatgctctttgaaggcagggactatgctttgtattccctagtgcctagtacggtattataaaataggtagcaaatatcagtaactgttattcagaaatgataattactattagttttactgtatttatatgagagttatttcatattgagaatttgcaaagtacttctgcatgccttatctcatttgatcctcataagaattctagtgttattttcatttaacagataataaaactgagatctaggttacttatggccaagggaacacagtaaatacaggagtgggatttgagtcctggtactccagggccagtgctcttcactgttaggttaaactgattccttagagagtagaaaaagattttgtatgatactaaatttcaaaagatgttactgtctatgtgcttccattatgagttaaaaatcttactggttctttcattgatgtctcactgtgtgtattaccattttcctcttttattctggttattattttcatgatgataagccatagtgggtagaaggatnaaatgttggatcacttgtctcatagaatcacctgtggtttaagaaagcttaagggtcattattttaagcaaaagaacatacagattttcatggcttttgtttttatcattatttgggattttgaacttctgaccaagtgtttagtaatttcacaccaaccttgtcataattgttgcacacataatttttatatgctgagttttggactcaacaatgtatttgttattttggatgtatgatttggagagaagaggtgcatttattatttatttgtaacacttagtgacctatacatttcaaagtttaatcttttaaaaattaagttaataaaattaattttaccaacacatactaaataaaattgattttgcatgatataattattcagctgatattgactgaaaccatttttgatggataatgttatttcttctttgcttttaaggcccgtttcctcctttcaaaagtcaacccttcacagactcataataatatgtatgcctgggggcaggagtctggagcacctattcttacagatgatgttagtttacaagtgtttatggatcacttgaagaaacttgctgtgtccagtgctgcttgaagtgctaataatgttaaagacacttaagaagatgaaataatattcaaatttcattttttcctttttccatttatctgtggaaaccaacagatattgctctatattttttgtattagtatggtttgagacaacatatggaaaatgttcacatttgtagattaagctggaattataatgagagcaataagaacaaatttattttgcttaccacagtgttatagctggttctagaaatttgaagtctttataacttaattatgtttaataaaaaatagagtctgcctcgtactacagatgtaactcatttgtatattgcagacagacccaaagtggcactgaattttcttgctcaccttttaaaaacttgttccttaattttagccagaaagcaaaaaaacaatagtaatgataaatgtgaacatttttgcttattcattgaatatttttctgtaattttcagcacttatgtatacactttttctgtacttactaggttaaggcagatttatttttatgatttgtttaggaattatttgattttataatggtaattttcatgatgataatgtttttggttatttggaaagatagtttagagatgaaaggtttttttgggtaacaatcccgcagctgacaaaaaatgtgaaatttccacaaaatatccaacttatgtgactaaacgcagtagtttttttaaaaggggagatagaaaataaatggttttgttggagtgcattttagtaagcctttgcagtaaaatgacggttgtaactactaaaccaaatttagttttcacagcatggttttgttgttttccccttgtttttcagaggtaaattttgcattatatccttcagtattttaacactattttggcagtttacacattactttttgtttttccttcctttttgtgaaatgtattaagttgtggttcttattgaaacagtattatataatgtttgcttaattatatcatgtgatgctcagttctattttgatttattcattagtattcacttttacctttaaagtttacttgtagcaaatatgtttacattgataaagccagatatgttttgacaatgaaatttacatatcaagtactgcaaataaaaggtggtgctatgatatatgcttaggaggacagttttaatgattgtacttgcatgaacacaatcatatgatggtaaagcagaaacttaagaaaaaattgtttatgtgttatattcaattagcttaaataagttgctttgttatattttatttgaattgaactacgctaggcctaaatgccaataaaatatacttttcactgtt

SEQ ID NO: 381860 - DNA, 2980 bp, Homo sapiens
agcgggtggcagaggcggcgccagccatgttggccgggcggaggtcttcgctgaggcccggggcggggtggcgccacccctgattgcggtgccacggactgctcctgctgggcggagaggacagattttgcaaagcggaggctgcgacgggtcctgcagggggacagtgaggaaagggccgcctcgtctccgctcctgggggaccgcagaaataagaatcaaactccacaatgacaacctatttggaattcattcaacaaaatgaagaacgagatggagtccgatttagttggaatgtttggccatcaagtcgactggaagctacaagaatggttgttcctgtggcagccctgtttacaccactgaaagagagacctgacttaccacctattcaatatgaacctgttctgtgtagtaggaccacttgccgtgcagttttgaatcctttatgtcaagtggattatcgagcaaaactttgggcttgcaacttttgttaccaaaggaatcagtttccacctagttatgctggtatatctgaactgaatcagcctgctgaacttttacctcagttttctagcattgaatatgtagttctgcgtggtcctcagatgcctttgatattcctctatgtggttgatacttgcatggaagatgaagatttacaagccctgaaagaatccatgcagatgtcattaagtcttttaccacctacagctttggttggacttattacttttgggagaatggttcaggttcatgaacttggatgtgaaggcatttcaaaaagctatgtcttcagaggaacaaaagatttgtctgccaaacaactgcaggaaatgctggggctctctaaagtaccagttactcaagcaacacgtggtcctcaggtacagcagccacctccttccaacagattcttacaaccagtacagaaaatagacatgaatctcacagatcttctgggagaactccagcgagacccttggcctgtaccacagggaaagagacctttgcgttcctctggggtggcactttccatagctgtaggactgctggagtgtacttttcccaacactggtgctcgtatcatgatgttcattggtggtcctgctactcaggggcctggaatggtggttggagatgagttgaagacacctataagatcgtggcatgacattgacaaagacaatgccaaatatgttaaaaagggaactaagcattttgaagcattggctaatcgagctgctacaactggccatgttattgatatctatgcgtgtgcattagatcagacaggtctcctggagatgaaatgctgtcccaaccttactggaggatacatggtaatgggtgattctttcaatacttccttattcaaacaaacttttcaaagagtctttaccaaagacatgcatggacagtttaaaatgggctttggtggtacgctagaaataaagacctcaagggaaataaagatttcaggagctattggaccctgtgtgtcactcaattctaaaggaccctgtgtgtctgaaaatgagataggaacaggtggcacatgtcagtggaagatatgtggacttagtcccactacaaccttagccatatattttgaggttgtcaatcagcataatgctccaattcctcaaggagggcgtggtgcaatccagtttgtgactcagtatcagcattcaagtgggcagagacgcatccgagtgaccaccattgctaggaactgggcagatgctcaaactcaaatccaaaacattgctgcatcttttgaccaggaggcagctgccattcttatggcccggctagcaatatatagagcagaaacagaagaaggtccagatgtgcttaggtggctggacagacagctcattcgactgtgtcagaaatttggagaatatcataaagatgacccaagttccttcagattttcagaaactttctccctttatccacagtttatgtttcatttaagaagatcttctttcctgcaagtttttaacaatagtcctgatgagagttcatattatcgtcaccattttatgcgtcaagatctgacccagtctctaattatgattcagcctatcctgtatgcgtattcttttagtggaccaccagagccggttcttcttgatagcagtagcattcttgcagatcgtattcttctcatggacacattcttccagattttgatttatcatggtgagaccatagcacagtggcggaagtcaggataccaggatatgcctgagtatgaaaatttccgccaccttctgcaagccccagtggatgatgcacaggaaattcttcactccagatttccaatgccaagatacattgacactgaacatggaggcagccaggcccgtttcctcctttcaaaagtcaacccttcacagactcataataatatgtatgcctgggggcaggagtctggagcacctattcttacagatgatgttagtttacaagtgtttatggatcacttgaagaaacttgctgtgtccagtgctgcttgaagtgctaataatgttaaagacacttaagaagatgaaataatattcaaatttcattttttcctttttccatttatctgtggaaaccaacagatattgctctatattttttgtattagtatggtttgagacaacatatggaaaatgttcacatttgtagattaagctggaattataatgagagcaataagaacaaaaaaaaaaaaaaaaaaaaaaaaaaaaaatgtgtgtgtggggcccgccggcgcaccccggaaaaagttttccaaaaccattctcgtgggcgcgcgcggcgcccagaggttaatgggaaactggcccaacggccccaaggaaacccggccccgcactggcgcggcgtccccccaaaaaaaagcgcggcggaaccggggtcggaacaatccgagggtccgggcacgggcccaccgggtcccaggagtgaagacccgccggga

SEQ ID NO: 381861 - DNA, 2510 bp, Homo sapiens
agcgggtggcagaggcggcgccagccatgttggccgggcggaggtcttcgctgaggcccggggcggggtggcgccacccctgattgcggtgccacggactgctcctgctgggcggagaggacagattttgcaaagcggaggctgcgacgggtcctgcagggggacagtgaggaaagggccgcctcgtctccgctcctgggggaccgcagaaataagaatcaaactccacaatgacaacctatttggaattcattcaacaaaatgaagaacgagatggagtccgatttagttggaatgtttggccatcaagtcgactggaagctacaagaatggttgttcctgtggcagccctgtttacaccactgaaagagagacctgacttaccacctattcaatatgaacctgttctgtgtagtaggaccacttgccgtgcagttttgaatcctttatgtcaagtggattatcgagcaaaactttgggcttgcaacttttgttaccaaaggaatcagtttccacctagttatgctggtatatctgaactgaatcagcctgctgaacttttacctcagttttctagcattgaatatgtagttctgcgtggtcctcagatgcctttgatattcctctatgtggttgatacttgcatggaagatgaagatttacaagccctgaaagaatccatgcagatgtcattaagtcttttaccacctacagctttggttggacttattacttttgggagaatggttcaggttcatgaacttggatgtgaaggcatttcaaaaagctatgtcttcagaggaacaaaagatttgtctgccaaacaactgcaggaaatgctggggctctctaaagtaccagttactcaagcaacacgtggtcctcaggtacagcagccacctccttccaacagattcttacaaccagtacagaaaatagacatgaatctcacagatcttctgggagaactccagcgagacccttggcctgtaccacagggaaagagacctttgcgttcctctggggtggcactttccatagctgtaggactgctggagtgtacttttcccaacactggtgctcgtatcatgatgttcattggtggtcctgctactcaggggcctggaatggtggttggagatgagttgaagacacctataagatcgtggcatgacattgacaaagacaatgccaaatatgttaaaaagggaactaagcattttgaagcattggctaatcgagctgctacaactggccatgttattgatatctatgcgtgtgcattagatcagacaggtctcctggagatgaaatgctgtcccaaccttactggaggatacatggtaatgggtgattctttcaatacttccttattcaaacaaacttttcaaagagtctttaccaaagacatgcatggacagtttaaaatgggctttggtggtacgctagaaataaagacctcaagggaaataaagatttcaggagctattggaccctgtgtgtcactcaattctaaaggaccctgtgtgtctgaaaatgtaagttgtgtttattctaaaaagaaaatacaggaccaggaactgtggcttgcacctgtaatcccaggtacttgggaagctgaggcaggaggattgcttaagcccaggagttagagaccagctcaggcaacatagagagaccctgttcccctcctgttatccccccaaaaaagaaaaaaagacacagcgaacgcacaggacagcaccaataaaaacttggggtggcagcctatagcattcctttcaaaattcttatattgattgttttaggtagttcagctcccattggtatacctctattcatggttgctctttctgcatacccttttcccatccatccctaattaaaacttttgtactgtcaccagtcttctattttttatgcctaaattatgtcttgccccagtgtgcctaaaaaaaaacaaaaacaaaaaaaactcatgatttggaaatttggagacttctgaaagtcaaaattagctctaaattgatttttgataccagaattttcaaaaaagtaaccaaattagccagatttggaatttcagttctttatgttctttttatccaatttaatggaagtataacgtactctaaaatggtagaatcatgtagctgtggagaggatgatgggacaaataatacaaagtgggtaatcaactttaaaaatgacaaagctaaaaaattaatatgtacaagcagtttgcgtggtaaaggtctgtctatatctatgacgttttcttgggaatcagagtgcttaacaattctcatccagagaacatgtgttcgtaaatgcatatattatatgttaaatcagtttctctttatacagatcaagtagttggatagaaggataatgttagttgcaattacttcattaaatagcatatacttttattttttattttattttttttgagacggagtctcgctttgcctcgcaggttggagtgcagtggcgccttctcggct

SEQ ID NO: 381862 - DNA, 799 bp, Homo sapiens
tttaatagtatgagcatggtcattgaatgacttctatagttcattgctagaatagctaaaatattttggagaactagaacagaataactggaatttccctaacaattttaataaaaagtatgctggtgttgattcagtattggacaataagtggaaagaataacattcggaaataaacattcagaagataagcccagtatatgtaagaatctaataagataaatatatttcaaattaatagggaaattatagttattctacatttacagaagattttggaagaaggtgctggctatttgttatggggaaaggatggattaattgctaccccatatttaagtatgttcttttttccttttttgtaatggcagtttgtcagtgtgaaataaaatgttcttttttaattaaaatctaaattaaaaattaaacatggagacaaaaggaaaataggctggcatttttacagtgtcagggtgggttagcaaagacatgatatcagaagcagaaaataaagtgatccgtttgactaaatagaaacaaaacatatagcagagacttgtaaataaaattgaaggcaatcagtaaactgggaaaatacatttgtaattttattgacaaggggtcaacattcttactatttaaagagcccttacagatgaagaaaaagaccccaacacctcagtagaatgcaggctgaagaacatgagccagcagttctcacaggactaaatataaactacacatatatagatattcttttgatttaataatcctacatgtagccatttgttctaatagc

SEQ ID NO: 381863 - DNA, 365 bp, Homo sapiens
aacttccttggcttgtttaacttacaaaacctttcgaaatgcagtttgctgtgcctgtgtttggagtgtttagttttgtagaaaaaaagaggtgagaagtagaataacatttacattgattttcttcaaggttgtgctctactgagaaatagtattttgtcttactaaagcacatgtttaagaaatggagattgctgtcttgcaaaacccccaatataaactccagcaggctaaaatgcctgtagcctctagttgattataattctgtaccaaatcaaaagtgactgcatttaaaaacttccataaagaaaagcttagacatttcaaactaatgcttggccaatgcaaaattatttattccttcc

SEQ ID NO: 381864 - DNA, 669 bp, Homo sapiens
gagaatgactatggacagaaggccaccatcctccacagagcaccctgtcctgagtaggggttgtgctcattaccccaggccagtggtagcttcctcaggagcctggccacttccaacggtagcactgaagtcatgcaaatgcatagtcaggtagattcagaccttgtccacaccttcctgggcaacccccaccatgaacctgtcagcctctttcccatagctaatagacatttcccaggccttgaggggccccaccctgtctctttcatcaaacctgatggtccaggctgggcatccctctcctcctccatccccagacatcaccaggtctaatgtttacaaacggtgccagcccggctctgaagccaagggccgtcccgtgccacggtgctgtgagtattcctccgttagctttccccataaggttgggagtatctgcttttgtgtctgagatgggcccctcttttcagaggccgcagggtgggtgatggagaaggctgagaacctttcagaccctctgtgtgggctgggctggtcagaatcagggtgtacctccccgacaccttctttttcagtgatgttttctcttctccctgcctttcctctgcctcctcccctgccagccctagcgtgactacccagagacaaaaaaaaaaaaaaaaaaaaaag

SEQ ID NO: 381865 - DNA, 786 bp, Homo sapiens
taacatgaaagtgaagtgtctaaagcagggagatctggaattccactagcctggttcggctcttttcatttttctgagctcctttgcagcacctggctgggcgccgacgtagttttacagcattgagactgtagcctggatcactttgaaatctttttctttttccttttcatacaatatcaggaaattttcagtgatacagttgtcatgaatgtcgccctgcaaatgccctaatgatccctctgtggacagaccaaagttgacccgttggctcttgcagattcatttttgttttttgtttttgtctttgtctcacttgaatgatttcattaggattactcctgagaagtaggattgctgggccaaagggcacacagacttccccctttcttaaggaattttgctaacttgctttgcaaaagagcccctgactctgcatggccccccggggcagccgcgggttcctttccccacagccgtgccagtgccagccttgagtctgcgtgaccttgagccgcagggaagcggatgagtggccagcagccctctgctcctgcctcctcactgtgtgcacgcctttctgcaaatgccgctgcccgctgccgtgcgctccgcttccagacagtaattgttacaagacctctaactgcctcgacgaccacatggcccttaaaaatggtcatttcccccgtgagcattttctcttcatcgaaaccactttgtttatacttgctggtgacagtgtgactgtggacttgcctccagtttggttttctccctagttat

SEQ ID NO: 381866 - DNA, 491 bp, Homo sapiens
gaggcacaagaatcacttgaacctgggaggcagaggttgcaatgagctgagatctcgccattgcactgcagcctgggcaacaagagcgagactccatttcaaaaaaaaattatctgggtgtgatggcacatacctgtagtcctaggctctcttaggatgatgaagcaggagaattgcttgagcccaggagttcgagattgcagggagccatgattgattgcaccattgcagtctagcctaggtgatagagctaataattatgttatagaagaggcattaacttcaagataactaagtgaaagcctggtattaacaaattttaaaaagtaacaaataaataatgatctaagctacccagattagtttctggaaaatttgtttaaccaagacaatctccaagggaagtcaggctaataattgtgtctcagccattactctgcttttaggagggaaggtacaggatggagtgagaaagaaaagaaaaaaaatca

SEQ ID NO: 381867 - DNA, 1723 bp, Homo sapiens
tctaattgctttactacattttctcatttagttctcaacccaaccaaggaaactggagaatacacagtgaggagtagagccaggatttaatcccaagtattctgactctagagccagcagttttaaccattatatcatattgcttgttaagctgtaggttaaacatggtatataattttattttttgtttttgttttgagacggtctccctgccgcctaagctctggagtgcagtggttccatcaatatcctgagctcaagcaatcctcccgccttagcctcccaagtagttgggagtataggcatgagctaccatgcccagctaatttaaaaaaacaaattttttttaagagatagggtcttaactatattgttcctcttgtcttgaattcatggcctcaagtgattcttcgacctctggaagtgttgagattacaggcacgagccaccacacccacccaacatggtatatcattgttttaaatttgcatttctttaattagggtgtttttatatgtgtataaactgtttttattttaatttttttccctgaaaatggcctttaatgtattttgccacttactattgggctgttgacttttttttttgaaaccagtcctccctctgtcacccaggctggagtgcagtggcatcatcttggttcactgtaacttctgcctctcaggtccaagcaatcctcccacctcagcctcccgaataactggaactacagggatgcaccaccacacccagctgattttttaattttttttgtagagatgggattttgccatgttgcccaggctggttttgaactcctgggcccaagccatctgcccacctcagcttcccaaagggctgggattacaggcttgagccactgcacccagcctgttgatcatgttcattaatctgtttgaactccatatattaaggaaattagtcctttgtcaaatatgttgcaaatattccctccgatttgtcacttactttcattttgttggtggtttttctgttttgttgttgtttttctgtgggttttttttttttttttttgccatggacatgtttttagtacttatgtagtagtcagatgtattactcattttttctgtgctctggatcttatgctttgaatggctttttgtgaattccaatattttaaaaataatttacccctagcttcagttcttacatttaaatatttgttccttctggaattttagtgaatgtggacaaggttatgcttcagttgccttaactagttgccttggcatcattaataagttttcttttcctctactgatttgaaatgccatttttaatgtattccctaacatatttgggtctgtttctggatcctctaacccactgttctagagagaaaggtgatcgttttagattatttgtctctctgtaatctaaaatccaaggtacacgctgggcacagtggctcacacgtgtaatcctagcactttcggaggctgaggcaggtggaacagttgaggacagaagttcgagaccagcctgaccaacatggcgaaactctgtttctactaaaaatacaaaaattagctgggcatggtgacacgtgcctgtagtcccagctactcgggaggctgaggcaagagaatcgcttgaacccgggaggtggaggttgcagtgagccgagattgcgccactgcactccatcccccgggcgacagagtgagactccatctca

SEQ ID NO: 381868 - DNA, 3599 bp, Homo sapiens
  misc_feature (2190)..(2190): n is a, c, g, or t
  misc_feature (2462)..(2462): n is a, c, g, or t
ggtctagatgtgtgctgtccagcatggagccgggagccacatggagctgttgagcacctgaaatatgactagttcaaattgaggtgctttgtaaatatgaaatatgctgaatttttaagtttttttcttttctttttttttttgagataggatcttggtctgccacctgggttggagtcagtggcatgatcctagctcactgcagccttggacacctgggttcaagcgatcctcctccctcagactcacaggtagctgggactacaggtgcatgccaccatgtccagctaatttttaaatttacttgtagagacgaggtctcaccatattgcccagggtggtctcaaacccctggcctcaagcgatccttgtgcctcagcctcccaaagtgttgggattacagacgtgagctacaacacccagcaggttttggagatttagtacaaaaaaagaacgtaaaatgtctgattataattttttaaatactgattaaatgttgaaataatatttggatttattgggttaaattcaatatatttaaattttatgttttaattttttcatgtagctactagaaaatttaaaattacatttgtgggtcgcactctttttgttgggcagcactggtctagatcaggagttggtaaactatggcctatgggccatatccatattgctgcctgtttggggatggcctgagagtaagggtgatttttatagatgaacatttacaattgattcagtcaaatggaacactaactttgaatcccagttaagtgaaatgttttctcaacccccaaaattccattattttcattagtagtacaaaacaattgtactcagttatattttgaatttgtcaaaaatgttatggaaaaatgtttttctttaattatgcaagtagctacagaatatttttgactttgccacttggcctgcaaagcctaaaatttttacactccgcccttttacagaaaaaaaattgccaacttctggtttacaccctacaaatttaaccaagagatacctttggatcgcccctgggctctctctatccctgaggaggtaaaatattatctcactccactctcagctatctgttcaaagatcagaatcctatgagaggggacagtccaaagatagaatctgaaaaacaaaagtaaacgttaaagaaatggagaatgggaacttacctggttggcactgtagttagtggccatgatcttgtgctgtttacactcgttgcttggcaactgcagaaggccgacctcctgggactaccaatgagcagaggctgcctttctcttctgcttattattattcacttccttggctcacactgcccccatttgttttctctggaacttagattcatttttattttacagacgggaaagactgagtaaatgtgagaaaattagctgaatagccactactttttttctggcataacctacccctgcttaagaacttccacgggcctttgattggggtttttaaccactttaacaaaccatgtaaccctgagagctatgcttgttggacaacatggtgtaatgtaccacaggctgtagagccagatactggggtttgaatccttattcaacatgggaacataggagctatatgacattaaacaactgtcttgtcttcactaaatttctatcaactcatttgtattgtggggataatagagcctgcttttacagggtaagtgagataaaatgaataaagtgtctagacaatatcatagcatagtaggtattcaatcctggtgagatcctgtttataaggcccactactttgtcttatcaggcagaataacaaaggaacaatatttaaaaagcaactagctcaaatctgtccccagaaggaaaaacatatcttgtccttggtccttaaaaaatttcctctgtcactgtctagaatcagcacctaagaacacaggcgtttagtgttgactggaataaaatggaatcgggtgctggtgcagggagattgagcagggatgaagagagaaaatcacagagtggaaaggatcaggtttggagagttcaatggggggctgccaggacataagcctaatatgtgtgggacaaggaaacccctctgaaactcataaaatggtattgtaatacccatctatgaggtggttaggagaattaataagtaagtagaactgtgctttgngaattgtaaagtgaatttatatataaggtgtcaagatgaaagggaaaaactaagaaataagttgcccaaagatatcattaggaccaggagaccattataaagtatatccaggccgggcacggtggctcatgcctgtaatcccagcactttgggtggccgaagcagacggatcacaaggtcaggagttcgagaccagcctggccaacatggagaaaccctgtctctactaaaaatacaaaaaattagccaggcatggtggtgcatgcctctantcccagctactcgggaggctgaggcaggagaattgcttgaacccgggaggctggagtgcagtggcatcatcttggttcactgtaacttctgcctctcaggtccaagcaatcctcccacctcagcctcccgaataactggaactacagggatgcaccaccacacccagctgattttttaattttttttgtagagatgggattttgccatgttgcccaggctggttttgaactcctgggcccaagccatctgcccacctcagcttcccaaagggctgggattacaggcttgagccactgcacccagcctgttgatcatgttcattaatctgtttgaactccatatattaaggaaattagtcctttgtcaaatatgttgcaaatattccctccgatttgtcacttactttcattttgttggtggtttttctgttttgttgttgtttttctgtgggttttttttttttttttttgccatggacatgtttttagtacttatgtagtagtcagatgtattactcattttttctgtgctctggatcttatgctttgaatggctttttgtgaattccaatattttaaaaataatttacccctagcttcagttcttacatttaaatatttgttccttctggaattttagtgaatgtggacaaggttatgcttcagttgccttaactagttgccttggcatcattaataagttttcttttcctctactgatttgaaatgccatttttaatgtattccctaacatatttgggtctgtttctggatcctctaacccactgttctagagagaaaggtgatcgttttagattatttgtctctctgtaatctaaaatccaaggtacacgctgggcacagtggctcacacgtgtaatcctagcactttcggaggctgaggcaggtggaacagttgaggacagaagttcgagaccagcctgaccaacatggcgaaactctgtttctactaaaaatacaaaaattagctgggcatggtgacacgtgcctgtagtcccagctactcgggaggctgaggcaagagaatcgcttgaacccgggaggtggaggttgcagtgagccgagattgcgccactgcactccatcccccgggcgacagagtgagactccatctca

SEQ ID NO: 381869 - DNA, 2709 bp, Homo sapiens
  misc_feature (1300)..(1300): n is a, c, g, or t
  misc_feature (1572)..(1572): n is a, c, g, or t
ccgcctccgacaggacgcgcctggcgaaaacgctacacgcttacaagaactatggacgacatgggcaacttacctggtcggcactgtagctcagtggccatgatctatgtgactgtttacactcgttgcttggcaactgcagacggccgacctcctgggactaccaatgcagcacgaggctgcctttctctactgctatattattattcacattctttgaacagatagctgagaggggacagtccaaagatagaatctgaaaaacaaaagtaaacgttaaagaaatggagaatgggaacttacctggttggcactgtagttagtggccatgatcttgtgctgtttacactcgttgcttggcaactgcagaaggccgacctcctgggactaccaatgagcagaggctgcctttctcttctgcttattattattcacttccttggctcacactgcccccatttgttttctctggaacttagattcatttttattttacagacgggaaagactgagtaaatgtgagaaaattagctgaatagccactactttttttctggcataacctacccctgcttaagaacttccacgggcctttgattggggtttttaaccactttaacaaaccatgtaaccctgagagctatgcttgttggacaacatggtgtaatgtaccacaggctgtagagccagatactggggtttgaatccttattcaacatgggaacataggagctatatgacattaaacaactgtcttgtcttcactaaatttctatcaactcatttgtattgtggggataatagagcctgcttttacagggtaagtgagataaaatgaataaagtgtctagacaatatcatagcatagtaggtattcaatcctggtgagatcctgtttataaggcccactactttgtcttatcaggcagaataacaaaggaacaatatttaaaaagcaactagctcaaatctgtccccagaaggaaaaacatatcttgtccttggtccttaaaaaatttcctctgtcactgtctagaatcagcacctaagaacacaggcgtttagtgttgactggaataaaatggaatcgggtgctggtgcagggagattgagcagggatgaagagagaaaatcacagagtggaaaggatcaggtttggagagttcaatggggggctgccaggacataagcctaatatgtgtgggacaaggaaacccctctgaaactcataaaatggtattgtaatacccatctatgaggtggttaggagaattaataagtaagtagaactgtgctttgngaattgtaaagtgaatttatatataaggtgtcaagatgaaagggaaaaactaagaaataagttgcccaaagatatcattaggaccaggagaccattataaagtatatccaggccgggcacggtggctcatgcctgtaatcccagcactttgggtggccgaagcagacggatcacaaggtcaggagttcgagaccagcctggccaacatggagaaaccctgtctctactaaaaatacaaaaaattagccaggcatggtggtgcatgcctctantcccagctactcgggaggctgaggcaggagaattgcttgaacccgggaggctggagtgcagtggcatcatcttggttcactgtaacttctgcctctcaggtccaagcaatcctcccacctcagcctcccgaataactggaactacagggatgcaccaccacacccagctgattttttaattttttttgtagagatgggattttgccatgttgcccaggctggttttgaactcctgggcccaagccatctgcccacctcagcttcccaaagggctgggattacaggcttgagccactgcacccagcctgttgatcatgttcattaatctgtttgaactccatatattaaggaaattagtcctttgtcaaatatgttgcaaatattccctccgatttgtcacttactttcattttgttggtggtttttctgttttgttgttgtttttctgtgggttttttttttttttttttgccatggacatgtttttagtacttatgtagtagtcagatgtattactcattttttctgtgctctggatcttatgctttgaatggctttttgtgaattccaatattttaaaaataatttacccctagcttcagttcttacatttaaatatttgttccttctggaattttagtgaatgtggacaaggttatgcttcagttgccttaactagttgccttggcatcattaataagttttcttttcctctactgatttgaaatgccatttttaatgtattccctaacatatttgggtctgtttctggatcctctaacccactgttctagagagaaaggtgatcgttttagattatttgtctctctgtaatctaaaatccaaggtacacgctgggcacagtggctcacacgtgtaatcctagcactttcggaggctgaggcaggtggaacagttgaggacagaagttcgagaccagcctgaccaacatggcgaaactctgtttctactaaaaatacaaaaattagctgggcatggtgacacgtgcctgtagtcccagctactcgggaggctgaggcaagagaatcgcttgaacccgggaggtggaggttgcagtgagccgagattgcgccactgcactccatcccccgggcgacagagtgagactccatctca

SEQ ID NO: 381870 - DNA, 728 bp, Homo sapiens
gacaaaaattattttatattactatttcatcatagaagcaatatatacatactcccagaagtatttgaaccagaagataatggactgttggccagtagagcagatctgggcacgggacccacagcatccagtacattaatcctttacagttccttccatgtgaattgtctgagtgtgctctttgtccattcctccttttgttaattaatttttaacaattcaacagttattgtctactatatgttagagctcttgaatctttctaagcgctgtccttcaatgaaacacagggatttatttgccagttccttatattaaagagaggatctccttatagtagctgctatataatagtctcttgtctgctttatttttaatataatactttctcagtttcctgttctccttgtaagtaagtatcatggttttggcctggacagggtgaaaattctcatactgtagaaattatcagtggacttttgtctatacttcttccatttgctttgtatatagtaagaccagccaaggatataaattctcatatccaaatttttcatctaatattttaatatttaactttttaatccaacaggattttatgttgaattttttgtgataagagagatttaaaggaatgtactttcctcagaaaacaagacaaattctacagtggtgtctattaaatatttcctacctattcatgtgtgactctttactctatatcccaa

SEQ ID NO: 381871 - DNA, 191 bp, Homo sapiens
acctcacacagagtgggaaccatgggtctctgggcttggagaaagaatactttttgatgtggccttagccccatgtccatgagcccagcggtcgttcagccaccagactcagcttttcctcactgaataaaggggtcatttttccctggctgccgaaccagaattgccttgacttgcactgaacttcagct

SEQ ID NO: 381872 - DNA, 461 bp, Homo sapiens
agtccttgtgaggctgtttccttaccctttgatgaggtgtagtcacagcttcagaggctccccgcaaagtttttgtcatcagtgatggaacacaagatgtaagagctgaagagttatgaacacaaatgtgaaaccttgcctactggagctgccactagaaagcccgccaacatggcattgggacgaatataatcaaagtctcccacccctaaacagagaaaaacaaaatatagcatatggccaaagtgatttatctttatactttttttaatctttaaaagatatttattgccctataatatacctacagaaaaatgcactgaccctcagtgtacatgagattctttcataaatttcatgtgtacatgcgtacttcaagtgtacgtgaaatgacctctgtttatattccatcacaatgcctggacaagacttacttaatataagtgaaaaaatcactttct

SEQ ID NO: 381873 - DNA, 325 bp, Homo sapiens
attaatttgatgttgcattcaaattaaactcatttgtgtttcctattggggactcttcagagggataaaaatgcttcctactaggagcagtagccatgttaacaggaggttgagcatatatagtctcaggtgatattacaaggagtgatagacagctgggtgggtgaacatgggctatctctccattgaattgtctcctttagtgtcccttaagaagagtttttaatctcctgcatatagatcttaagcatcttttatcagatttatacctagggcctaggtaattgatgctttttttttttaactaatttaaatgtcttttgta

SEQ ID NO: 381874 - DNA, 315 bp, Homo sapiens
catctacataagatgtagtatggactgatgccaagtgagcctggggtggaaatcagaactggatgcaaatcctgatgttatccgagaacaggcacctgttacataggctgtgttactgtggcaaaggtaatggtaaaacacagactggccagaagcattgtgtacaatgagaccttgcaactttgtgtatattagtatgtggggggatgtgaattattaaagacatttaaaactgactgaatcagcaacctctaatctataaaaaaaaattccagacgtccagccgggcacgttctcgtgcctataatcttagtg

SEQ ID NO: 381875 - DNA, 335 bp, Homo sapiens
aaggtcagcaaaagatgagaggaccatttgtgctactgtgccttgtccaaactcttctctgtggtcagtcacctgcaaggccttaattgagtcaggcactatagaatatgcaaaaacgaagagatagattctgatctcaagagtcttgcaatatagctgagaaggaagaaggtaacacacccactgaagactgaagaattggatataatagtggaaagatgtactcaatggtgagtaatcaattcttttgttgttgttgttgttgttgttgttgttgttgtttttgagacggagctcggctctgtcgcccaggctggagtgcagtggtacgatct

SEQ ID NO: 381876 - DNA, 616 bp, Homo sapiens
caacaatccattggctaacgaggtcgataacgccagacgcaagacgccgggcctacagcgggagcgtgaggaaagccgtgcgttgcgttccaaggcatctgtgagcccgcggagtatacaccatgagcaaagctcaccctcccgagttgaaaaaatttatggacaagaagttatcattgaaattaaatggtggcagacatgtccaaggaatattgcggggatttgatccctttatgaaccttgtgatagatgaatgtgtggagatggcgactagtggacaacagaacaatattggaatggtggtaatacgaggaaatagtatcatcatgttagaagccttggaacgagtataaataatggctgttcagcagagaaacccatgtcctctctccatagggcctgttttactatgatgtaaaaattaggtcatgtacattttcatattagactttttgttaaataaacttttgtaatagtcaaaaatgctttctcagatgttctgaatatagaatatcagctctcattccagttttttctaacatgaattttcctggttgacattgatttcaaagggttttatgcattaaagtgaaagaatcttattaaatgtgaaaca

SEQ ID NO: 381877 - DNA, 548 bp, Homo sapiens
cggccaggctcccgcgcatgagacgtgaagcccgcgcagagctcgcgcgtcggtgtggttacagccggcagccacggcacctccttccggccgactagtctccaggtcccgcggtctggcccctggtcacccggcgctgtccctcgttccttgaagatctccagtgctaccttttgttgaacatctcgaatacaccaaaccttctagctgctaatactcagatttatggacaagaagttatcattgaaattaaatggtggcagacatgtccaaggaatattgcggggatttgatccctttatgaaccttgtgatagatgaatgtgtggagatggcgactagtggacaacagaacaatattggaatggtggtaatacgaggaaatagtatcatcatgttagaagccttggaacgagtataaataatggctgttcagcagagaaacccatgtcctctctccatagggcctgttttactatgatgtaaaaattaggtcatgtacattttcatattagactttttgttaaataaacttttgtaatagtcaaa

SEQ ID NO: 381878 - DNA, 458 bp, Homo sapiens
caacaatccattggctaacgaggtcgataacgccagacgcaagacgccgggcctacagcgggagcgtgaggaaagccgtgcgttgcgttccaaggcatctgtgagcccgcggagtatacaccatgagcaaagctcaccctcccgagttgaaaaatgaaattaaatggtggcagacatgtccaaggaatattgcggggatttgatccctttatgaaccttgtgatagatgaatgtgtggagatggcgactagtggacaacagaacaatattggaatggtggtaatacgaggaaatagtatcatcatgttagaagccttggaacgagtataaataatggctgttcagcagagaaacccatgtcctctctccatagggcctgttttactatgatgtaaaaattaggtcatgtacattttcatattagactttttgttaaataaacttttgtaatagtcaaa

SEQ ID NO: 381879 - DNA, 787 bp, Homo sapiens
cggccaggctcccgcgcatgagacgtgaagcccgcgcagagctcgcgcgtcggtgtggttacagccggcagccacggcacctccttccggccgactagtctccaggtcccgcggtctggcccctggtcacccggcgctgtccctcgttccttgaagatctccagtgctaccttttgttgaacatctcgaatacaccaaaccttctagctgctaatactcagatttatggacaagaagttatcattgaaattaaatggtggcagacatgtccaaggaatattgcggggatttgatccctttatgaaccttgtgatagatgaatgtgtggagatggcgactagtggacaacagaacaatattggaatggtggtaatacgaggaaatagtatcatcatgttagaagccttggaacgagtataaataatggctgttcagcagagaaacccatgtcctctctccatagggcctgttttactatgatgtaaaaattaggtcatgtacattttcatattagactttttgttaaataaacttttgtaatagtcaaaaaaaaaaaaaaaaaaccgcggagggcttctagtgggggggggggggaagggggtaaggaaaggggccaggggcaaaggggggcccgggacccagcttccggggccaagggggaaatcgggggccccctatgggaggcgataaatccgaaagccggttacccggttagatcggggaaactggaccccgggaaaccccaaccccgaccaaaggaaacgggccaacgacggaagcagcgaca

SEQ ID NO: 381880 - DNA, 690 bp, Homo sapiens
cgggttaggatttcacgattccaatccaaccatcacactattaattccccaataaaccattgaaaaaaggcctatcagtgctaccacattgacatataaagtttccacgtattaggtaatagaagcctatgtaccaatttctaaaacagttataagatatatcacaatttggggtatattaccaaaccagaatattacaaaatattaaaggcaatcctcctggtccacggacccttgttgccgcttacttgaagttggcataatctgagaatgcatcaatatactcctgcacccgagttgaaaaatgaaattaaatggtggcagacatgtccaaggaatattgcggggatttgatccctttatgaaccttgtgatagatgaatgtgtggagatggcgactagtggacaacagaacaatattggaatggtggtaatacgaggaaatagtatcatcatgttagaagccttggaacgagtataactatgatgtaaaaattaggtcatgtacattttcatattagactttttgttaaataaacttttgtaatagtcaaaaatgctttctcagatgttctgaatatagaatatcagctctcattccagttttttctaacatgaattttcctggttgacattgatttcaaagggttttatgcattaaagtgaaagaatcttattaaatgtgaaaca

SEQ ID NO: 381881 - DNA, 705 bp, Homo sapiens
gcacatactattgtggatgttgaatgtgtggagatggcgactagtggacaacagaacaatattggaatggtggtaatacgaggaaatagtatcatcatgttagaagccttggaacgagtataaataatggctgttcagcagagaaacccatgtcctctctccatagggcctgttttactatgatgtaaaaattaggtcatgtacattttcatattagactttttgttaaataaacttttgtaatagtcaaagcggcagcataaactattcaacttttgcaacataggcataacatttcacaaaatatcaataagatatgcacctaatgataatctgtttatcatcaaatggttttgtggcctaagagtcacctgacttgcataaataaagtacttttctggacgaaacattgggaacctcacaaaaggaaagaaggcagcagcaactaacatgacacaggcttcaagcaaaaattaaaaaaaaaaaaaaagtcacttttgcaaaatgtgtcccagcttctccccatagggcactatcagtagagattggaaataagaaccttgtacctttaaatatgtaagtagcaaagagaaaaaacccgaaacaaaccctggtttcactgaacataagttagtcacctaatagagaaacttaatcacaaaatgttggccaggaggcatggggataccagtgctgtttcagcac

SEQ ID NO: 381882 - DNA, 1611 bp, Homo sapiens
  misc_feature (95)..(95): n is a, c, g, or t
gcgtggtttgtgttggtggggttcgccgggggtattatgttgtggctcgtgtgggccggatggctccgaccctcgggttgttcagggcgcggtgncccgggttttttatggtgggggacgcggcacagtgtcaggagcccggtttctctggcgccgcttggggcgcgaggtcgaggttgcctactggtgccgcgggccccaaccgggtggcgttttggaagatttctttctccggggctggaggcgcgcccacaaatgttttttttttttttttttgtttttttttaatgatgtagttgtttattttgaatataatcatgaagtggggaaaaattttaatacaagagtagaaagaggattccagagaaaaacattccagtgtatcatggttctttgtgagtgagtagagaggggtagtgaggatgctgtccacaatgtattcatctagttaatgaattgtatggcccacaagctcaaacgagagatacattacagatggttgtattataaacctaatcttaagaaaccttaccaagcaaatgcttaaagactgatttttttgtgatctgataaaaagcctgcaaatcgtgaatcacttttaaactgtacagaatggactacacaccagtatggtaaagttcttgtaaaacaccaaacacaatggctcatagatatatacctctctcactcttaaatggcatttcctaattatagaaaatgtttacaacaaaagaacaagagggatcaaactaacaatcaataaggagaactgatgtgaagtcccatacactgttactccatttttcagcaactctttataactccttcattgacttgactcctttacaacatacagctgaattgtagaactagttcttcaagtgtggttcctatagtagaacagcagcatcactggggaacttaataaaatgcatcttcttatatcccataacaaacttattgaataaacagggtggagcctagcgatgttttaacaagcccttaaggtaactgatgcatgctcaactcagagagccactggagcagagctggctttcattcagcccctgcatcatttttaccagtctcttctattaaaaaaaaaggtctggagcagtaagctctgacagtgttttttcttccaataaaactcttaatactatagttgcataaaactacctaatgcgcccagagtagcaggttctgctaggatttttctcccagtaaaaaagcactcaacactgtagttgcattaaaactacttgatgtccttggtgtattgataacctgttttgcttttgccaaagcaatttcagatgccctactggaaaatttatccagagtaggtttgatgtaataccagcaacatttttaattttttttttttccttttgagacacagtctcactcttgcccaggctggagtgcagtggtgcgatctctgctcactgcaacctccatctccagggttcaagcgattctcgcgcctcagcctcccaagtagctgggattactggcacacgccaccatgcctggctaatttttgtatttttagtaaagacagggtttcaccatgttggccaggctggtctcaaactcccgacctcaaga

SEQ ID NO: 381883 - DNA, 1123 bp, Homo sapiens
  misc_feature (95)..(95): n is a, c, g, or t
gcgtggtttgtgttggtggggttcgccgggggtattatgttgtggctcgtgtgggccggatggctccgaccctcgggttgttcagggcgcggtgncccgggttttttatggtgggggacgcggcacagtgtcaggagcccggtttctctggcgccgcttggggcgcgaggtcgaggttgcctactggtgccgcgggccccaaccgggtggcgttttggaagatttctttctccggggctggaggcgcgcccacaaatgttttttttttttttttttgtttttttttaatgatgtagttgtttattttgaatataatcatgaagtggggaaaaattttaatacaagagtagaaagaggattccagagaaaaacattccagtgtatcatggttctttgtgagtgagtagagaggggtagtgaggatgctgtccacaatgtattcatctagttaatgaattgtatggcccacaagctcaaacgagagatacattacagatggttgtattataaacctaatcttaagaaaccttaccaagcaaatgcttaaagactgatttttttgtgatctgataaaaagcctgcaaatcgtgaatcacttttaaactgtacagaatggactacacaccagtatggtaaagttcttgtaaaacaccaaacacaatggctcatagatatatacctctctcactcttaaatggcatttcctaattatagcggacgcgtgggtcgacccacgcgtccggtgagcccgcggagtatacaccatgagcaaagctcaccctcccgagttgaaaaaatttatggacaagaagttatcattgaaattaaatggtggcagacatgtccaaggaatattgcggggatttgatccctttatgaaccttgtgatagatgaatgtgtggagatggcgactagtggacaacagaacaatattggaatggtggtaatacgaggaaatagtatcatcatgttagaagccttggaacgagtataaataatggctgttcagcagagaaacccatgtcctctctccatagggcctgttttactatgatgtaaaaattaggtcatgtacattttcatattagactttttgttaaataaacttttgtaatagtcaaa

SEQ ID NO: 381884 - DNA, 1004 bp, Homo sapiens
  misc_feature (28)..(28): n is a, c, g, or t
  misc_feature (40)..(40): n is a, c, g, or t
catctttccaaccactgaccgggttaangaagttaccaancatgagtgagtttcttctaaaacactaattttcaaaacttgtaagaatagtaactttgatctagtctgactttcccaagtacatctacattccaaatatagtacaacagaagcaaaagacaagaagtaatgatgtagttgtttattttgaatataatcatgaagtggggaaaaattttaatacaagagtagaaagaggattccagagaaaaacattccagtgtatcatggttctttgtgagtgagtagagaggggtagtgaggatgctgtccacaatgtattcatctagttaatgaattgtatggcccacaagctcaaacgagagatacattacagatggttgtattataaacctaatcttaagaaaccttaccaagcaaatgcttaaagactgatttttttgtgatctgataaaaagcctgcaaatcgtgaatcacttttaaactgtacagaatggactacacaccagtatggtaaagttcttgtaaaacaccaaacacaatggctcatagatatatacctctctcactcttaaatggcatttcctaattatagcggacgcgtgggtcgacccacgcgtccggtgagcccgcggagtatacaccatgagcaaagctcaccctcccgagttgaaaaaatttatggacaagaagttatcattgaaattaaatggtggcagacatgtccaaggaatattgcggggatttgatccctttatgaaccttgtgatagatgaatgtgtggagatggcgactagtggacaacagaacaatattggaatggtggtaatacgaggaaatagtatcatcatgttagaagccttggaacgagtataaataatggctgttcagcagagaaacccatgtcctctctccatagggcctgttttactatgatgtaaaaattaggtcatgtacattttcatattagactttttgttaaataaacttttgtaatagtcaaa

SEQ ID NO: 381885 - DNA, 1446 bp, Homo sapiens
  misc_feature (95)..(95): n is a, c, g, or t
gcgtggtttgtgttggtggggttcgccgggggtattatgttgtggctcgtgtgggccggatggctccgaccctcgggttgttcagggcgcggtgncccgggttttttatggtgggggacgcggcacagtgtcaggagcccggtttctctggcgccgcttggggcgcgaggtcgaggttgcctactggtgccgcgggccccaaccgggtggcgttttggaagatttctttctccggggctggaggcgcgcccacaaatgttttttttttttttttttgtttttttttaatgatgtagttgtttattttgaatataatcatgaagtggggaaaaattttaatacaagagtagaaagaggattccagagaaaaacattccagtgtatcatggttctttgtgagtgagtagagaggggtagtgaggatgctgtccacaatgtattcatctagttaatgaattgtatggcccacaagctcaaacgagagatacattacagatggttgtattataaacctaatcttaagaaaccttaccaagcaaatgcttaaagactgatttttttgtgatctgataaaaagcctgcaaatcgtgaatcacttttaaactgtacagaatggactacacaccagtatggtaaagttcttgtaaaacaccaaacacaatggctcatagatatatacctctctcactcttaaatggcatttcctaattatagcggacgcgtgggtcgacccacgcgtccggtgagcccgcggagtatacaccatgagcaaagctcaccctcccgagttgaaaaaatttatggacaagaagttatcattgaaattaaatggtggcagacatgtccaaggaatattgcggggatttgatccctttatgaaccttgtgatagatgaatgtgtggagatggcgactagtggacaacagaacaatattggaatggtggtaatacgaggaaatagtatcatcatgttagaagccttggaacgagtataaataatggctgttcagcagagaaacccatgtcctctctccatagggcctgttttactatgatgtaaaaattaggtcatgtacattttcatattagactttttgttaaataaacttttgtaatagtcaaaaatgctttctcagatgttctgaatatagaatatcagctctcattccagttttttctaacatgaattttcctggttgacattgatttcaaagggttttatgcattaaagtgaaagaatcttattaaatgtgaaacatggcaaggattccttctgtccatcatctttcaacactgaacagataaagaagttacaaacatgagtgagtttcttctaaaacactaattttcaaaacttgtaagaatagtaactttgatctagcctgactttcccaggtctctacgtccactctttgcccggagcgcggcacactccgggggggggcg

SEQ ID NO: 381886 - DNA, 1483 bp, Homo sapiens
  misc_feature (95)..(95): n is a, c, g, or t
gcgtggtttgtgttggtggggttcgccgggggtattatgttgtggctcgtgtgggccggatggctccgaccctcgggttgttcagggcgcggtgncccgggttttttatggtgggggacgcggcacagtgtcaggagcccggtttctctggcgccgcttggggcgcgaggtcgaggttgcctactggtgccgcgggccccaaccgggtggcgttttggaagatttctttctccggggctggaggcgcgcccacaaatgttttttttttttttttttgtttttttttaatgatgtagttgtttattttgaatataatcatgaagtggggaaaaattttaatacaagagtagaaagaggattccagagaaaaacattccagtgtatcatggttctttgtgagtgagtagagaggggtagtgaggatgctgtccacaatgtattcatctagttaatgaattgtatggcccacaagctcaaacgagagatacattacagatggttgtattataaacctaatcttaagaaaccttaccaagcaaatgcttaaagactgatttttttgtgatctgataaaaagcctgcaaatcgtgaatcacttttaaactgtacagaatggactacacaccagtatggtaaagttcttgtaaaacaccaaacacaatggctcatagatatatacctctctcactcttaaatggcatttcctaattatagcggacgcgtgggtcgacccacgcgtccggtgagcccgcggagtatacaccatgagcaaagctcaccctcccgagttgaaaaaatttatggacaagaagttatcattgaaattaaatggtggcagacatgtccaaggaatattgcggggatttgatccctttatgaaccttgtgatagatgaatgtgtggagatggcgactagtggacaacagaacaatattggaatggtggtaatacgaggaaatagtatcatcatgttagaagccttggaacgagtataaataatggctgttcagcagagaaacccatgtcctctctccatagggcctgttttactatgatgtaaaaattaggtcatgtacattttcatattagactttttgttaaataaacttttgtaatagtcaaaaatgctttctcagatgttctgaatatagaatatcagctctcattccagttttttctaacatgaattttcctggttgacattgatttcaaagggttttatgcattaaagtgaaagaatcttattaaatgtgaaacaaaaaaaaaaaaaaaaaaaaaaaaaaaaaaaaaaaaaaaaaaaaaaaaaaaaaaaaaaaaaaaaaaaaaaaaaaaaaaaaaaaaaaaaaaaataatttaaaaattggggcccgcttggcccaagtgatttttagattggggaaggtttttacttgcggccgaatttgggccatattgggccatttgcccttatggggggtggattaaaatcaatgggccgggttat

SEQ ID NO: 381887 - DNA, 841 bp, Homo sapiens
caacaatccattggctaacgaggtcgataacgccagacgcaagacgccgggcctacagcgggagcgtgaggaaagccgtgcgttgcgttccaaggcatctgtgagcccgcggagtatacaccatgagcaaagctcaccctcccgagttgaaaaaatttatggacaagaagttatcattgaaattaaatggtggcagacatgtccaaggaatattgcggggatttgatccctttatgaaccttgtgatagatgaatgtgtggagatggcgactagtggacaacagaacaatattggaatggtggtaatacgaggaaatagtatcatcatgttagaagccttggaacgagtataaataatggctgttcagcagagaaacccatgtcctctctccatagggcctgttttactatgatgtaaaaattaggtcatgtacattttcatattagactttttgttaaataaacttttgtaatagtcaaaaatgctttctcagatgttctgaatatagaatatcagctctcattccagttttttctaacatgaattttcctggttgacattgatttcaaagggttttatgcattaaagtgaaagaatcttattaaatgtgaaacaaaaaaaaaaaaaaaaaaaaaaaaaaaaaaaaaaaaaaaaaaaaaaaaaaaaaaaaaaaaaaaaaaaaaaaaaaaaaaaaaaaaaaaaaaaataatttaaaaattggggcccgcttggcccaagtgatttttagattggggaaggtttttacttgcggccgaatttgggccatattgggccatttgcccttatggggggtggattaaaatcaatgggccgggttat

SEQ ID NO: 381888 - DNA, 1577 bp, Homo sapiens
  misc_feature (95)..(95): n is a, c, g, or t
gcgtggtttgtgttggtggggttcgccgggggtattatgttgtggctcgtgtgggccggatggctccgaccctcgggttgttcagggcgcggtgncccgggttttttatggtgggggacgcggcacagtgtcaggagcccggtttctctggcgccgcttggggcgcgaggtcgaggttgcctactggtgccgcgggccccaaccgggtggcgttttggaagatttctttctccggggctggaggcgcgcccacaaatgttttttttttttttttttgtttttttttaatgatgtagttgtttattttgaatataatcatgaagtggggaaaaattttaatacaagagtagaaagaggattccagagaaaaacattccagtgtatcatggttctttgtgagtgagtagagaggggtagtgaggatgctgtccacaatgtattcatctagttaatgaattgtatggcccacaagctcaaacgagagatacattacagatggttgtattataaacctaatcttaagaaaccttaccaagcaaatgcttaaagactgatttttttgtgatctgataaaaagcctgcaaatcgtgaatcacttttaaactgtacagaatggactacacaccagtatggtaaagttcttgtaaaacaccaaacacaatggctcatagatatatacctctctcactcttaaatggcatttcctaattatagcggacgcgtgggtcgacccacgcgtccggtgagcccgcggagtatacaccatgagcaaagctcaccctcccgagttgaaaaaatttatggacaagaagttatcattgaaattaaatggtggcagacatgtccaaggaatattgcggggatttgatccctttatgaaccttgtgatagatgaatgtgtggagatggcgactagtggacaacagaacaatattggaatggtggtaatacgaggaaatagtatcatcatgttagaagccttggaacgagtataaataatggctgttcagcagagaaacccatgtcctctctccatagggcctgttttactatgatgtaaaaattaggtcatgtacattttcatattagactttttgttaaataaacttttgtaatagtcaaagcggcagcataaactattcaacttttgcaacataggcataacatttcacaaaatatcaataagatatgcacctaatgataatctgtttatcatcaaatggttttgtggcctaagagtcacctgacttgcataaataaagtacttttctggacgaaacattgggaacctcacaaaaggaaagaaggcagcagcaactaacatgacacaggcttcaagcaaaaattaaaaaaaaaaaaaaagtcacttttgcaaaatgtgtcccagcttctccccatagggcactatcagtagagattggaaataagaaccttgtacctttaaatatgtaagtagcaaagagaaaaaacccgaaacaaaccctggtttcactgaacataagttagtcacctaatagagaaacttaatcacaaaatgttggccaggaggcatggggataccagtgctgtttcagcac

SEQ ID NO: 381889 - DNA, 1348 bp, Homo sapiens
  misc_feature (95)..(95): n is a, c, g, or t
gcgtggtttgtgttggtggggttcgccgggggtattatgttgtggctcgtgtgggccggatggctccgaccctcgggttgttcagggcgcggtgncccgggttttttatggtgggggacgcggcacagtgtcaggagcccggtttctctggcgccgcttggggcgcgaggtcgaggttgcctactggtgccgcgggccccaaccgggtggcgttttggaagatttctttctccggggctggaggcgcgcccacaaatgttttttttttttttttttgtttttttttaatgatgtagttgtttattttgaatataatcatgaagtggggaaaaattttaatacaagagtagaaagaggattccagagaaaaacattccagtgtatcatggttctttgtgagtgagtagagaggggtagtgaggatgctgtccacaatgtattcatctagttaatgaattgtatggcccacaagctcaaacgagagatacattacagatggttgtattataaacctaatcttaagaaaccttaccaagcaaatgcttaaagactgatttttttgtgatctgataaaaagcctgcaaatcgtgaatcacttttaaactgtacagaatggactacacaccagtatggtaaagttcttgtaaaacaccaaacacaatggctcatagatatatacctctctcactcttaaatggcatttcctaattatagcggacgcgtgggtcgacccacgcgtccggtgagcccgcggagtatacaccatgagcaaagctcaccctcccgagttgaaaaaatttatggacaagaagttatcattgaaattaaatggtggcagacatgtccaaggaatattgcggggatttgatccctttatgaaccttgtgatagatgaatgtgtggagatggcgactagtggacaacagaacaatattggaatggtggtaatacgaggaaatagtatcatcatgttagaagccttggaacgagtataaataatggctgttcagcagagaaacccatgtcctctctccatagggcctgttttactatgatgtaaaaattaggtcatgtacattttcatattagactttttgttaaataaacttttgtaatagtcaaaaaaaaaaaaaaaaaaaaaaaaaaaaaaaaaaaaaaaaaaaaaaaaaaaaaaaaaaaaaaaaaaaaaaaaaaaaaaaaaaaaaaaaaaaaaataatttaaaaattggggcccgcttggcccaagtgatttttagattggggaaggtttttacttgcggccgaatttgggccatattgggccatttgcccttatggggggtggattaaaatcaatgggccgggttat

SEQ ID NO: 381890 - DNA, 1132 bp, Homo sapiens
caacaatccattggctaacgaggtcgataacgccagacgcaagacgccgggcctacagcgggagcgtgaggaaagccgtgcgttgcgttccaaggcatctgtgagcccgcggagtatacaccatgagcaaagctcaccctcccgagttgaaaaaatttatggacaagaagttatcattgaaattaaatggtggcagacatgtccaaggaatattgcggggatttgatccctttatgaaccttgtgatagatgaatgtgtggagatggcgactagtggacaacagaacaatattggaatggtggtaatacgaggaaatagtatcatcatgttagaagccttggaacgagtataaataatggctgttcagcagagaaacccatgtcctctctccatagggcctgttttactatgatgtaaaaattaggtcatgtacattttcatattagactttttgttaaataaacttttgtaatagtcaaaaatgctttctcagatgttctgaatatagaatatcagctctcattccagttttttctaacatgaattttcctggttgacattgatttcaaagggttttatgcattaaagtgaaagaatcttattaaatgtgaaacaggacatagtatcatcatgttagaagccttggaacgagtataaataatggctgttcagcagagaaaccatgtgcattatccatagggctgttttcactaatgatggtaaaaaattagcgtcatggtacatcttcatattagaaatgtagttaaattaacttttggatagtcaaaaaggtttttcagatggttggaattaatatcaggctaatacaagattatacatgaaattcatggtgaaatgattcacaggagtaaggcgataaacgtgaaaaccaccaaaacagcacaccggcacgagcaaacaaaaaacaaagacaagaaccagaaaagagaaacaagaaaaagaaagaaaacgagagcaagagaacaagaagacagagagggcagaaagacgaagcacaagagacacaaagagacaacgaagaaagaggaaaacagaagaaagaagaaaaagagaaaaaagaagaaataactgacagacactcacccacgcacaacgcccaggcaacaaaca

SEQ ID NO: 381891 - DNA, 1880 bp, Homo sapiens
  misc_feature (95)..(95): n is a, c, g, or t
  misc_feature (1443)..(1443): n is a, c, g, or t
gcgtggtttgtgttggtggggttcgccgggggtattatgttgtggctcgtgtgggccggatggctccgaccctcgggttgttcagggcgcggtgncccgggttttttatggtgggggacgcggcacagtgtcaggagcccggtttctctggcgccgcttggggcgcgaggtcgaggttgcctactggtgccgcgggccccaaccgggtggcgttttggaagatttctttctccggggctggaggcgcgcccacaaatgttttttttttttttttttgtttttttttaatgatgtagttgtttattttgaatataatcatgaagtggggaaaaattttaatacaagagtagaaagaggattccagagaaaaacattccagtgtatcatggttctttgtgagtgagtagagaggggtagtgaggatgctgtccacaatgtattcatctagttaatgaattgtatggcccacaagctcaaacgagagatacattacagatggttgtattataaacctaatcttaagaaaccttaccaagcaaatgcttaaagactgatttttttgtgatctgataaaaagcctgcaaatcgtgaatcacttttaaactgtacagaatggactacacaccagtatggtaaagttcttgtaaaacaccaaacacaatggctcatagatatatacctctctcactcttaaatggcatttcctaattatagcggacgcgtgggtcgacccacgcgtccggtgagcccgcggagtatacaccatgagcaaagctcaccctcccgagttgaaaaaatttatggacaagaagttatcattgaaattaaatggtggcagacatgtccaaggaatattgcggggatttgatccctttatgaaccttgtgatagatgaatgtgtggagatggcgactagtggacaacagaacaatattggaatggtggtaatacgaggaaatagtatcatcatgttagaagccttggaacgagtataaataatgatactatttcctaggcctacccgccgcagtactgatcattctatttccccctctattgatccccacctccaaatatctcatcaacaaccgactaatcaccacccaacaatgactaatcaaactaacctcaaaacaaatgataaccatacacaacactaaaggacgaacctgatctcttatactagtatccttaatcatttttattgccacaactaacctcctcggactcctgcctcactcatttacaccaaccacccaactatctataaacctagccatggccatccccttatgagcgggcgcagtgattataggctttcgctctaagattaaaaatgccctagcccacttcttaccacaaggcacactacaccccttatccccatactagttatcatcgaaaccatcagctactcattcagacaatagccctggcggtacnccttaacggtaacattactgccaggcaactactcatggaccctatggaagcgccacctaaggcatttaaccattaacttgcctctacagtatcattcttcacaatcaatacacgcgaatccagaaaacgcgggccctaatcacaggcctgctttcaacccttcagaaggcgccacacggccgactacgcacttacaacacaaccaaacaaagacaaacacgagaaacacacaacaacagacaccccatccgccacgggccaccccaaccaaactccccccacacggacacaccgggggccgccagcgaacaacaaccgcacacacggacgccgcccacacagcgcgagcgacccacaccaaacccggcggccgccaccacgcatcgcctcgcgccgagctcgtcccccaccagtcgacacagacgcagcgcaaccac

SEQ ID NO: 381892 - DNA, 1459 bp, Homo sapiens
  misc_feature (95)..(95): n is a, c, g, or t
gcgtggtttgtgttggtggggttcgccgggggtattatgttgtggctcgtgtgggccggatggctccgaccctcgggttgttcagggcgcggtgncccgggttttttatggtgggggacgcggcacagtgtcaggagcccggtttctctggcgccgcttggggcgcgaggtcgaggttgcctactggtgccgcgggccccaaccgggtggcgttttggaagatttctttctccggggctggaggcgcgcccacaaatgttttttttttttttttttgtttttttttaatgatgtagttgtttattttgaatataatcatgaagtggggaaaaattttaatacaagagtagaaagaggattccagagaaaaacattccagtgtatcatggttctttgtgagtgagtagagaggggtagtgaggatgctgtccacaatgtattcatctagttaatgaattgtatggcccacaagctcaaacgagagatacattacagatggttgtattataaacctaatcttaagaaaccttaccaagcaaatgcttaaagactgatttttttgtgatctgataaaaagcctgcaaatcgtgaatcacttttaaactgtacagaatggactacacaccagtatggtaaagttcttgtaaaacaccaaacacaatggctcatagatatatacctctctcactcttaaatggcatttcctaattatagcggacgcgtgggtcgacccacgcgtccggtgagcccgcggagtatacaccatgagcaaagctcaccctcccgagttgaaaaaatttatggacaagaagttatcattgaaattaaatggtggcagacatgtccaaggaatattgcggggatttgatccctttatgaaccttgtgatagatgaatgtgtggagatggcgactagtggacaacagaacaatattggaatggtggtaagtaaagatacaagagttctcttggagatttcatttttcttttggaatgtgtattaactttcctggttagtaacccccagaaatggcaaataacaggcaagattagactttccatctcctttttagttgcatacggcagttactcagctgtagtaatatcctggttacctgtaggtaagatctcaactatacagaacctaaggtcctagcgcttgaaatagctgttggaaatcctttttgagctttattctgcaatagaggctcatagttggtccttcattagagcagtagttctgaaaccttaatgtgtatatgaatccccagggaatcttcttaaaatgaagattctacttcagtaggtatggggcagaacttaactaaggttttgcatttctactaatgcctaatgcagatctgccagttcacaggtaacactttctgattttacttgtatacatagttaacctggattttctggtttaccacacccaaaattttaaggtagccaaggt

SEQ ID NO: 381893 - DNA, 706 bp, Homo sapiens
caacaatccattggctaacgaggtcgataacgccagacgcaagacgccgggcctacagcgggagcgtgaggaaagccgtgcgttgcgttccaaggcatctgtgagcccgcggagtatacaccatgagcaaagctcaccctcccgagttgaaaaaatttatggacaagaagttatcattgaaattaaatggtggcagacatgtccaaggaatattgcggggatttgatccctttatgaaccttgtgatagatgaatgtgtggagatggcgactagtggacaacagaacaatattggaatggtggtaatacgaggaaatagtatcatcatgttagaagccttggaacgagtataaataatggctgttcagcagagaaacccatgtcctctctccatagggcctgttttactatgatgtaaaaattaggtcatgtacattttcatattagactttttgttaaataaacttttgtaatagtcaaaaaaaaaaaaaaaaaaaaaaaaaaaaaaaaaaaaaaaaaaaaaaaaaaaaaaaaaaaaaaaaaaaaaaaaaaaaaaaaaaaaaaaaaaaaaataatttaaaaattggggcccgcttggcccaagtgatttttagattggggaaggtttttacttgcggccgaatttgggccatattgggccatttgcccttatggggggtggattaaaatcaatgggccgggttat

SEQ ID NO: 381894 - DNA, 1472 bp, Homo sapiens
  misc_feature (28)..(28): n is a, c, g, or t
  misc_feature (40)..(40): n is a, c, g, or t
catctttccaaccactgaccgggttaangaagttaccaancatgagtgagtttcttctaaaacactaattttcaaaacttgtaagaatagtaactttgatctagtctgactttcccaagtacatctacattccaaatatagtacaacagaagcaaaagacaagaagtaatgatgtagttgtttattttgaatataatcatgaagtggggaaaaattttaatacaagagtagaaagaggattccagagaaaaacattccagtgtatcatggttctttgtgagtgagtagagaggggtagtgaggatgctgtccacaatgtgtatggcccacaagctcaaacgagagatacattacagatggttgtattataaacctaatcttaagaaaccttaccaagcaaatgcttaaagactgatttttttgtgatctgataaaaagcctgcaaatcgtgaatcacttttaaactgtacagaatggactacacaccagtatggtaaagttcttgtaaaacaccaaacacaatggctcatagatatatacctctctcactcttaaatggcatttcctaattatagaaaatgtttacaacaaaagaacaagagggatcaaactaacaatcaataaggagaactgatgtgaagtcccatacactgttactccatttttcagcaactctttataactccttcattgacttgactcctttacaacatacagctgaattgtagaactagttcttcaagtgtggttcctatagtagaacagcagcatcactggggaacttaataaaatgcatcttcttatatcccataacaaacttattgaataaacagggtggagcctagcgatgttttaacaagcccttaaggtaactgatgcatgctcaactcagagagccactggagcagagctggctttcattcagcccctgcatcatttttaccagtctcttctattaaaaaaaaaggtctggagcagtaagctctgacagtgttttttcttccaataaaactcttaatactatagttgcataaaactacctaatgcgcccagagtagcaggttctgctaggatttttctcccagtaaaaaagcactcaacactgtagttgcattaaaactacttgatgtccttggtgtattgataacctgttttgcttttgccaaagcaatttcagatgccctactggaaaatttatccagagtaggtttgatgtaataccagcaacatttttaattttttttttttccttttgagacacagtctcactcttgcccaggctggagtgcagtggtgcgatctctgctcactgcaacctccatctccagggttcaagcgattctcgcgcctcagcctcccaagtagctgggattactggcacacgccaccatgcctggctaatttttgtatttttagtaaagacagggtttcaccatgttggccaggctggtctcaaactcccgacctcaaga

SEQ ID NO: 381895 - DNA, 1270 bp, Homo sapiens
cggccaggctcccgcgcatgagacgtgaagcccgcgcagagctcgcgcgtcggtgtggttacagccggcagccacggcacctccttccggccgactagtctccaggtcccgcggtctggcccctggtcacccggcgctgtccctcgttccttgaagatctccagtgctaccttttgttgaacatctcgaatagtatcatgttctagatagacggctagagggggaaattctctgaaggaactaaggaggggctggaagggaaggaagtgtttttaaaactacgtgaggcatcagaatccgaaagccactttagtcttagcaaatgtgtttgtaggtgtttgagcttttacttagaaacctcattcctttttcttgccttcttttacgttaagcttgaatgtcatgtgttatcttgctctgatgttgaaactatataagaacattcatttttctttttttttaagaacattaattttttctagtcagagaaggctaattttttgaagttttttctacacacccagtaaagtcaaacaactttaagtaggagagccttactttaggtaggactcaacgtaaagctttgaattcctcaaatactttttgagtggacttaacaggttatgtgtttcctgactacgtttctgttttgcttatacttcctgatgctggaattctacatgtattagttggattgcacaaaggatgcaaaatttttacagggatcagttttttctggcgtagcatgtggttggctttgtgtatagttagttcatttattaccaggcccatggaagtcagacaaaagatttatggacaagaagttatcattgaaattaaatggtggcagacatgtccaaggaatattgcggggatttgatccctttatgaaccttgtgatagatgaatgtgtggagatggcgactagtggacaacagaacaatattggaatggtggtaatacgaggaaatagtatcatcatgttagaagccttggaacgagtataaataatggctgttcagcagagaaacccatgtcctctctccatagggcctgttttactatgatgtaaaaattaggtcatgtacattttcatattagactttttgttaaataaacttttgtaatagtcaaaaatgctttctcagatgttctgaatatagaatatcagctctcattccagttttttctaacatgaattttcctggttgacattgatttcaaagggttttatgcattaaagtgaaagaatcttattaaatgtgaaaca

SEQ ID NO: 381896 - DNA, 1135 bp, Homo sapiens
cggccaggctcccgcgcatgagacgtgaagcccgcgcagagctcgcgcgtcggtgtggttacagccggcagccacggcacctccttccggccgactagtctccaggtcccgcggtctggcccctggtcacccggcgctgtccctcgttccttgaagatctccagtgctaccttttgttgaacatctcgaatagtatcatgttctagatagacggctagagggggaaattctctgaaggaactaaggaggggctggaagggaaggaagtgtttttaaaactacgtgaggcatcagaatccgaaagccactttagtcttagcaaatgtgtttgtaggtgtttgagcttttacttagaaacctcattcctttttcttgccttcttttacgttaagcttgaatgtcatgtgttatcttgctctgatgttgaaactatataagaacattcatttttctttttttttaagaacattaattttttctagtcagagaaggctaattttttgaagttttttctacacacccagtaaagtcaaacaactttaagtaggagagccttactttaggtaggactcaacgtaaagctttgaattcctcaaatactttttgagtggacttaacaggttatgtgtttcctgactacgtttctgttttgcttatacttcctgatgctggaattctacatgtattagttggattgcacaaaggatgcaaaatttttacagggatcagttttttctggcgtagcatgtggttggctttgtgtatagttagttcatttattaccaggcccatggaagtcagacaaaagatttatggacaagaagttatcattgaaattaaatggtggcagacatgtccaaggaatattgcggggatttgatccctttatgaaccttgtgatagatgaatgtgtggagatggcgactagtggacaacagaacaatattggaatggtggtaatacgaggaaatagtatcatcatgttagaagccttggaacgagtataaataatggctgttcagcagagaaacccatgtcctctctccatagggcctgttttactatgatgtaaaaattaggtcatgtacattttcatattagactttttgttaaataaacttttgtaatagtcaaa

SEQ ID NO: 381897 - DNA, 657 bp, Homo sapiens
cggccaggctcccgcgcatgagacgtgaagcccgcgcagagctcgcgcgtcggtgtggttacagccggcagccacggcacctccttccggccgactagtctccaggtcccgcggtctggcccctggtcacccggcgctgtccctcgttccttgaagatctccagtgctaccttttgttgaacatctcgaatagtatcatgttctagatagacggctagagggggaaattctctgaaggaactaaggaggggctggaagggaaggaagtgtttttaaaactacgtgaggcatcagaatccgaaagccactttagtcttagcaaatgtgtttatttatggacaagaagttatcattgaaattaaatggtggcagacatgtccaaggaatattgcggggatttgatccctttatgaaccttgtgatagatgaatgtgtggagatggcgactagtggacaacagaacaatattggaatggtggtaatacgaggaaatagtatcatcatgttagaagccttggaacgagtataaataatggctgttcagcagagaaacccatgtcctctctccatagggcctgttttactatgatgtaaaaattaggtcatgtacattttcatattagactttttgttaaataaacttttgtaatagtcaaa

SEQ ID NO: 381898 - DNA, 593 bp, Homo sapiens
caacaatccattggctaacgaggtcgataacgccagacgcaagacgccgggcctacagcgggagcgtgaggaaagccgtgcgttgcgttccaaggcatctgtgagcccgcggagtatacaccatgagcaaagctcaccctcccgagttgaaaaatgaaattaaatggtggcagacatgtccaaggaatattgcggggatttgatccctttatgaaccttgtgatagatgaatgtgtggagatggcgactagtggacaacagaacaatattggaatggtggtaatacgaggaaatagtatcatcatgttagaagccttggaacgagtataaataatggctgttcagcagagaaacccatgtcctctctccatagggcctgttttactatgatgtaaaaattaggtcatgtacattttcatattagactttttgttaaataaacttttgtaatagtcaaaaatgctttctcagatgttctgaatatagaatatcagctctcattccagttttttctaacatgaattttcctggttgacattgatttcaaagggttttatgcattaaagtgaaagaatcttattaaatgtgaaaca

SEQ ID NO: 381899 - DNA, 477 bp, Homo sapiens
caacaatccattggctaacgaggtcgataacgccagacgcaagacgccgggcctacagcgggagcgtgaggaaagccgtgcgttgcgttccaaggcatctgtgagcccgcggagtatacaccatgagcaaagctcaccctcccgagttgaaaaaatttatggacaagaagttatcattgaaattaaatggtggcagacatgtccaaggaatattgcggggatttgatccctttatgaaccttgtgatagatgaatgtgtggagatggcgactagtggacaacagaacaatattggaatggtggtaatacgaggaaatagtatcatcatgttagaagccttggaacgagtataaataatggctgttcagcagagaaaaccccaatttggggtttttccccccccccttttttcccccctttttttccccttttttttccccccccccaaaaattccgggcctgttttactatgatgta

SEQ ID NO: 381900 - DNA, 653 bp, Homo sapiens
tgcttgaacctgggtggcagaggctgcagtgagccgagattgcgccactacactctagcctgggcaacagagtgagactgtctcaaaaaaaaaggtgaaattagtcattggagacttggcattagaatctcataaagcaaattgttagccttaaatccaaaagatgtctgtcgtataaagggcttagagttgtttggtgtccctgtggcttgaacaaagctttgcaaaccgacatgtaatattaaaaaaccattaatgatttggtgaaaattcttaaatcatcatagttatgtctgttacctgagttgttcttttcaaatttatttttctctttcttaggtaatacgaggaaatagtatcatcatgttagaagccttggaacgagtataaataatggctgttcagcagagaaacccatgtcctctctccatagggcctgttttactatgatgtaaaaattaggtcatgtacattttcatattagactttttgttaaataaacttttgtaatagtcaaaaatgctttctcagatgttctgaatatagaatatcagctctcattccagttttttctaacatgaattttcctggttgacattgatttcaaagggttttatgcattaaagtgaaagaatcttattaaatgtgaaaca

SEQ ID NO: 381901 - DNA, 481 bp, Homo sapiens
caacaatccattggctaacgaggtcgataacgccagacgcaagacgccgggcctacagcgggagcgtgaggaaagccgtgcgttgcgttccaaggcatctgtgagcccgcggagtatacaccatgagcaaagctcaccctcccgagttgaaaaaatttatggacaagaagttatcattgaaattaaatggtggcagacatgtccaaggaatattgcggggatttgatccctttatgaaccttgtgatagatgaatgtgtggagatggcgactagtggacaacagaacaatattggaatggtggtaatacgaggaaatagtatcatcatgttagaagccttggaacgagtataaataatggctgttcagcagagaaacccatgtcctctctccatagggcctgttttactatgatgtaaaaattaggtcatgtacattttcatattagactttttgttaaataaacttttgtaatagtcaaa

SEQ ID NO: 381902 - DNA, 1640 bp, Homo sapiens
  misc_feature (95)..(95): n is a, c, g, or t
  misc_feature (1606)..(1606): n is a, c, g, or t
gcgtggtttgtgttggtggggttcgccgggggtattatgttgtggctcgtgtgggccggatggctccgaccctcgggttgttcagggcgcggtgncccgggttttttatggtgggggacgcggcacagtgtcaggagcccggtttctctggcgccgcttggggcgcgaggtcgaggttgcctactggtgccgcgggccccaaccgggtggcgttttggaagatttctttctccggggctggaggcgcgcccacaaatgttttttttttttttttttgtttttttttaatgatgtagttgtttattttgaatataatcatgaagtggggaaaaattttaatacaagagtagaaagaggattccagagaaaaacattccagtgtatcatggttctttgtgagtgagtagagaggggtagtgaggatgctgtccacaatgtattcatctagttaatgaattgtatggcccacaagctcaaacgagagatacattacagatggttgtattataaacctaatcttaagaaaccttaccaagcaaatgcttaaagactgatttttttgtgatctgataaaaagcctgcaaatcgtgaatcacttttaaactgtacagaatggactacacaccagtatggtaaagttcttgtaaaacaccaaacacaatggctcatagatatatacctctctcactcttaaatggcatttcctaattatagaaaatgtttacaacaaaagaacaagagggatcaaactaacaatcaataaggagaactgatgtgaagtcccatacactgttactccatttttcagcaactctttataactccttcattgacttgactcctttacaacatacagctgaattgtagaactagttcttcaagtgtggttcctatagtagaacagcagcatcactggggaacttaataaaatgcatcttcttatatcccataacaaacttattgaataaacagggtggagcctagcgatgttttaacaagcccttaaggtaactgatgcatgctcaactcagagagccactggagcagagctggctttcattcagcccctgcatcatttttaccagtctcttctattaaaaaaaaaggtctggagcagtaagctctgacagtgttttttcttccaataaaactcttaatactatagttgcataaaactacctaatgcgcccagagtagcaggttctgctaggatttttctcccagtaaaaaagcactcaacactgtagttgcattaaaactacttgatgtccttggtgtattgataacctgttttgcttttgccaaagcaatttcagatgccctactggaaaatttatccagagtaggtttgatgtaataccagcaacatttttaattttttttttttccttttgagacacagtctcactcttgcccaggctggagtgcagtggtgcgatctctgctcactgcattccagcctgggcgacagagtgagactccatctcaaaaaacacaaacaaatacaaaaactaaggaagccttaataaagtacagccttaagttaataataatgtattggccgggcacagtggcagagcaagactccgtctcggaaaaaaaaagnaatatcgtatcttagtaatgtgacaatctactct

SEQ ID NO: 381903 - DNA, 1650 bp, Homo sapiens
  misc_feature (95)..(95): n is a, c, g, or t
gcgtggtttgtgttggtggggttcgccgggggtattatgttgtggctcgtgtgggccggatggctccgaccctcgggttgttcagggcgcggtgncccgggttttttatggtgggggacgcggcacagtgtcaggagcccggtttctctggcgccgcttggggcgcgaggtcgaggttgcctactggtgccgcgggccccaaccgggtggcgttttggaagatttctttctccggggctggaggcgcgcccacaaatgttttttttttttttttttgtttttttttaatgatgtagttgtttattttgaatataatcatgaagtggggaaaaattttaatacaagagtagaaagaggattccagagaaaaacattccagtgtatcatggttctttgtgagtgagtagagaggggtagtgaggatgctgtccacaatgtattcatctagttaatgaattgtatggcccacaagctcaaacgagagatacattacagatggttgtattataaacctaatcttaagaaaccttaccaagcaaatgcttaaagactgatttttttgtgatctgataaaaagcctgcaaatcgtgaatcacttttaaactgtacagaatggactacacaccagtatggtaaagttcttgtaaaacaccaaacacaatggctcatagatatatacctctctcactcttaaatggcatttcctaattatagaaaatgtttacaacaaaagaacaagagggatcaaactaacaatcaataaggagaactgatgtgaagtcccatacactgttactccatttttcagcaactctttataactccttcattgacttgactcctttacaacatacagctgaattgtagaactagttcttcaagtgtggttcctatagtagaacagcagcatcactggggaacttaataaaatgcatcttcttatatcccataacaaacttattgaataaacagggtggagcctagcgatgttttaacaagcccttaaggtaactgatgcatgctcaactcagagagccactggagcagagctggctttcattcagcccctgcatcatttttaccagtctcttctattaaaaaaaaaggtctggagcagtaagctctgacagtgttttttcttccaataaaactcttaatactatagttgcataaaactacctaatgcgcccagagtagcaggttctgctaggatttttctcccagtaaaaaagcactcaacactgtagttgcattaaaactacttgatgtccttggtgtattgataacctgttttgcttttgccaaagcaatttcagatgccctactggaaaatttatccagagtaggtttgatgtaataccagcaacatttttaattttttttttttccttttgagacacagtctcactcttgcccaggctggagtgcagtggtgcgatctctgctcactgcaaaaaaaaaaaaaaaaaaaaaaaaaaaaaaaaaaaaaaaaaaaaaaaaaaaaaaaaaaaaaaaataatttaaaaattggggcccgcttggcccaagtgatttttagattggggaaggtttttacttgcggccgaatttgggccatattgggccatttgcccttatggggggtggattaaaatcaatgggccgggttat

SEQ ID NO: 381904 - DNA, 1258 bp, Homo sapiens
  misc_feature (95)..(95): n is a, c, g, or t
gcgtggtttgtgttggtggggttcgccgggggtattatgttgtggctcgtgtgggccggatggctccgaccctcgggttgttcagggcgcggtgncccgggttttttatggtgggggacgcggcacagtgtcaggagcccggtttctctggcgccgcttggggcgcgaggtcgaggttgcctactggtgccgcgggccccaaccgggtggcgttttggaagatttctttctccggggctggaggcgcgcccacaaatgttttttttttttttttttgtttttttttaatgatgtagttgtttattttgaatataatcatgaagtggggaaaaattttaatacaagagtagaaagaggattccagagaaaaacattccagtgtatcatggttctttgtgagtgagtagagaggggtagtgaggatgctgtccacaatgtattcatctagttaatgaattgtatggcccacaagctcaaacgagagatacattacagatggttgtattataaacctaatcttaagaaaccttaccaagcaaatgcttaaagactgatttttttgtgatctgataaaaagcctgcaaatcgtgaatcacttttaaactgtacagaatggactacacaccagtatggtaaagttcttgtaaaacaccaaacacaatggctcatagatatatacctctctcactcttaaatggcatttcctaattatagcggacgcgtgggtcgacccacgcgtccggtgagcccgcggagtatacaccatgagcaaagctcaccctcccgagttgaaaaaatttatggacaagaagttatcattgaaattaaatggtggcagacatgtccaaggaatattgcggggatttgatccctttatgaaccttgtgatagatgaatgtgtggagatggcgactagtggacaacagaacaatattggaatggtggtaatacgaggaaatagtatcatcatgttagaagccttggaacgagtataaataatggctgttcagcagagaaacccatgtcctctctccatagggcctgttttactatgatgtaaaaattaggtcatgtacattttcatattagactttttgttaaataaacttttgtaatagtcaaaaatgctttctcagatgttctgaatatagaatatcagctctcattccagttttttctaacatgaattttcctggttgacattgatttcaaagggttttatgcattaaagtgaaagaatcttattaaatgtgaaaca

SEQ ID NO: 381905 - DNA, 804 bp, Homo sapiens
caacaatccattggctaacgaggtcgataacgccagacgcaagacgccgggcctacagcgggagcgtgaggaaagccgtgcgttgcgttccaaggcatctgtgagcccgcggagtatacaccatgagcaaagctcaccctcccgagttgaaaaaatttatggacaagaagttatcattgaaattaaatggtggcagacatgtccaaggaatattgcggggatttgatccctttatgaaccttgtgatagatgaatgtgtggagatggcgactagtggacaacagaacaatattggaatggtggtaatacgaggaaatagtatcatcatgttagaagccttggaacgagtataaataatggctgttcagcagagaaacccatgtcctctctccatagggcctgttttactatgatgtaaaaattaggtcatgtacattttcatattagactttttgttaaataaacttttgtaatagtcaaaaatgctttctcagatgttctgaatatagaatatcagctctcattccagttttttctaacatgaattttcctggttgacattgatttcaaagggttttatgcattaaagtgaaagaatcttattaaatgtgaaacatggcaaggattccttctgtccatcatctttcaacactgaacagataaagaagttacaaacatgagtgagtttcttctaaaacactaattttcaaaacttgtaagaatagtaactttgatctagcctgactttcccaggtctctacgtccactctttgcccggagcgcggcacactccgggggggggcg

SEQ ID NO: 381906 - DNA, 1235 bp, Homo sapiens
  misc_feature (95)..(95): n is a, c, g, or t
gcgtggtttgtgttggtggggttcgccgggggtattatgttgtggctcgtgtgggccggatggctccgaccctcgggttgttcagggcgcggtgncccgggttttttatggtgggggacgcggcacagtgtcaggagcccggtttctctggcgccgcttggggcgcgaggtcgaggttgcctactggtgccgcgggccccaaccgggtggcgttttggaagatttctttctccggggctggaggcgcgcccacaaatgttttttttttttttttttgtttttttttaatgatgtagttgtttattttgaatataatcatgaagtggggaaaaattttaatacaagagtagaaagaggattccagagaaaaacattccagtgtatcatggttctttgtgagtgagtagagaggggtagtgaggatgctgtccacaatgtattcatctagttaatgaattgtatggcccacaagctcaaacgagagatacattacagatggttgtattataaacctaatcttaagaaaccttaccaagcaaatgcttaaagactgatttttttgtgatctgataaaaagcctgcaaatcgtgaatcacttttaaactgtacagaatggactacacaccagtatggtaaagttcttgtaaaacaccaaacacaatggctcatagatatatacctctctcactcttaaatggcatttcctaattatagcggacgcgtgggtcgacccacgcgtccggtgagcccgcggagtatacaccatgagcaaagctcaccctcccgagttgaaaaatgaaattaaatggtggcagacatgtccaaggaatattgcggggatttgatccctttatgaaccttgtgatagatgaatgtgtggagatggcgactagtggacaacagaacaatattggaatggtggtaatacgaggaaatagtatcatcatgttagaagccttggaacgagtataaataatggctgttcagcagagaaacccatgtcctctctccatagggcctgttttactatgatgtaaaaattaggtcatgtacattttcatattagactttttgttaaataaacttttgtaatagtcaaaaatgctttctcagatgttctgaatatagaatatcagctctcattccagttttttctaacatgaattttcctggttgacattgatttcaaagggttttatgcattaaagtgaaagaatcttattaaatgtgaaaca

SEQ ID NO: 381907 - DNA, 1362 bp, Homo sapiens
  misc_feature (95)..(95): n is a, c, g, or t
gcgtggtttgtgttggtggggttcgccgggggtattatgttgtggctcgtgtgggccggatggctccgaccctcgggttgttcagggcgcggtgncccgggttttttatggtgggggacgcggcacagtgtcaggagcccggtttctctggcgccgcttggggcgcgaggtcgaggttgcctactggtgccgcgggccccaaccgggtggcgttttggaagatttctttctccggggctggaggcgcgcccacaaatgttttttttttttttttttgtttttttttaatgatgtagttgtttattttgaatataatcatgaagtggggaaaaattttaatacaagagtagaaagaggattccagagaaaaacattccagtgtatcatggttctttgtgagtgagtagagaggggtagtgaggatgctgtccacaatgtattcatctagttaatgaattgtatggcccacaagctcaaacgagagatacattacagatggttgtattataaacctaatcttaagaaaccttaccaagcaaatgcttaaagactgatttttttgtgatctgataaaaagcctgcaaatcgtgaatcacttttaaactgtacagaatggactacacaccagtatggtaaagttcttgtaaaacaccaaacacaatggctcatagatatatacctctctcactcttaaatggcatttcctaattatagcggacgcgtgggtcgacccacgcgtccggtgagcccgcggagtatacaccatgagcaaagctcaccctcccgagttgaaaaaatttatggacaagaagttatcattgaaattaaatggtggcagacatgtccaaggaatattgcggggatttgatccctttatgaaccttgtgatagatgaatgtgtggagatggcgactagtggacaacagaacaatattggaatggtggtaatacgaggaaatagtatcatcatgttagaagccttggaacgagtataaataatggctgttcagcagagaaacccatgtcctctctccatagggcctgttttactatgatgtaaaaattaggtcatgtacattttcatattagactttttgttaaataaacttttgtaatagtcaaaaaaaaaaaaaaaaaaccgcggagggcttctagtgggggggggggggaagggggtaaggaaaggggccaggggcaaaggggggcccgggacccagcttccggggccaagggggaaatcgggggccccctatgggaggcgataaatccgaaagccggttacccggttagatcggggaaactggaccccgggaaaccccaaccccgaccaaaggaaacgggccaacgacggaagcagcgaca

SEQ ID NO: 381908 - DNA, 1320 bp, Homo sapiens
  misc_feature (95)..(95): n is a, c, g, or t
gcgtggtttgtgttggtggggttcgccgggggtattatgttgtggctcgtgtgggccggatggctccgaccctcgggttgttcagggcgcggtgncccgggttttttatggtgggggacgcggcacagtgtcaggagcccggtttctctggcgccgcttggggcgcgaggtcgaggttgcctactggtgccgcgggccccaaccgggtggcgttttggaagatttctttctccggggctggaggcgcgcccacaaatgttttttttttttttttttgtttttttttaatgatgtagttgtttattttgaatataatcatgaagtggggaaaaattttaatacaagagtagaaagaggattccagagaaaaacattccagtgtatcatggttctttgtgagtgagtagagaggggtagtgaggatgctgtccacaatgtattcatctagttaatgaattgtatggcccacaagctcaaacgagagatacattacagatggttgtattataaacctaatcttaagaaaccttaccaagcaaatgcttaaagactgatttttttgtgatctgataaaaagcctgcaaatcgtgaatcacttttaaactgtacagaatggactacacaccagtatggtaaagttcttgtaaaacaccaaacacaatggctcatagatatatacctctctcactcttaaatggcatttcctaattatagcggacgcgtgggtcgacccacgcgtccggtgagcccgcggagtatacaccatgagcaaagctcaccctcccgagttgaaaaaatttatggacaagaagttatcattgaaattaaatggtggcagacatgtccaaggaatattgcggggatttgatccctttatgaaccttgtgatagatgaatgtgtggagatggcgactagtggacaacagaacaatattggaatggtggtaatacgaggaaatagtatcatcatgttagaagccttggaacgagtataaataatggctgttcagcagagaaacccatgtcctctctccatagggcctgttttactatgatgtaaaaattaggtcatgtacattttcatattagactttttgttaaataaacttttgtaatagtcaaaaaaaaaaaaaaaaaaaaaaaaaaaaaaaaaaaaaaaaaaaaaaaaaaaaaaaaaaaaaaaaaataatttaaaaattggggcccgcttggcccaagtgatttttagattggggaaggtttttacttgcggccgaatttgggccatattgggccatttgcccttatggggggtggattaaaatcaatgggccgggttat

SEQ ID NO: 381909 - DNA, 1866 bp, Homo sapiens
  misc_feature (95)..(95): n is a, c, g, or t
gcgtggtttgtgttggtggggttcgccgggggtattatgttgtggctcgtgtgggccggatggctccgaccctcgggttgttcagggcgcggtgncccgggttttttatggtgggggacgcggcacagtgtcaggagcccggtttctctggcgccgcttggggcgcgaggtcgaggttgcctactggtgccgcgggccccaaccgggtggcgttttggaagatttctttctccggggctggaggcgcgcccacaaatgttttttttttttttttttgtttttttttaatgatgtagttgtttattttgaatataatcatgaagtggggaaaaattttaatacaagagtagaaagaggattccagagaaaaacattccagtgtatcatggttctttgtgagtgagtagagaggggtagtgaggatgctgtccacaatgtattcatctagttaatgaattgtatggcccacaagctcaaacgagagatacattacagatggttgtattataaacctaatcttaagaaaccttaccaagcaaatgcttaaagactgatttttttgtgatctgataaaaagcctgcaaatcgtgaatcacttttaaactgtacagaatggactacacaccagtatggtaaagttcttgtaaaacaccaaacacaatggctcatagatatatacctctctcactcttaaatggcatttcctaattatagcggacgcgtgggtcgacccacgcgtccggtgagcccgcggagtatacaccatgagcaaagctcaccctcccgagttgaaaaaatttatggacaagaagttatcattgaaattaaatggtggcagacatgtccaaggaatattgcggggatttgatccctttatgaaccttgtgatagatgaatgtgtggagatggcgactagtggacaacagaacaatattggaatggtggtaatacgaggaaatagtatcatcatgttagaagccttggaacgagtataaataaatggctgtttcagcagagaaacccatgtcctctctcccatagggcctgttttcactcatgcatcgtcaacacattcaggtcatgttacatttctacatcattcagcaacttttgtgttcaacacaatcaaaccttttctgtcaatcagtctacaaaataacaaacacaaaaacacatacctcgagagcgccatctcttatttgttcgggggggcgggaaaacaagcggaggtaattgcacagtgggcacccatgggtcatatacgctgtctcccatagcgacccacaggcttcctgggtaccaaaggggggtaagactcatcgccgggcaccaccactaaaataggtggaggaacgcacatacaaaataccagaaacagcccccggggataaaccctggcgcttaacttgacattcgcggcaaaccgacacaaacacaacactacagacaacacagaacagactaccagagacaagcaccacacaaagaaccaacaacaagaacaccaacgagaaagcacacagagagaaggtaggagagggcaacagagcgcacaaatggccatgatcgcgacaacacgaccagaaggtggcgctcagtctgtgctagctgaacgcaggatgctctaaacacgcgcgccacacacagctacaaacaagaaatccaagccaaggcgagctgaacgtgcgcaactaagaggaccagagaggagagcgcacagagaagacgccaaagaggggaagacagaaggagcaccacagcacagcggacagcgttaggacgagaaacgaagaaggacagagcgagaacaagtaagcagggacacagacgcacgcagtccagacaagcgctccacagccaggcatc

SEQ ID NO: 381910 - DNA, 651 bp, Homo sapiens
  misc_feature (512)..(515): n is a, c, g, or t
  misc_feature (517)..(519): n is a, c, g, or t
  misc_feature (522)..(522): n is a, c, g, or t
  misc_feature (526)..(526): n is a, c, g, or t
  misc_feature (546)..(546): n is a, c, g, or t
  misc_feature (559)..(559): n is a, c, g, or t
  misc_feature (561)..(561): n is a, c, g, or t
  misc_feature (567)..(567): n is a, c, g, or t
  misc_feature (571)..(571): n is a, c, g, or t
  misc_feature (574)..(574): n is a, c, g, or t
  misc_feature (582)..(582): n is a, c, g, or t
  misc_feature (585)..(585): n is a, c, g, or t
  misc_feature (591)..(591): n is a, c, g, or t
  misc_feature (598)..(599): n is a, c, g, or t
  misc_feature (621)..(621): n is a, c, g, or t
  misc_feature (646)..(646): n is a, c, g, or t
caacaatccattggctaacgaggtcgataacgccagacgcaagacgccgggcctacagcgggagcgtgaggaaagccgtgcgttgcgttccaaggcatctgtgagcccgcggagtatacaccatgagcaaagctcaccctcccgagttgaaaaaatttatggacaagaagttatcattgaaattaaatggtggcagacatgtccaaggaatattgcggggatttgatccctttatgaaccttgtgatagatgaatgtgtggagatggcgactagtggacaacagaacaatattggaatggtggtaatacgaggaaatagtatcatcatgttagaagccttggaacgagtataaataatggctgttcagcagagaaacccatgtcctctctccatagggcctgttttactatgatgtaaaaattaggtcatgtacattttcatattagactttttgttaaataaacttttgtaatagtcaaaaaaaaaaaaaaaaaaaaaaaaaaaaaaacannnnannncanccantttaaactcacttcactttntccactctccccnanttatcntcanttnttcttccnccncacttntctcccnntccaccccccctttttcacccnttttttttcccccactttcccccantttcc

SEQ ID NO: 381911 - DNA, 342 bp, Homo sapiens
ccagtttaattgtgagatggataaattatttctggtagttgatattatatatgtatatgtacacaaatatatctctctactccacttttatttgaaaaaagcagcttaatgagtgtaagagaaccttgagctgcttttcacatggatattgtcactatagcatagaaacagatgcctctatcatatattggtctaattacttcctaatttaaacacgtatttttttaaatagcatgtttattttcaaatattatataattgtctgcatccttaaataattttaaacaatgtgtcccctgactgcatataatgttcaaaagtgtgaggtaaggactttccttt

SEQ ID NO: 381912 - DNA, 267 bp, Homo sapiens
tccacatagcactttccgtttaatctctgttcaatagttgaatcttgttagtggagtgagggttttgtgatgcagattaaccaccacttatcacaagggttctgaagttgctgtattcagaagcaaaagttagtaccacatgctgggcacagtggctcaggcctgtaatcccaacactttgggaggctgaggtgggcagatcacttgagatcaggagttcaagaccagcccgaccaacatggtgaaacctcagctctactaaaaata

SEQ ID NO: 381913 - DNA, 436 bp, Homo sapiens
attgttttgtaaaagtaatttcaattttaatcactgaactaaagaaatgggcaaggctgacttccgtaatataggttctacctaaccatctctaacaccgctgtcaaggaggaccagtgttaaggtacattactaacaaccacacaaatttttaaaagaaaagaacactcttagcagcctatggtactttgaaatgaaatattgcctctcattctcacttgtgttgccattccaaaagtatgaatttgctgaggtttatattctgggtattatataaccattggttctgtttggcataaccctattaaatggtgctcagagctgaattacctacagaaactttctggtttaattagcataaattggtataaatattagtgagcccatacttctgtgatataattaaaccaacttaatgattctcacataaggtgtc

SEQ ID NO: 381914 - DNA, 3184 bp, Homo sapiens
gaagtggggatcggcgagcgggtgggtgcgcctcgggccgcgggactcgcagccgccaccgccgctgccgcctctacggccgcgtcagaactgaagagaggaaggggaggagccgagtcgagcctaagctgccgcccgatcttacccctgacccgagggcggcctggagagcttggtctgtagcggtttccttcggggcaggtggggactgctcctttgggaggaaggaggaggcccaggccgcgtcttcaggcagctgcgcgcaccacccgaaggtgaggcatttggccccaaacagaccctcgaaaagccggactgatcgaggagttaccctacagcctgatctgcacctgctccagggagagagcgccccacccttcccgtggcgtggggtgagacccagcgttggataacgtgtggtcgggccgagcaaatgtttgatgaatgaatgaatgaatgaatgcctctctcacgtggcactcgtgaagctcagaggatatggtggaagtgcaagcgctttgtaaactgcagtgcattgtaacaaactgagttgtaatacattcctcccctccccctagccatgaaaggaaacaggggtgcggcttgagtacagagtcacaacctgagtctttagtggaaaaggagacgaaatgccgagcacgggaagggacccatcctcgcgcagattgttagggcggcgggaagggaggattggaagggagccatcctctgggagattgctgaaggatttttgactgtcaggggaagaatttaatagtccctcacttttacgaatggttctttcttacggtttggagctttcgagagcttctggtcttggttcatcagtgtacgttgtcatcaagaaatgttggcctgtttcaggtctgactcaaaggttattttctttctaaaataagtgttattactattatgcagcttttcctacagatgttatcctggaaaggaaagttaagtagaaactcatgaagtttaaagtgtagttctctaggaaaacaaatttaagataaaaggaccagaatcctcagaaatctgtcttcagtgaatagtatgagaaaaagattaaagcagcagcaatgatgaaagcagattccacaattctgtccctggaccctagtacactctacctccttgggaagcagtagtaatggattttacaagtctttccacctggaggagggggtaaggtaggagcaagtgtattatagacaaatgtgggaagctctgggtttctcccactactgccactaccatctgcaaacagtaaactaaggaaacttttaactgggtaaatccaagggctcgtgttcattaaaatgctgcgggaaaggtggtgagaggggcaaaggaggatgtggcaaaaccaaggagagactcacagactagcacctgaccctactgcccttgacctgaagttccaagagccaggttaaatatcctgcttaaattaccctggatttttctgtctttacgtgaccaatcccctgctacagccttccaaataagactcacaggtaatcagaccaacaagtgatggtctcacatggctacaaaataaatattttttgtttttccccctcttcctatcttacaacaggggaatggtggaaattaaaggagtaaaacacacagatttaggggattttgtgaagctaaacacctcagagagtttaacctttgtaggctttgaaggaaaagagtgcaaacatcagagttctgcagcccagcagagaacacctccagttaagtgtgtaccacatagggtttttcagcagcgtgatcttctgttttcattgtcagtggctccaccttacaacctcagtgctgaggaacagaagggcactcaggagagcctgagccacttacttagaaagtatttaataacagcacactaagcttactgggctagatacccacctcagcacccagcttgataacaggaggaaacagctggaactggagactggagagaaggaagttcatacatttccaacttggtctgcatctctttagttccttgtattgcttattaatccagaggagaaaacagctagttaattaaaaattccaaaaaatctgaagttttagctaatagttacttccctggttcatcaatttaagataaggatctaaatactgtgttaaaatatagaaaaacggagactcttataaggtttttgacctctacacttgaaagtgagctcttacaagaaactaatcagtgtttcgttattccatatcagtggcttttactgtcaaagattgtgtaagctaaattatctggcaaaattttgctttccagaaatactatctatattaattttaacatttttattgtgaaatatagtttaaatacataaagcaattatatagtataagtgattataaaggaaaccaccatgtaaccaatcaaccaggtcaagaaatggaatatttccagcaactcagaagttcccctccctgccatgaccttcccgaacacaactctttccctccctcctaagtgtagtcattattctaacatttgtgataatcatttccctgcttttctttgtcgctttgtcgcaagcatgcatccctaaacaatatattgtttagtctcactctttcttttgaactttatgtaactggaacaatataatatgtaatctgttgttcttgctgcttttgctcaacattgtttttaattcatatgttgttcaggttgttcctatagctgtaatttgtgcattttcattgctgcatattacagtgtcccattataacaatatgtgacaatatgtttagccattctattgctgatggacatctgggttgtttccagtttaggattgttataaatgctaatgtgaacattcttcatatatgtattccatcacatctacgtcagtttctgtataacatatacctgggagtgtaatatgtatcataaacttgaataaataatgccaagttcttttctagagggttacacagtcacactaggtatatatgagtcccattgctccacaccttcacaacacttgacattattggtctttttggttttgccagtctggtgggtgtatggtaatatatcattgtggttttaactgtcatttctctgattactgatgctgttgaggaccttcttgtatacaactagctatttggatttacattt

SEQ ID NO: 381915 - DNA, 863 bp, Homo sapiens
ttgcccacatctgttcaggccttcttgaaaagtgaagaattggagatactatagccagcatgtcaaaaagttgactggcacttctaggaaccatcaacatgcagttgcttttagcccacagagcttgtttttgttttgttttattaatttacatttattgtccattcttacaagttgggacatttcacataattaagttgctaacatctcttaaaaagcaagatttggcaacaatggacctcattcccagaaggtaacaacctgctagagccaagttgtccctgccctctccagccaggtgtggggtctacaggtatcactgccacagcctcatttcttatatttgtacaacctgactgtgaatttgcaacccatacactgcgtgaatctaaattctactgaggcagagaccatggctgttttaacttttattctagttaccagcttagcatatggtagtagtgatagtagtaactgtgatcatcatcactaaaactggagtgctcactacatgctattctctgttctaagcacattccatttacttacttagtcctcatatctactttatgaattaggtactgtctttctttgatggtaatgatccttttataaaattaaattagtgctaagagactttcagcaatgttatatattgcctgtccattaaagattgttgccaaatggagtgagttgtccccagtaaggattcactatcaatgcagaagaaatgcacggataatctactttgcataaagaatggggctaggttgcatctgcatggtatcccaaataaataaaatgtgccactacccttgcaccaaaattattttatgatgggtaaagttagacccttgagaggt

SEQ ID NO: 381916 - DNA, 429 bp, Homo sapiens
ttgcccacatctgttcaggccttcttgaaaagtgaagaattggagatactatagccagcatgtcaaaaagttgactggcacttctaggaaccatcaacatgcagttgcttttagcccacagagcttgtttttgttttgttttattaatttacatttattgtccattcttacaagttgggacatttcacataattaagttgctaacatctcttaaaaagcaagatttggcaacaatggacctcattcccagaaggtaacaacctgctagagccaagttgtccctgccctctccagccaggtgtggggtctacaggtatcactgccacagcctcatttcttatattttggaccaaccctggacctgtggaatatttggcaaaccccaattacaaccttggcggtgtactttctataatattcttatcttgg

SEQ ID NO: 381917 - DNA, 1287 bp, Homo sapiens
ctgctatgatcagtttgtattccatctctgagatatgtggtcttgacctcccagcatgaagtgtgcatggctttgagaagtgcctcagcaccctgaaatggactaaggccagctttcattaagaatctaagttcttctaagtgggcctttaaaaaccccagctgccagagaccccaacactaagccctaaatctgctgaggccactgctggttattttaagccacatcacacttgcttccacttgccgggcttgattaagggcccacgtgacatgagaagggagctctagggaagccgtttcattcttctgggtcttacagtctttggctgaaattctgaactcagaagtcccctccaaggcatccagtctttggtggttgtagggctggttttaaaaccagataccacattttcttcctattgaaaacaaaatgccagttgcattggtttcccctgggctagaacagtttttttcttacctctgtaagtgggttctgtaaaaaatggaggctttagagaaaagccaatcatttttaagtccaatggcaaacatagtgggggctgcagtagcacctagcttttaccttaatttcgacacacttctgttgaatctcaccagaccatgtgggaggatttaggtgaatccctagcagattgcttcccagggctccctgagtgtgtccagataccaagtgaggaatgaggtgtgatttgctgtatcatttgaaccaaaaagtatgcagcatgagaatttgctagatcgtttatcctgactgaaatagacaaagtaagagggaaaggaaaagaggtatcaagtaaatactgaaacccaatggtgtttttaaactgtttctgtttttattcatcttttgtaactatgacagaaatgtgctattttttcagtgggcaattttgtaatatattcagactatccagatacagagatgactaaggtcattgatagcgtctctgaacaatcagacggatcaccttatctctacacagctggcaaacaccaggctgcggcttggattaaccaggaaagaaagcttttctcactgagttgtttttatgtattgatggggacttttccacctcattagactaatactcattcaaaaagagtttggttctgctgtaaatccttgccgcctgctgaaacatggtgtgcaggtcaacggagaatactagctgctcctttttcaccacctttaccaatttcctatttgatggtttgtaagtagacagtaaggcaaggcagatgattattaccctcagaaaggttg

SEQ ID NO: 381918 - DNA, 938 bp, Homo sapiens
gttctagagggtcccctccagtaatgtgtgaccagggctggttttaaaaccagataccacattttcttcctattgaaaacaaaatgccagttgcattggtttcccctgggctagaacagtttttttcttacctctgtaagtgggttctgtaaaaaatggaggctttagagaaaagccaatcatttttaagtccaatggcaaacatagtgggggctgcagtagcacctagcttttaccttaatttcgacacacttctgttgaatctcaccagaccatgtgggaggatttaggtgaatccctagcagattgcttcccagggctccctgagtgtgtccagataccaagtgaggaatgaggtgtgatttgctgtatcatttgaaccaaaaagtatgcagcatgagaatttgctagatcgtttatcctgactgaaatagacaaagtaagagggaaaggaaaagaggtatcaagtaaatactgaaacccaatggtgtttttaaactgtttctgtttttattcatcttttgtaactatgacagaaatgtgctattttttcagtgggcaattttgtaatatattcagactatccagatacagagatgactaaggtcattgatagcgtctctgaacaatcagacggatcaccttatctctacacagctggcaaacaccaggctgcggcttggattaaccaggaaagaaagcttttctcactgagttgtttttatgtattgatggggacttttccacctcattagactaatactcattcaaaaagagtttggttctgctgtaaatccttgccgcctgctgaaacatggtgtgcaggtcaacggagaatactagctgctcctttttcaccacctttaccaatttcctatttgatggtttgtaagtagacagtaaggcaaggcagatgattattaccctcagaaaggttg

SEQ ID NO: 381919 - DNA, 879 bp, Homo sapiens
  misc_feature (1)..(1): n is a, c, g, or t
naccctgaatcggaggacaaccagtaagctacccttttaccatcattggacaagtagcatccgtactatacttcacaacaatcctaattctaataccaactatctccctaattgaaaacaaaatactcaaatgggcacacattatggagtaatgtgtgcccagcacctagcttttaccttaatttcgacacacttctgttgaatctcaccagaccatgtgggaggatttaggtgaatccctagcagattgcttcccagggctccctgagtgtgtccagataccaagtgaggaatgaggtgtgatttgctgtatcatttgaaccaaaaagtatgcagcatgagaatttgctagatcgtttatcctgactgaaatagacaaagtaagagggaaaggaaaagaggtatcaagtaaatactgaaacccaatggtgtttttaaactgtttctgtttttattcatcttttgtaactatgacagaaatgtgctattttttcagtgggcaattttgtaatatattcagactatccagatacagagatgactaaggtcattgatagcgtctctgaacaatcagacggatcaccttatctctacacagctggcaaacaccaggctgcggcttggattaaccaggaaagaaagcttttctcactgagttgtttttatgtattgatggggacttttccacctcattagactaatactcattcaaaaagagtttggttctgctgtaaatccttgccgcctgctgaaacatggtgtgcaggtcaacggagaatactagctgctcctttttcaccacctttaccaatttcctatttgatggtttgtaagtagacagtaaggcaaggcagatgattattaccctcagaaaggttg

SEQ ID NO: 381920 - DNA, 372 bp, Homo sapiens
gcgtcgacctgaaacaagttcatgtagcaacttgaagacattgatacttgacttgtatatgacccaaatacacagatttttcacatctgctctcagattgtcctaatttaattcaccatgatacatgattacgtgacatcatagacagtaactccaaaaagggaacgaagaaacagaatactctggaacttggtatgtttttagactcaaccctacataacatataacactatgaaagttacatttttgggctatgagtcaaatggccttgtctcgcacccagctgtgccctcgggttacgtagtcttccaggtttacaacattatattcacttctaaatgaataaattggattagaggatttttaagatat

SEQ ID NO: 381921 - DNA, 369 bp, Homo sapiens
gattcctgtatacccctcacccagattccccaaatgttggtattttgtcacatttctattgtcattttttttctttattgtatggatatttttcctgtaccatttgacagtaagttgcacacatgatacctcttcagtaggcatttctgaaagaacgacgacattctcttacataaccagaatatcattatccgtatcaggaaattaaaatccttacagcattattatctaatccatagatagtattcaaatgtcatcaccaatttttctaattacatccatataacagaagaaaaaacctttagtctggtcctggatgcagtccaagttcacacattgcacgtaattgtcttggctgtttagtttcct

SEQ ID NO: 381922 - DNA, 280 bp, Homo sapiens
atatgatttcaaacaattgtgaaaaaacaccactttttaggatctgttccctccccacaagctcactctgctaccccatttctactcccatcccctaccccttcaaccatagtagttcagcttttatatgctttttggtttactcttctgtgtgagatttgattagaaagaagagtgctcttggctaaaattagctctcaaatttctgccttagagcaagtcaggtatttatctctcaatccatattctgcttgactaaactatgaaggtaggtactttg

SEQ ID NO: 381923 - DNA, 116 bp, Homo sapiens
taaggtggaacaataatcctccccacctgaacagacctcaccacgcctcctgctgttttagcaaccccggggctccatcccagggctcctactgaatgtcccctgcctcttctcac

SEQ ID NO: 381924 - DNA, 456 bp, Homo sapiens
atgtaatgataccagatagtatataatagatgttgaataagtggtacagacagcaagtacagccagaattctgagtataaaaaaaaaagattcaaactctgaaactttttgagcactgacatgatgctcaaaagaaatgatcattggagcattttggatttcacattttttgattgggatgcttaacaggtaagtgtaataaaatattgcaaaatccaaaaaaatctcaaatctgaaatactcctgattaagcatttcagaaaactgatactcaacctgtattagaaataaaacatttattctatcttagagaaaactcatcatgtctaatcgtagatacagaaatttccagcaataactacttaagataactaagagattaggagagcatctataggaggacaaaccacaaaaacttagaactctttaatctggaaaaatccagactgcattggg

SEQ ID NO: 381925 - DNA, 404 bp, Homo sapiens
ctgccctctacgtaggcaactctctttaaggagtctctgaatcctaagagaacagaatgtttggaatgggtgtaatgaagatattgagtgactttctcctttctgcaggaccggatggtttccatggtcatggacagagagtatgatgtggcagtggaggctgtcagattactgatacttatccttaagtgagtcctgggaagaggggaggccagtgtctcagacctttgcccttccagggtcatctccctccacctgtcatagctgactcttccatctgtgcaggttgactgaggtcattcctgagttgcagtatgttgatttctgtcttctctaactccccatactcctttgtcttccgctcttcatttagaagttttttgtgagttatgtccttgttgctt

SEQ ID NO: 381926 - DNA, 5618 bp, Homo sapiens
ccgggccgcccgcgtgcccaagcccacgtgagagggcaggacgcctgagagcttgaggccacacgaggctgtggagcggcgtgactcaaacgtggcgcgcatcagctcgcacacttccaaacctcgcgatagctactggccctgggcgagccgttgggattgcgcttgcgcacagcgtgtcttgtacgttcccgcgcttttctggaatctttcgcccccggaagggcagcggcgggcgcctgtgtggaaggtggggtggccagagacacccgagggacctgagctggatcgccatacctaccctgtggtcctcatcttcctggcctcatagctcctcctctccaagcatgtcttccccgttgcaaagagctgtgggagataccaagagggccttgtctgcatcttctagttcctctgccagtctaccctttgatgacagggactcaaaccatacctcagaggggaatggcgactctttgttagctgatgaagacactgactttgaagacagcttgaatcgcaatgtgaagaagagagcagcaaaacgaccaccgaaaacaacaccggtggcaaaacatccaaagaaagggtcccgagtggtacatcgtcatagccggaaacagtcagagccaccagccaatgatcttttcaatgctgtgaaagccgccaaaagtgacatgcagtctttggtagatgagtggctggatagctacaagcaagaccaggatgcaggatttctggagcttgttaactttttcatccaatcttgcggatgtaaaggcattgtgacccctgagatgttcaagaagatgtccaactcagagatcatccagcacctaacagagcagtttaatgaggactcgggggactaccctctcatagctccaggtccatcctggaagaagttccagggcagcttctgtgaatttgtgaggacattggtctgtcagtgccagtacagcctcctctatgatggcttccctatggacgacctcatctccctgctcactggcctctcagactcacaagtccgcgccttccgtcacactagcaccctggctgctatgaaactgatgacctccctggtaaaagttgccctccaactgagtgtgcaccaagataacaatcagcgtcagtatgaggctgaaagaaacaaggggccagggcagagggcacctgagcggctggagagcctgttggagaaacgcaaagagctccaagagcatcaagaggagattgaggggatgatgaatgccctcttcaggggtgtctttgttcatcggtacagggatgtccttcctgagatccgtgctatctgcattgaggaaattgggtgttggatgcaaagctacagcacgtctttcctcaccgacagctatttaaaatatattggttggactctgcatgataagcaccgagaagtccgcctgaagtgtgtgaaggccctgaaagggctgtacggtaaccgggacctgaccacacgcctggagctcttcaccagccgcttcaaggaccggatggtttccatggtcatggacagagagtatgatgtggcagtggaggctgtcagattactgatacttatccttaagaacatggaagggttgctgacggacgcggattgtgagagcgtctaccccgttgtgtatccttctaatcgaggcctggcttctgccgcaggcgaatttctgtactggaaacttttctaccctgagtgcgagataagaacgatgggtggaagagagcaacgccagagcccaggcgcccagaggactttcttccagcttctgctgtccttctttgtggagagcgagctccatgaccacgctgcttacttagtagacagtctgtgggactgtgcaggggctcggctgaaggactgggagggtctgacaagcctgctgctggagaaggaccagaacctgggtgatgtgcaggagagcacactgatagaaatccttgtgtccagtgcccggcaagcttcagaggggcacccgcctgtgggccgggtcactgggaggaagggcttaacctctaaggagcgcaagacccaagccgatgacagggtgaagttgactgagcacctcatccccctgctgccccagctcctggccaagttctcagctgatgcagagaaggtcactcccctgctccagcttctcagctgctttgacctccacatctactgcactgggcgcttggagaagcacctggagctgttcctgcagcaactccaggaggtggtggtgaagcatgcagagccagcggtgcttgaggctggggcgcatgccctctacctgctctgtaatcccgaattcactttcttcagccgggcggactttgcccgcagccagctagtagatttgctgactgaccgcttccagcaggagcttgaagagctgttacaggtaggagctggggctggacaatgggacaccccaaacaagggtgggaggggctgcaagacgggggatgtggactgatgagttctgggggaaatgctattgtggatcttctttccttctcagtcgtccttcctagatgaggatgaggtatataatctggcagccactctgaaacgcctctctgccttctacaagtgagtggctttcctcctcttccccatcccgtttttactggtgtctgtggagttggttccctctgttcttttccagtataacattcccctttctcccccaaagcactcatgacctgactcgctgggagctctatgagccatgttgccaactcctgcagaaggctgtggacacaggagaggttcctcaccaggtgagtggacaggctagagatgggttgggggctggggggctagattttaaggacctacgttctaggtggccactaggtgtgtcaagtctcagtgcgtggagtggacaaagcgaggaagatcaggtgggtgggggtcacctcttacattcctctcttagaaggtggactctacttccagggtcttcttggatttcctggaagccaaggataatattgagggattctagaagacgtagagtaaattagggagcggtgacatttctacttcgtgtagatgcctctgaagaatgtccagaatatcactcattttccactggaaaaggaattagctctccctttactcattttctctcctcttcactggtgtgtttctggctatctgtctctccctctcctaacccaaacctcatttttcaaaccctttgttgttacaggttatcctgccagccttgactcttgtctatttttccattctctggacactaacccacatttctaaatcagatgcttcccaggtgagtgtgggtcttagatgggataatgggaacagaggagtctgtgtcttcattcttccccttcaagccactgtgcccacagaagcagctgtcgagtttgagggacagaatggtggccttctgtgaactctgccagagttgcctctcagatgtggatactgagatccaggagcaggtgagtactgactcaagtgggagcaacaaggcgagtatccctgcccccattccaaggagaaattgacagtgtcatttctaccttgggaaacattctgtccttttaaacatcctttcttttccccctacaggcttttgtcttattaagtgatctacttctcatctttagccctcagatgattgttgggggccgtgatttccttaggccacttgtcttttttcctgaagctactctccagtctgagctagccagcttcctcatggaccacgtcttcatccagccgggagacctgggcagtggtgcagtgactctatacctggggctcagtaagggctggggcttgggtgtagctcagaaatatagggcaggaagcttaagtctgtgattcccttttgccttccatgtgagccaggtgattcccaggaggatcatttacagatagagcggctacaccagcggcgccgcctcctagccgggttctgcaagctgttgctttatggggtgctggagatggatgcagcctcagatgttttcaaacactacaacaaggtaacaagttctacaatgactatggtgacattatcaaggaaacattaactagagcaaggcagattgaccgaagtcattgttcccgaatcctgctgctgagcctcaagcagctgtacacagaactgctgcaggagcatgggccccagggcctgaatgagcttcctgccttcatcgagatgagggacctggcccggaggtttgccttgagttttggaccccagcagctgcagaaccgtgacctcgtggtcatgctacacaaggaaggcatccagttctccttgtctgagcttcctccagctggctcctccaatcagcctccaaatctggcattcctggagctcctttcagagttttccccccgactcttccatcaggacaagcagcttttgctgtcctatctagaaaagtgcctgcagcatgtctcccaggcacctggccatccctggggcccagtcaccacctactgccactccctcagccctgtggagaacacagcagagaccagccctcaggtcctccccagctccaagaggaggcgcgttgaagggcctgccaagcctaacagagaggacgtctcctcgtcccaggaagaaagtctgcagctgaacagcatcccgcccacgcccaccctcacctccacagctgtgaagagcaggcagcccctgtgggggttgaaagagatggaggaagaagatggctcagagttggattttgcccagggtcagcccgtcgcaggcaccgagaggtcaaggttcttgggtccacaatatttccagactccacacaacccttcaggtcctggcctgggcaaccagctgatgcgactcagccttatggaagaggacgaggaagaagagttagaaatccaggatgagtcaaatgaagaacggcaggatacagacatgcaagcaagtagctactcttccaccagtgagcgcgggctggacctcttagattctacagagctggatattgaggatttctgacaggactctgggcccctccccagctccactccctacctcaagaatgtgaccatttggaaaaggcaaagagaaaaggagcaaaatgaagcattcccccaggcttcagccctgggctctgaggggaaagagttgggcattgtttttctaacctaacctttccctctggggtagagaagccgagagaccctgtcctccctaatgcactgtggcccagtccccttgcctttttcctgttctgtttggagtggagaagggcagcacctctgtgtttaatggaaatagcccatagtctcctggatttttggaacatctttctcagcctattttgtgtcctaatgattcgctcaataaacatgtttgaatccaaaaaaaaaacacaaaacaaaaaaacaaaaaaaaaagaagaccacaaccacaacaaaaccgcgggcacccccagcacggcgcgccgcgaacaaaaggcggagaccacacaccgcgccacggggcagacagagcgcacagacagcccaagcgccgcagcgccacaacacggcaccaacgcgccagagaccaaagacagcgcggcgagcaacgcgcaaacgacagggaagcccacagaac

SEQ ID NO: 381927 - DNA, 6047 bp, Homo sapiens
ccgggccgcccgcgtgcccaagcccacgtgagagggcaggacgcctgagagcttgaggccacacgaggctgtggagcggcgtgactcaaacgtggcgcgcatcagctcgcacacttccaaacctcgcgatagctactggccctgggcgagccgttgggattgcgcttgcgcacagcgtgtcttgtacgttcccgcgcttttctggaatctttcgcccccggaagggcagcggcgggcgcctgtgtggaaggtggggtggccagagacacccgagggacctgagctggatcgccatacctaccctgtggtcctcatcttcctggcctcatagctcctcctctccaagcatgtcttccccgttgcaaagagctgtgggagataccaagagggccttgtctgcatcttctagttcctctgccagtctaccctttgatgacagggactcaaaccatacctcagaggggaatggcgactctttgttagctgatgaagacactgactttgaagacagcttgaatcgcaatgtgaagaagagagcagcaaaacgaccaccgaaaacaacaccggtggcaaaacatccaaagaaagggtcccgagtggtacatcgtcatagccggaaacagtcagagccaccagccaatgatcttttcaatgctgtgaaagccgccaaaagtgacatgcagtctttggtagatgagtggctggatagctacaagcaagaccaggatgcaggatttctggagcttgttaactttttcatccaatcttgcggatgtaaaggcattgtgacccctgagatgttcaagaagatgtccaactcagagatcatccagcacctaacagagcagtttaatgaggactcgggggactaccctctcatagctccaggtccatcctggaagaagttccagggcagcttctgtgaatttgtgaggacattggtctgtcagtgccagtacagcctcctctatgatggcttccctatggacgacctcatctccctgctcactggcctctcagactcacaagtccgcgccttccgtcacactagcaccctggctgctatgaaactgatgacctccctggtaaaagttgccctccaactgagtgtgcaccaagataacaatcagcgtcagtatgaggctgaaagaaacaaggggccagggcagagggcacctgagcggctggagagcctgttggagaaacgcaaagagctccaagagcatcaagaggagattgaggggatgatgaatgccctcttcaggggtgtctttgttcatcggtacagggatgtccttcctgagatccgtgctatctgcattgaggaaattgggtgttggatgcaaagctacagcacgtctttcctcaccgacagctatttaaaatatattggttggactctgcatgataagcaccgagaagtccgcctgaagtgtgtgaaggccctgaaagggctgtacggtaaccgggacctgaccacacgcctggagctcttcaccagccgcttcaaggaccggatggtttccatggtcatggacagagagtatgatgtggcagtggaggctgtcagattactgatacttatccttaagaacatggaagggttgctgacggacgcggattgtgagagcgtctaccccgttgtgtatccttctaatcgaggcctggcttctgccgcaggcgaatttctgtactggaaacttttctaccctgagtgcgagataagaacgatgggtggaagagagcaacgccagagcccaggcgcccagaggactttcttccagcttctgctgtccttctttgtggagagcgagctccatgaccacgctgcttacttagtagacagtctgtgggactgtgcaggggctcggctgaaggactgggagggtctgacaagcctgctgctggagaaggaccagaacctgggtgatgtgcaggagagcacactgatagaaatccttgtgtccagtgcccggcaagcttcagaggggcacccgcctgtgggccgggtcactgggaggaagggcttaacctctaaggagcgcaagacccaagccgatgacagggtgaagttgactgagcacctcatccccctgctgccccagctcctggccaagttctcagctgatgcagagaaggtcactcccctgctccagcttctcagctgctttgacctccacatctactgcactgggcgcttggagaagcacctggagctgttcctgcagcaactccaggaggtggtggtgaagcatgcagagccagcggtgcttgaggctggggcgcatgccctctacctgctctgtaatcccgaattcactttcttcagccgggcggactttgcccgcagccagctagtagatttgctgactgaccgcttccagcaggagcttgaagagctgttacaggtaggagctggggctggacaatgggacaccccaaacaagggtgggaggggctgcaagacgggggatgtggactgatgagttctgggggaaatgctattgtggatcttctttccttctcagtcgtccttcctagatgaggatgaggtatataatctggcagccactctgaaacgcctctctgccttctacaagtgagtggctttcctcctcttccccatcccgtttttactggtgtctgtggagttggttccctctgttcttttccagtataacattcccctttctcccccaaagcactcatgacctgactcgctgggagctctatgagccatgttgccaactcctgcagaaggctgtggacacaggagaggttcctcaccaggtgagtggacaggctagagatgggttgggggctggggggctagattttaaggacctacgttctaggtggccactaggtgtgtcaagtctcagtgcgtggagtggacaaagcgaggaagatcaggtgggtgggggtcacctcttacattcctctcttagaaggtggactctacttccagggtcttcttggatttcctggaagccaaggataatattgagggattctagaagacgtagagtaaattagggagcggtgacatttctacttcgtgtagatgcctctgaagaatgtccagaatatcactcattttccactggaaaaggaattagctctccctttactcattttctctcctcttcactggtgtgtttctggctatctgtctctccctctcctaacccaaacctcatttttcaaaccctttgttgttacaggttatcctgccagccttgactcttgtctatttttccattctctggacactaacccacatttctaaatcagatgcttcccaggtgagtgtgggtcttagatgggataatgggaacagaggagtctgtgtcttcattcttccccttcaagccactgtgcccacagaagcagctgtcgagtttgagggacagaatggtggccttctgtgaactctgccagagttgcctctcagatgtggatactgagatccaggagcaggtgagtactgactcaagtgggagcaacaaggcgagtatccctgcccccattccaaggagaaattgacagtgtcatttctaccttgggaaacattctgtccttttaaacatcctttcttttccccctacaggcttttgtcttattaagtgatctacttctcatctttagccctcagatgattgttgggggccgtgatttccttaggccacttgtcttttttcctgaagctactctccagtctgagctagccagcttcctcatggaccacgtcttcatccagccgggagacctgggcagtggtgcagtgactctatacctggggctcagtaagggctggggcttgggtgtagctcagaaatatagggcaggaagcttaagtctgtgattcccttttgccttccatgtgagccaggtgattcccaggaggatcatttacagatagagcggctacaccagcggcgccgcctcctagccgggttctgcaagctgttgctttatggggtgctggagatggatgcagcctcagatgttttcaaacactacaacaaggtaacaagttctacaatgactatggtgacattatcaaggaaacattaactagagcaaggcagattgaccgaagtcattgttcccgaatcctgctgctgagcctcaagcagctgtacacagaactgctgcaggagcatgggccccagggcctgaatgagcttcctgccttcatcgagatgagggacctggcccggaggtttgccttgagttttggaccccagcagctgcagaaccgtgacctcgtggtcatgctacacaaggaaggcatccagttctccttgtctgagcttcctccagctggctcctccaatcagcctccaaatctggcattcctggagctcctttcagagttttccccccgactcttccatcaggacaagcagcttttgctgtcctatctagaaaagtgcctgcagcatgtctcccaggcacctggccatccctggggcccagtcaccacctactgccactccctcagccctgtggagaacacagcagagaccagccctcaggtcctccccagctccaagaggaggcgcgttgaagggcctgccaagcctaacagagaggacgtctcctcgtcccaggaagaaagtctgcagctgaacagcatcccgcccacgcccaccctcacctccacagctgtgaagagcaggcagcccctgtgggggttgaaagagatggaggaagaagatggctcagagttggattttgcccaggggtgaggccatggagggaatctgggtgtctgagttcccagtttggtgtctggctgcctccatcttgctgtttctgtttcatggttccctgctgtagcactcccacattgttgggttcttctcaaacccttctccattgtttagctttaaaatgcatctctctgagcttttctccccattaacaccagctgccttacatcctcttcttacccttgatttttatcccatcattgatcctgcttcattcccagcagtcagcccgtcgcaggcaccgagaggtcaaggttcttgggtccacaatatttccagactccacacaacccttcaggtcctggcctgggcaaccagctgatgcggtgagcttttctcatcatctcctgtcttcacttcagatctgtcgcccactgtgaggggattcctgtctcacccattgcctctctgtgggtgctttttggacttgttttagccacagagcacttcctgtcagcacaatcgggaaactactatgctgtacttactgctccccacttcccccaccccgggtgtctgagaaactctcaggggtcctcaaagaacagtttgaaaagccagtctctttgcccctacatcagactcagccttatggaagaggacgaggaagaagagttagaaatccaggatgagtcaaatgaagaacggcaggatacagacatggtgagtagaccaccctgcccttctctctcaagaactaggggctgatgtgccaaagagaagccagggtgtttcccctctctccgctcggtgatgcctggtctggaaaagctgaatgaatctagagtaaaggaggacaggttatatgttggtttggactttgcttggactctacttttattaaagaataaggaaaagaaattacaaataccaaagaaggttggaatagcactctcgctcccaatccctaaataaatattgttgcctccgaaccccctaggaattggaaggagtcctaatgctggaggtgggaggtcattcagtccaagtggcagccccttcagtgtctctccccacaaaacatgaccccctatcctccatctccctactagagggcttcccctccctgtcccttccctcactccctttctaacctagcctgtttccccaggaggaactgctgctggtgtagtgggaaaagcctggcatttggagtgaggtgacatgagtgctagtcctcaactccatgtcaagttagcgcttttacccctcctcagcctccattttctcatctttattttttaattatttttattttttgaggtagag

SEQ ID NO: 381928 - DNA, 4280 bp, Homo sapiens
ccgggccgcccgcgtgcccaagcccacgtgagagggcaggacgcctgagagcttgaggccacacgaggctgtggagcggcgtgactcaaacgtggcgcgcatcagctcgcacacttccaaacctcgcgatagctactggccctgggcgagccgttgggattgcgcttgcgcacagcgtgtcttgtacgttcccgcgcttttctggaatctttcgcccccggaagggcagcggcgggcgcctgtgtggaaggtggggtggccagagacacccgagggacctgagctggatcgccatacctaccctgtggtcctcatcttcctggcctcatagctcctcctctccaagcatgtcttccccgttgcaaagagctgtgggagataccaagagggccttgtctgcatcttctagttcctctgccagtctaccctttgatgacagggactcaaaccatacctcagaggggaatggcgactctttgttagctgatgaagacactgactttgaagacagcttgaatcgcaatgtgaagaagagagcagcaaaacgaccaccgaaaacaacaccggtggcaaaacatccaaagaaagggtcccgagtggtacatcgtcatagccggaaacagtcagagccaccagccaatgatcttttcaatgctgtgaaagccgccaaaagtgacatgcagtctttggtagatgagtggctggatagctacaagcaagaccaggatgcaggatttctggagcttgttaactttttcatccaatcttgcggatgtaaaggcattgtgacccctgagatgttcaagaagatgtccaactcagagatcatccagcacctaacagagcagtttaatgaggactcgggggactaccctctcatagctccaggtccatcctggaagaagttccagggcagcttctgtgaatttgtgaggacattggtctgtcagtgccagtacagcctcctctatgatggcttccctatggacgacctcatctccctgctcactggcctctcagactcacaagtccgcgccttccgtcacactagcaccctggctgctatgaaactgatgacctccctggtaaaagttgccctccaactgagtgtgcaccaagataacaatcagcgtcagtatgaggctgaaagaaacaaggggccagggcagagggcacctgagcggctggagagcctgttggagaaacgcaaagagctccaagagcatcaagaggagattgaggggatgatgaatgccctcttcaggggtgtctttgttcatcggtacagggatgtccttcctgagatccgtgctatctgcattgaggaaattgggtgttggatgcaaagctacagcacgtctttcctcaccgacagctatttaaaatatattggttggactctgcatgataagcaccgagaagtccgcctgaagtgtgtgaaggccctgaaagggctgtacggtaaccgggacctgaccacacgcctggagctcttcaccagccgcttcaaggaccggatggtttccatggtcatggacagagagtatgatgtggcagtggaggctgtcagattactgatacttatccttaagaacatggaagggttgctgacggacgcggattgtgagagcgtctaccccgttgtgtatccttctaatcgaggcctggcttctgccgcaggcgaatttctgtactggaaacttttctaccctgagtgcgagataagaacgatgggtggaagagagcaacgccagagcccaggcgcccagaggactttcttccagcttctgctgtccttctttgtggagagcgagctccatgaccacgctgcttacttagtagacagtctgtgggactgtgcaggggctcggctgaaggactgggagggtctgacaagcctgctgctggagaaggaccagaacctgggtgatgtgcaggagagcacactgatagaaatccttgtgtccagtgcccggcaagcttcagaggggcacccgcctgtgggccgggtcactgggaggaagggcttaacctctaaggagcgcaagacccaagccgatgacagggtgaagttgactgagcacctcatccccctgctgccccagctcctggccaagttctcagctgatgcagagaaggtcactcccctgctccagcttctcagctgctttgacctccacatctactgcactgggcgcttggagaagcacctggagctgttcctgcagcaactccaggaggtggtggtgaagcatgcagagccagcggtgcttgaggctggggcgcatgccctctacctgctctgtaatcccgaattcactttcttcagccgggcggactttgcccgcagccagctagtagatttgctgactgaccgcttccagcaggagcttgaagagctgttacaggtaggagctggggctggacaatgggacaccccaaacaagggtgggaggggctgcaagacgggggatgtggactgatgagttctgggggaaatgctattgtggatcttctttccttctcagtcgtccttcctagatgaggatgaggtatataatctggcagccactctgaaacgcctctctgccttctacaagtgagtggctttcctcctcttccccatcccgtttttactggtgtctgtggagttggttccctctgttcttttccagtataacattcccctttctcccccaaagcactcatgacctgactcgctgggagctctatgagccatgttgccaactcctgcagaaggctgtggacacaggagaggttcctcaccaggtgagtggacaggctagagatgggttgggggctggggggctagattttaaggacctacgttctaggtggccactaggtgtgtcaagtctcagtgcgtggagtggacaaagcgaggaagatcaggtgggtgggggtcacctcttacattcctctcttagaaggtggactctacttccagggtcttcttggatttcctggaagccaaggataatattgagggattctagaagacgtagagtaaattagggagcggtgacatttctacttcgtgtagatgcctctgaagaatgtccagaatatcactcattttccactggaaaaggaattagctctccctttactcattttctctcctcttcactggtgtgtttctggctatctgtctctccctctcctaacccaaacctcatttttcaaaccctttgttgttacaggttatcctgccagccttgactcttgtctatttttccattctctggacactaacccacatttctaaatcagatgcttcccaggtgagtgtgggtcttagatgggataatgggaacagaggagtctgtgtcttcattcttccccttcaagccactgtgcccacagaagcagctgtcgagtttgagggacagaatggtggccttctgtgaactctgccagagttgcctctcagatgtggatactgagatccaggagcaggtgagtactgactcaagtgggagcaacaaggcgagtatccctgcccccattccaaggagaaattgacagtgtcatttctaccttgggaaacattctgtccttttaaacatcctttcttttccccctacaggcttttgtcttattaagtgatctacttctcatctttagccctcagatgattgttgggggccgtgatttccttaggccacttgtcttttttcctgaagctactctccagtctgagctagccagcttcctcatggaccacgtcttcatccagccgggagacctgggcagtggtgcagtgactctatacctggggctcagtaagggctggggcttgggtgtagctcagaaatatagggcaggaagcttaagtctgtgattcccttttgccttccatgtgagccaggtgattcccaggaggatcatttacagatagagcggctacaccagcggcgccgcctcctagccgggttctgcaagctgttgctttatggggtgctggagatggatgcagcctcagatgttttcaaacactacaacaaggtaacaagccagcttgggcttcacgaagccactggtgatgccgaggttctcggctgctacagtctagccactgaccacaggatggtgaactctgatgacaacgtgtgggtgacaaagggcaggtcccgcttgagcaccaggatgaagtctgtctgatacgtggacagcatgaacacggatatgttctggtcagccagtggggcgatgactgacttggcgatcttggtcatgccaataggctgggagctgga

SEQ ID NO: 381929 - DNA, 5318 bp, Homo sapiens
ccgggccgcccgcgtgcccaagcccacgtgagagggcaggacgcctgagagcttgaggccacacgaggctgtggagcggcgtgactcaaacgtggcgcgcatcagctcgcacacttccaaacctcgcgatagctactggccctgggcgagccgttgggattgcgcttgcgcacagcgtgtcttgtacgttcccgcgcttttctggaatctttcgcccccggaagggcagcggcgggcgcctgtgtggaaggtggggtggccagagacacccgagggacctgagctggatcgccatacctaccctgtggtcctcatcttcctggcctcatagctcctcctctccaagcatgtcttccccgttgcaaagagctgtgggagataccaagagggccttgtctgcatcttctagttcctctgccagtctaccctttgatgacagggactcaaaccatacctcagaggggaatggcgactctttgttagctgatgaagacactgactttgaagacagcttgaatcgcaatgtgaagaagagagcagcaaaacgaccaccgaaaacaacaccggtggcaaaacatccaaagaaagggtcccgagtggtacatcgtcatagccggaaacagtcagagccaccagccaatgatcttttcaatgctgtgaaagccgccaaaagtgacatgcagtctttggtagatgagtggctggatagctacaagcaagaccaggatgcaggatttctggagcttgttaactttttcatccaatcttgcggatgtaaaggcattgtgacccctgagatgttcaagaagatgtccaactcagagatcatccagcacctaacagagcagtttaatgaggactcgggggactaccctctcatagctccaggtccatcctggaagaagttccagggcagcttctgtgaatttgtgaggacattggtctgtcagtgccagtacagcctcctctatgatggcttccctatggacgacctcatctccctgctcactggcctctcagactcacaagtccgcgccttccgtcacactagcaccctggctgctatgaaactgatgacctccctggtaaaagttgccctccaactgagtgtgcaccaagataacaatcagcgtcagtatgaggctgaaagaaacaaggggccagggcagagggcacctgagcggctggagagcctgttggagaaacgcaaagagctccaagagcatcaagaggagattgaggggatgatgaatgccctcttcaggggtgtctttgttcatcggtacagggatgtccttcctgagatccgtgctatctgcattgaggaaattgggtgttggatgcaaagctacagcacgtctttcctcaccgacagctatttaaaatatattggttggactctgcatgataagcaccgagaagtccgcctgaagtgtgtgaaggccctgaaagggctgtacggtaaccgggacctgaccacacgcctggagctcttcaccagccgcttcaaggaccggatggtttccatggtcatggacagagagtatgatgtggcagtggaggctgtcagattactgatacttatccttaagaacatggaagggttgctgacggacgcggattgtgagagcgtctaccccgttgtgtatccttctaatcgaggcctggcttctgccgcaggcgaatttctgtactggaaacttttctaccctgagtgcgagataagaacgatgggtggaagagagcaacgccagagcccaggcgcccagaggactttcttccagcttctgctgtccttctttgtggagagcgagctccatgaccacgctgcttacttagtagacagtctgtgggactgtgcaggggctcggctgaaggactgggagggtctgacaagcctgctgctggagaaggaccagaacctgggtgatgtgcaggagagcacactgatagaaatccttgtgtccagtgcccggcaagcttcagaggggcacccgcctgtgggccgggtcactgggaggaagggcttaacctctaaggagcgcaagacccaagccgatgacagggtgaagttgactgagcacctcatccccctgctgccccagctcctggccaagttctcagctgatgcagagaaggtcactcccctgctccagcttctcagctgctttgacctccacatctactgcactgggcgcttggagaagcacctggagctgttcctgcagcaactccaggaggtggtggtgaagcatgcagagccagcggtgcttgaggctggggcgcatgccctctacctgctctgtaatcccgaattcactttcttcagccgggcggactttgcccgcagccagctagtagatttgctgactgaccgcttccagcaggagcttgaagagctgttacaggtaggagctggggctggacaatgggacaccccaaacaagggtgggaggggctgcaagacgggggatgtggactgatgagttctgggggaaatgctattgtggatcttctttccttctcagtcgtccttcctagatgaggatgaggtatataatctggcagccactctgaaacgcctctctgccttctacaagtgagtggctttcctcctcttccccatcccgtttttactggtgtctgtggagttggttccctctgttcttttccagtataacattcccctttctcccccaaagcactcatgacctgactcgctgggagctctatgagccatgttgccaactcctgcagaaggctgtggacacaggagaggttcctcaccaggtgagtggacaggctagagatgggttgggggctggggggctagattttaaggacctacgttctaggtggccactaggtgtgtcaagtctcagtgcgtggagtggacaaagcgaggaagatcaggtgggtgggggtcacctcttacattcctctcttagaaggtggactctacttccagggtcttcttggatttcctggaagccaaggataatattgagggattctagaagacgtagagtaaattagggagcggtgacatttctacttcgtgtagatgcctctgaagaatgtccagaatatcactcattttccactggaaaaggaattagctctccctttactcattttctctcctcttcactggtgtgtttctggctatctgtctctccctctcctaacccaaacctcatttttcaaaccctttgttgttacaggttatcctgccagccttgactcttgtctatttttccattctctggacactaacccacatttctaaatcagatgcttcccaggtgagtgtgggtcttagatgggataatgggaacagaggagtctgtgtcttcattcttccccttcaagccactgtgcccacagaagcagctgtcgagtttgagggacagaatggtggccttctgtgaactctgccagagttgcctctcagatgtggatactgagatccaggagcaggcttttgtcttattaagtgatctacttctcatctttagccctcagatgattgttgggggccgtgatttccttaggccacttgtcttttttcctgaagctactctccagtctgagctagccagcttcctcatggaccacgtcttcatccagccgggagacctgggcagtggtgattcccaggaggatcatttacagatagagcggctacaccagcggcgccgcctcctagccgggttctgcaagctgttgctttatggggtgctggagatggatgcagcctcagatgttttcaaacactacaacaaggtaacaagttctacaatgactatggtgacattatcaaggaaacattaactagagcaaggcagattgaccgaagtcattgttcccgaatcctgctgctgagcctcaagcagctgtacacagaactgctgcaggagcatgggccccagggcctgaatgagcttcctgccttcatcgagatgagggacctggcccggaggtttgccttgagttttggaccccagcagtctgagcttcctccagctggctcctccaatcagcctccaaatctggcattcctggagctcctttcagagttttccccccgactcttccatcaggacaagcagcttttgctgtcctatctagaaaagtgcctgcagcatgtctcccaggcacctggccatccctggggcccagtcaccacctactgccactccctcagccctgtggagaacacagcagagaccagccctcaggtcctccccagctccaagaggaggcgcgttgaagggcctgccaagcctaacagagaggacgtctcctcgtcccaggaagaaagtctgcagctgaacagcatcccgcccacgcccaccctcacctccacagctgtgaagagcaggcagcccctgtgggggttgaaagagatggaggaagaagatggctcagagttggattttgcccagggtcagcccgtcgcaggcaccgagaggtcaaggttcttgggtccacaatatttccagactccacacaacccttcaggtcctggcctgggcaaccagctgatgcgactcagccttatggaagaggacgaggaagaagagttagaaatccaggatgagtcaaatgaagaacggcaggatacagacatgcaagcaagtagctactcttccaccagtgagcgcgggctggacctcttagattctacagagctggatattgaggatttctgacaggactctgggcccctccccagctccactccctacctcaagaatgtgaccatttggaaaaggcaaagagaaaaggagcaaaatgaagcattcccccaggcttcagccctgggctctgaggggaaagagttgggcattgtttttctaacctaacctttccctctggggtagagaagccgagagaccctgtcctccctaatgcactgtggcccagtccccttgcctttttcctgttctgtttggagtggagaagggcagcacctctgtgtttaatggaaatagcccatagtctcctggatttttggaacatctttctcagcctattttgtgtcctaatgattcgctcaataaacatgtttgaatccaaaaaaaaaacacaaaacaaaaaaacaaaaaaaaaagaagaccacaaccacaacaaaaccgcgggcacccccagcacggcgcgccgcgaacaaaaggcggagaccacacaccgcgccacggggcagacagagcgcacagacagcccaagcgccgcagcgccacaacacggcaccaacgcgccagagaccaaagacagcgcggcgagcaacgcgcaaacgacagggaagcccacagaac

SEQ ID NO: 381930 - DNA, 4789 bp, Homo sapiens
cccatccttttcatacatccttttgtaggactcgggggactaccctctcatagctccaggtccatcctggaagaagttccagggcagcttctgtgaatttgtgaggacattggtctgtcagtgccagtacagcctcctctatgatggcttccctatggacgacctcatctccctgctcactggcctctcagactcacaagtccgcgccttccgtcacactagcaccctggctgctatgaaactgatgacctccctggtaaaagttgccctccaactgagtgtgcaccaagataacaatcagcgtcagtatgaggctgaaagaaacaaggggccagggcagagggcacctgagcggctggagagcctgttggagaaacgcaaagagctccaagagcatcaagaggagattgaggggatgatgaatgccctcttcaggggtgtctttgttcatcggtacagggatgtccttcctgagatccgtgctatctgcattgaggaaattgggtgttggatgcaaagctacagcacgtctttcctcaccgacagctatttaaaatatattggttggactctgcatgataagcaccgagaagtccgcctgaagtgtgtgaaggccctgaaagggctgtacggtaaccgggacctgaccacacgcctggagctcttcaccagccgcttcaaggaccggatggtttccatggtcatggacagagagtatgatgtggcagtggaggctgtcagattactgatacttatccttaagaacatggaagggttgctgacggacgcggattgtgagagcgtctaccccgttgtgtatccttctaatcgaggcctggcttctgccgcaggcgaatttctgtactggaaacttttctaccctgagtgcgagataagaacgatgggtggaagagagcaacgccagagcccaggcgcccagaggactttcttccagcttctgctgtccttctttgtggagagcgagctccatgaccacgctgcttacttagtagacagtctgtgggactgtgcaggggctcggctgaaggactgggagggtctgacaagcctgctgctggagaaggaccagaacctgggtgatgtgcaggagagcacactgatagaaatccttgtgtccagtgcccggcaagcttcagaggggcacccgcctgtgggccgggtcactgggaggaagggcttaacctctaaggagcgcaagacccaagccgatgacagggtgaagttgactgagcacctcatccccctgctgccccagctcctggccaagttctcagctgatgcagagaaggtcactcccctgctccagcttctcagctgctttgacctccacatctactgcactgggcgcttggagaagcacctggagctgttcctgcagcaactccaggaggtggtggtgaagcatgcagagccagcggtgcttgaggctggggcgcatgccctctacctgctctgtaatcccgaattcactttcttcagccgggcggactttgcccgcagccagctagtagatttgctgactgaccgcttccagcaggagcttgaagagctgttacaggtaggagctggggctggacaatgggacaccccaaacaagggtgggaggggctgcaagacgggggatgtggactgatgagttctgggggaaatgctattgtggatcttctttccttctcagtcgtccttcctagatgaggatgaggtatataatctggcagccactctgaaacgcctctctgccttctacaagtgagtggctttcctcctcttccccatcccgtttttactggtgtctgtggagttggttccctctgttcttttccagtataacattcccctttctcccccaaagcactcatgacctgactcgctgggagctctatgagccatgttgccaactcctgcagaaggctgtggacacaggagaggttcctcaccaggtgagtggacaggctagagatgggttgggggctggggggctagattttaaggacctacgttctaggtggccactaggtgtgtcaagtctcagtgcgtggagtggacaaagcgaggaagatcaggtgggtgggggtcacctcttacattcctctcttagaaggtggactctacttccagggtcttcttggatttcctggaagccaaggataatattgagggattctagaagacgtagagtaaattagggagcggtgacatttctacttcgtgtagatgcctctgaagaatgtccagaatatcactcattttccactggaaaaggaattagctctccctttactcattttctctcctcttcactggtgtgtttctggctatctgtctctccctctcctaacccaaacctcatttttcaaaccctttgttgttacaggttatcctgccagccttgactcttgtctatttttccattctctggacactaacccacatttctaaatcagatgcttcccaggtgagtgtgggtcttagatgggataatgggaacagaggagtctgtgtcttcattcttccccttcaagccactgtgcccacagaagcagctgtcgagtttgagggacagaatggtggccttctgtgaactctgccagagttgcctctcagatgtggatactgagatccaggagcaggtgagtactgactcaagtgggagcaacaaggcgagtatccctgcccccattccaaggagaaattgacagtgtcatttctaccttgggaaacattctgtccttttaaacatcctttcttttccccctacaggcttttgtcttattaagtgatctacttctcatctttagccctcagatgattgttgggggccgtgatttccttaggccacttgtcttttttcctgaagctactctccagtctgagctagccagcttcctcatggaccacgtcttcatccagccgggagacctgggcagtggtgcagtgactctatacctggggctcagtaagggctggggcttgggtgtagctcagaaatatagggcaggaagcttaagtctgtgattcccttttgccttccatgtgagccaggtgattcccaggaggatcatttacagatagagcggctacaccagcggcgccgcctcctagccgggttctgcaagctgttgctttatggggtgctggagatggatgcagcctcagatgttttcaaacactacaacaaggtaacaagttctacaatgactatggtgacattatcaaggaaacattaactagagcaaggcagattgaccgaagtcattgttcccgaatcctgctgctgagcctcaagcagctgtacacagaactgctgcaggagcatgggccccagggcctgaatgagcttcctgccttcatcgagatgagggacctggcccggaggtttgccttgagttttggaccccagcagctgcagaaccgtgacctcgtggtcatgctacacaaggaaggcatccagttctccttgtctgagcttcctccagctggctcctccaatcagcctccaaatctggcattcctggagctcctttcagagttttccccccgactcttccatcaggacaagcagcttttgctgtcctatctagaaaagtgcctgcagcatgtctcccaggcacctggccatccctggggcccagtcaccacctactgccactccctcagccctgtggagaacacagcagagaccagccctcaggtcctccccagctccaagaggaggcgcgttgaagggcctgccaagcctaacagagaggacgtctcctcgtcccaggaagaaagtctgcagctgaacagcatcccgcccacgcccaccctcacctccacagctgtgaagagcaggcagcccctgtgggggttgaaagagatggaggaagaagatggctcagagttggattttgcccagggtcagcccgtcgcaggcaccgagaggtcaaggttcttgggtccacaatatttccagactccacacaacccttcaggtcctggcctgggcaaccagctgatgcgactcagccttatggaagaggacgaggaagaagagttagaaatccaggatgagtcaaatgaagaacggcaggatacagacatgcaagcaagtagctactcttccaccagtgagcgcgggctggacctcttagattctacagagctggatattgaggatttctgacaggactctgggcccctccccagctccactccctacctcaagaatgtgaccatttggaaaaggcaaagagaaaaggagcaaaatgaagcattcccccaggcttcagccctgggctctgaggggaaagagttgggcattgtttttctaacctaacctttccctctggggtagagaagccgagagaccctgtcctccctaatgcactgtggcccagtccccttgcctttttcctgttctgtttggagtggagaagggcagcacctctgtgtttaatggaaatagcccatagtctcctggatttttggaacatctttctcagcctattttgtgtcctaatgattcgctcaataaacatgtttgaatccaaaaaaaaaacacaaaacaaaaaaacaaaaaaaaaagaagaccacaaccacaacaaaaccgcgggcacccccagcacggcgcgccgcgaacaaaaggcggagaccacacaccgcgccacggggcagacagagcgcacagacagcccaagcgccgcagcgccacaacacggcaccaacgcgccagagaccaaagacagcgcggcgagcaacgcgcaaacgacagggaagcccacagaac

SEQ ID NO: 381931 - DNA, 4115 bp, Homo sapiens
ccgggccgcccgcgtgcccaagcccacgtgagagggcaggacgcctgagagcttgaggccacacgaggctgtggagcggcgtgactcaaacgtggcgcgcatcagctcgcacacttccaaacctcgcgatagctactggccctgggcgagccgttgggattgcgcttgcgcacagcgtgtcttgtacgttcccgcgcttttctggaatctttcgcccccggaagggcagcggcgggcgcctgtgtggaaggtggggtggccagagacacccgagggacctgagctggatcgccatacctaccctgtggtcctcatcttcctggcctcatagctcctcctctccaagcatgtcttccccgttgcaaagagctgtgggagataccaagagggccttgtctgcatcttctagttcctctgccagtctaccctttgatgacagggactcaaaccatacctcagaggggaatggcgactctttgttagctgatgaagacactgactttgaagacagcttgaatcgcaatgtgaagaagagagcagcaaaacgaccaccgaaaacaacaccggtggcaaaacatccaaagaaagggtcccgagtggtacatcgtcatagccggaaacagtcagagccaccagccaatgatcttttcaatgctgtgaaagccgccaaaagtgacatgcagtctttggtagatgagtggctggatagctacaagcaagaccaggatgcaggatttctggagcttgttaactttttcatccaatcttgcggatgtaaaggcattgtgacccctgagatgttcaagaagatgtccaactcagagatcatccagcacctaacagagcagtttaatgaggactcgggggactaccctctcatagctccaggtccatcctggaagaagttccagggcagcttctgtgaatttgtgaggacattggtctgtcagtgccagtacagcctcctctatgatggcttccctatggacgacctcatctccctgctcactggcctctcagactcacaagtccgcgccttccgtcacactagcaccctggctgctatgaaactgatgacctccctggtaaaagttgccctccaactgagtgtgcaccaagataacaatcagcgtcagtatgaggctgaaagaaacaaggggccagggcagagggcacctgagcggctggagagcctgttggagaaacgcaaagagctccaagagcatcaagaggagattgaggggatgatgaatgccctcttcaggggtgtctttgttcatcggtacagggatgtccttcctgagatccgtgctatctgcattgaggaaattgggtgttggatgcaaagctacagcacgtctttcctcaccgacagctatttaaaatatattggttggactctgcatgataagcaccgagaagtccgcctgaagtgtgtgaaggccctgaaagggctgtacggtaaccgggacctgaccacacgcctggagctcttcaccagccgcttcaaggaccggatggtttccatggtcatggacagagagtatgatgtggcagtggaggctgtcagattactgatacttatccttaagaacatggaagggttgctgacggacgcggattgtgagagcgtctaccccgttgtgtatccttctaatcgaggcctggcttctgccgcaggcgaatttctgtactggaaacttttctaccctgagtgcgagataagaacgatgggtggaagagagcaacgccagagcccaggcgcccagaggactttcttccagcttctgctgtccttctttgtggagagcgagctccatgaccacgctgcttacttagtagacagtctgtgggactgtgcaggggctcggctgaaggactgggagggtctgacaagcctgctgctggagaaggaccagaacctgggtgatgtgcaggagagcacactgatagaaatccttgtgtccagtgcccggcaagcttcagaggggcacccgcctgtgggccgggtcactgggaggaagggcttaacctctaaggagcgcaagacccaagccgatgacagggtgaagttgactgagcacctcatccccctgctgccccagctcctggccaagttctcagctgatgcagagaaggtcactcccctgctccagcttctcagctgctttgacctccacatctactgcactgggcgcttggagaagcacctggagctgttcctgcagcaactccaggaggtggtggtgaagcatgcagagccagcggtgcttgaggctggggcgcatgccctctacctgctctgtaatcccgaattcactttcttcagccgggcggactttgcccgcagccagctagtagatttgctgactgaccgcttccagcaggagcttgaagagctgttacaggtaggagctggggctggacaatgggacaccccaaacaagggtgggaggggctgcaagacgggggatgtggactgatgagttctgggggaaatgctattgtggatcttctttccttctcagtcgtccttcctagatgaggatgaggtatataatctggcagccactctgaaacgcctctctgccttctacaagtgagtggctttcctcctcttccccatcccgtttttactggtgtctgtggagttggttccctctgttcttttccagtataacattcccctttctcccccaaagcactcatgacctgactcgctgggagctctatgagccatgttgccaactcctgcagaaggctgtggacacaggagaggttcctcaccaggtgagtggacaggctagagatgggttgggggctggggggctagattttaaggacctacgttctaggtggccactaggtgtgtcaagtctcagtgcgtggagtggacaaagcgaggaagatcaggtgggtgggggtcacctcttacattcctctcttagaaggtggactctacttccagggtcttcttggatttcctggaagccaaggataatattgagggattctagaagacgtagagtaaattagggagcggtgacatttctacttcgtgtagatgcctctgaagaatgtccagaatatcactcattttccactggaaaaggaattagctctccctttactcattttctctcctcttcactggtgtgtttctggctatctgtctctccctctcctaacccaaacctcatttttcaaaccctttgttgttacaggttatcctgccagccttgactcttgtctatttttccattctctggacactaacccacatttctaaatcagatgcttcccaggtgagtgtgggtcttagatgggataatgggaacagaggagtctgtgtcttcattcttccccttcaagccactgtgcccacagaagcagctgtcgagtttgagggacagaatggtggccttctgtgaactctgccagagttgcctctcagatgtggatactgagatccaggagcaggtgagtactgactcaagtgggagcaacaaggcgagtatccctgcccccattccaaggagaaattgacagtgtcatttctaccttgggaaacattctgtccttttaaacatcctttcttttccccctacaggcttttgtcttattaagtgatctacttctcatctttagccctcagatgattgttgggggccgtgatttccttaggccacttgtcttttttcctgaagctactctccagtctgagctagccagcttcctcatggaccacgtcttcatccagccgggagacctgggcagtggtgcagtgactctatacctggggctcagtaagggctggggcttgggtgtagctcagaaatatagggcaggaagcttaagtctgtgattcccttttgccttccatgtgagccaggtgattcccaggaggatcatttacagatagagcggctacaccagcggcgccgcctcctagccgggttctgcaagctgttgctttatggggtgctggagatggatgcagcctcagatgttttcaaacactacaacaaggtaacaagttgctcccttctcttttatttctgtagggccttggtgtaccttgttgtagtgtttgaaaacatctgagatggatgcag

SEQ ID NO: 381932 - DNA, 1103 bp, Homo sapiens
aacgataggctagtcgaggcgggtgttaatcggcaccgaggaagaggaggcgcgttgaagggcctgccaagcctaacagagaggacgtctcctcgtcccaggaagaaagtctgcagctgaacagcatcccgcccacgcccaccctcacctccacagctgtgaagagcaggcagcccctgtgggggttgaaagagatggaggaagaagatggctcagagttggattttgcccagggtcagcccgtcgcaggcaccgagaggtcaaggttcttgggtccacaatatttccagactccacacaacccttcaggtcctggcctgggcaaccagctgatgcgactcagccttatggaagaggacgaggaagaagagttagaaatccaggatgagtcaaatgaagaacggcaggatacagacatgcaagcaagtagctactcttccaccagtgagcgcgggctggacctcttagattctacagagctggatattgaggatttctgacaggactctgggcccctccccagctccactccctacctcaagaatgtgaccatttggaaaaggcaaagagaaaaggagcaaaatgaagcattcccccaggcttcagccctgggctctgaggggaaagagttgggcattgtttttctaacctaacctttccctctggggtagagaagccgagagaccctgtcctccctaatgcactgtggcccagtccccttgcctttttcctgttctgtttggagtggagaagggcagcacctctgtgtttaatggaaatagcccatagtctcctggatttttggaacatctttctcagcctattttgtgtcctaatgattcgctcaataaacatgtttgaatccaaaaaaaaaacacaaaacaaaaaaacaaaaaaaaaagaagaccacaaccacaacaaaaccgcgggcacccccagcacggcgcgccgcgaacaaaaggcggagaccacacaccgcgccacggggcagacagagcgcacagacagcccaagcgccgcagcgccacaacacggcaccaacgcgccagagaccaaagacagcgcggcgagcaacgcgcaaacgacagggaagcccacagaac

SEQ ID NO: 381933 - DNA, 651 bp, Homo sapiens
ccacgcctggctaatttttgtatttttagtagagacagggatttctgacaggactctgggcccctccccagctccactccctacctcaagaatgtgaccatttggaaaaggcaaagagaaaaggagcaaaatgaagcattcccccaggcttcagccctgggctctgaggggaaagagttgggcattgtttttctaacctaacctttccctctggggtagagaagccgagagaccctgtcctccctaatgcactgtggcccagtccccttgcctttttcctgttctgtttggagtggagaagggcagcacctctgtgtttaatggaaatagcccatagtctcctggatttttggaacatctttctcagcctattttgtgtcctaatgattcgctcaataaacatgtttgaatccaaaaaaaaaacacaaaacaaaaaaacaaaaaaaaaagaagaccacaaccacaacaaaaccgcgggcacccccagcacggcgcgccgcgaacaaaaggcggagaccacacaccgcgccacggggcagacagagcgcacagacagcccaagcgccgcagcgccacaacacggcaccaacgcgccagagaccaaagacagcgcggcgagcaacgcgcaaacgacagggaagcccacagaac

SEQ ID NO: 381934 - DNA, 196 bp, Homo sapiens
ggggcgagtagagtgtggttagtcttatttccattctcctggttttccctcctcaccagcaccgagaagtccgcctgaagtgtgtgaaggccctgaaagggctgtacggtaaccgggacctgaccacacgcctggagctcttcaccagccgcttcaaggtaaaatgggtggtgctccatggcttggctctttgtcg

SEQ ID NO: 381935 - DNA, 4536 bp, Homo sapiens
ccgggccgcccgcgtgcccaagcccacgtgagagggcaggacgcctgagagcttgaggccacacgaggctgtggagcggcgtgactcaaacgtggcgcgcatcagctcgcacacttccaaacctcgcgatagctactggccctgggcgagccgttgggattgcgcttgcgcacagcgtgtcttctggatcgccatacctaccctgtggtcctcatcttcctggcctcatagctcctcctctccaagcatgtcttccccgttgcaaagagctgtgggagataccaagagggccttgtctgcatcttctagttcctctgccagtctaccctttgatgacagggactcaaaccatacctcagaggggaatggcgactctttgttagctgatgaagacactgactttgaagacagcttgaatcgcaatgtgaagaagagagcagcaaaacgaccaccgaaaacaacaccggtggcaaaacatccaaagaaagggtcccgagtggtacatcgtcatagccggaaacagtcagagccaccagccaatgatcttttcaatgctgtgaaagccgccaaaagtgacatgcagtctttggtagatgagtggctggatagctacaagcaagaccaggatgcaggatttctggagcttgttaactttttcatccaatcttgcggatgtaaaggcattgtgacccctgagatgttcaagaagatgtccaactcagagatcatccagcacctaacagagcagtttaatgaggactcgggggactaccctctcatagctccaggtccatcctggaagaagttccagggcagcttctgtgaatttgtgaggacattggtctgtcagtgccagtacagcctcctctatgatggcttccctatggacgacctcatctccctgctcactggcctctcagactcacaagtccgcgccttccgtcacactagcaccctggctgctatgaaactgatgacctccctggtaaaagttgccctccaactgagtgtgcaccaagataacaatcagcgtcagtatgaggctgaaagaaacaaggggccagggcagagggcacctgagcggctggagagcctgttggagaaacgcaaagagctccaagagcatcaagaggagattgaggggatgatgaatgccctcttcaggggtgtctttgttcatcggtacagggatgtccttcctgagatccgtgctatctgcattgaggaaattgggtgttggatgcaaagctacagcacgtctttcctcaccgacagctatttaaaatatattggttggactctgcatgataagcaccgagaagtccgcctgaagtgtgtgaaggccctgaaagggctgtacggtaaccgggacctgaccacacgcctggagctcttcaccagccgcttcaaggaccggatggtttccatggtcatggacagagagtatgatgtggcagtggaggctgtcagattactgatacttatccttaagaacatggaagggttgctgacggacgcggattgtgagagcgtctaccccgttgtgtatccttctaatcgaggcctggcttctgccgcaggcgaatttctgtactggaaacttttctaccctgagtgcgagataagaacgatgggtggaagagagcaacgccagagcccaggcgcccagaggactttcttccagcttctgctgtccttctttgtggagagcgagctccatgaccacgctgcttacttagtagacagtctgtgggactgtgcaggggctcggctgaaggactgggagggtctgacaagcctgctgctggagaaggaccagaacctgggtgatgtgcaggagagcacactgatagaaatccttgtgtccagtgcccggcaagcttcagaggggcacccgcctgtgggccgggtcactgggaggaagggcttaacctctaaggagcgcaagacccaagccgatgacagggtgaagttgactgagcacctcatccccctgctgccccagctcctggccaagttctcagctgatgcagagaaggtcactcccctgctccagcttctcagctgctttgacctccacatctactgcactgggcgcttggagaagcacctggagctgttcctgcagcaactccaggaggtggtggtgaagcatgcagagccagcggtgcttgaggctggggcgcatgccctctacctgctctgtaatcccgaattcactttcttcagccgggcggactttgcccgcagccagctagtagatttgctgactgaccgcttccagcaggagcttgaagagctgttacagtcgtccttcctagatgaggatgaggtatataatctggcagccactctgaaacgcctctctgccttctacaacactcatgacctgactcgctgggagctctatgagccatgttgccaactcctgcagaaggctgtggacacaggagaggttcctcaccaggttatcctgccagccttgactcttgtctatttttccattctctggacactaacccacatttctaaatcagatgcttcccagaagcagctgtcgagtttgagggacagaatggtggccttctgtgaactctgccagagttgcctctcagatgtggatactgagatccaggagcaggcttttgtcttattaagtgatctacttctcatctttagccctcagatgattgttgggggccgtgatttccttaggccacttgtcttttttcctgaagctactctccagtctgagctagccagcttcctcatggaccacgtcttcatccagccgggagacctgggcagtggtgattcccaggaggatcatttacagatagagcggctacaccagcggcgccgcctcctagccgggttctgcaagctgttgctttatggggtgctggagatggatgcagcctcagatgttttcaaacactacaacaaggtaacaagttctacaatgactatggtgacattatcaaggaaacattaactagagcaaggcagattgaccgaagtcattgttcccgaatcctgctgctgagcctcaagcagctgtacacagaactgctgcaggagcatgggccccagggcctgaatgagcttcctgccttcatcgagatgagggacctggcccggaggtttgccttgagttttggaccccagcagctgcagaaccgtgacctcgtggtcatgctacacaaggaaggcatccagttctccttgtctgagcttcctccagctggctcctccaatcagcctccaaatctggcattcctggagctcctttcagagttttccccccgactcttccatcaggacaagcagcttttgctgtcctatctagaaaagtgcctgcagcatgtctcccaggcacctggccatccctggggcccagtcaccacctactgccactccctcagccctgtggagaacacagcagagaccagccctcaggtcctccccagctccaagaggaggcgcgttgaagggcctgccaagcctaacagagaggacgtctcctcgtcccaggaagaaagtctgcagctgaacagcatcccgcccacgcccaccctcacctccacagctgtgaagagcaggcagcccctgtgggggttgaaagagatggaggaagaagatggctcagagttggattttgcccagggtcagcccgtcgcaggcaccgagaggtcaaggttcttgggtccacaatatttccagactccacacaacccttcaggtcctggcctgggcaaccagctgatgcgactcagccttatggaagaggacgaggaagaagagttagaaatccaggatgagtcaaatgaagaacggcaggatacagacatgcaagcaagtagctactcttccaccagtgagcgcgggctggacctcttagattctacagagctggatattgaggatttctgacaggactctgggcccctccccagctccactccctacctcaagaatgtgaccatttggaaaaggcaaagagaaaaggagcaaaatgaagcattcccccaggcttcagccctgggctctgaggggaaagagttgggcattgtttttctaacctaacctttccctctggggtagagaagccgagagaccctgtcctccctaatgcactgtggcccagtccccttgcctttttcctgttctgtttggagtggagaagggcagcacctctgtgtttaatggaaatagcccatagtctcctggatttttggaacatctttctcagcctattttgtgtcctaatgattcgctcaataaacatgtttgaatccaaaaaaaaaacacaaaacaaaaaaacaaaaaaaaaagaagaccacaaccacaacaaaaccgcgggcacccccagcacggcgcgccgcgaacaaaaggcggagaccacacaccgcgccacggggcagacagagcgcacagacagcccaagcgccgcagcgccacaacacggcaccaacgcgccagagaccaaagacagcgcggcgagcaacgcgcaaacgacagggaagcccacagaac

SEQ ID NO: 381936 - DNA, 6125 bp, Homo sapiens
ccgggccgcccgcgtgcccaagcccacgtgagagggcaggacgcctgagagcttgaggccacacgaggctgtggagcggcgtgactcaaacgtggcgcgcatcagctcgcacacttccaaacctcgcgatagctactggccctgggcgagccgttgggattgcgcttgcgcacagcgtgtcttgtacgttcccgcgcttttctggaatctttcgcccccggaagggcagcggcgggcgcctgtgtggaaggtggggtggccagagacacccgagggacctgagctggatcgccatacctaccctgtggtcctcatcttcctggcctcatagctcctcctctccaagcatgtcttccccgttgcaaagagctgtgggagataccaagagggccttgtctgcatcttctagttcctctgccagtctaccctttgatgacagggactcaaaccatacctcagaggggaatggcgactctttgttagctgatgaagacactgactttgaagacagcttgaatcgcaatgtgaagaagagagcagcaaaacgaccaccgaaaacaacaccggtggcaaaacatccaaagaaagggtcccgagtggtacatcgtcatagccggaaacagtcagagccaccagccaatgatcttttcaatgctgtgaaagccgccaaaagtgacatgcagtctttggtagatgagtggctggatagctacaagcaagaccaggatgcaggatttctggagcttgttaactttttcatccaatcttgcggatgtaaaggcattgtgacccctgagatgttcaagaagatgtccaactcagagatcatccagcacctaacagagcagtttaatgaggactcgggggactaccctctcatagctccaggtccatcctggaagaagttccagggcagcttctgtgaatttgtgaggacattggtctgtcagtgccagtacagcctcctctatgatggcttccctatggacgacctcatctccctgctcactggcctctcagactcacaagtccgcgccttccgtcacactagcaccctggctgctatgaaactgatgacctccctggtaaaagttgccctccaactgagtgtgcaccaagataacaatcagcgtcagtatgaggctgaaagaaacaaggggccagggcagagggcacctgagcggctggagagcctgttggagaaacgcaaagagctccaagagcatcaagaggagattgaggggatgatgaatgccctcttcaggggtgtctttgttcatcggtacagggatgtccttcctgagatccgtgctatctgcattgaggaaattgggtgttggatgcaaagctacagcacgtctttcctcaccgacagctatttaaaatatattggttggactctgcatgataagcaccgagaagtccgcctgaagtgtgtgaaggccctgaaagggctgtacggtaaccgggacctgaccacacgcctggagctcttcaccagccgcttcaaggaccggatggtttccatggtcatggacagagagtatgatgtggcagtggaggctgtcagattactgatacttatccttaagaacatggaagggttgctgacggacgcggattgtgagagcgtctaccccgttgtgtatccttctaatcgaggcctggcttctgccgcaggcgaatttctgtactggaaacttttctaccctgagtgcgagataagaacgatgggtggaagagagcaacgccagagcccaggcgcccagaggactttcttccagcttctgctgtccttctttgtggagagcgagctccatgaccacgctgcttacttagtagacagtctgtgggactgtgcaggggctcggctgaaggactgggagggtctgacaagcctgctgctggagaaggaccagaacctgggtgatgtgcaggagagcacactgatagaaatccttgtgtccagtgcccggcaagcttcagaggggcacccgcctgtgggccgggtcactgggaggaagggcttaacctctaaggagcgcaagacccaagccgatgacagggtgaagttgactgagcacctcatccccctgctgccccagctcctggccaagttctcagctgatgcagagaaggtcactcccctgctccagcttctcagctgctttgacctccacatctactgcactgggcgcttggagaagcacctggagctgttcctgcagcaactccaggaggtggtggtgaagcatgcagagccagcggtgcttgaggctggggcgcatgccctctacctgctctgtaatcccgaattcactttcttcagccgggcggactttgcccgcagccagctagtagatttgctgactgaccgcttccagcaggagcttgaagagctgttacaggtaggagctggggctggacaatgggacaccccaaacaagggtgggaggggctgcaagacgggggatgtggactgatgagttctgggggaaatgctattgtggatcttctttccttctcagtcgtccttcctagatgaggatgaggtatataatctggcagccactctgaaacgcctctctgccttctacaagtgagtggctttcctcctcttccccatcccgtttttactggtgtctgtggagttggttccctctgttcttttccagtataacattcccctttctcccccaaagcactcatgacctgactcgctgggagctctatgagccatgttgccaactcctgcagaaggctgtggacacaggagaggttcctcaccaggtgagtggacaggctagagatgggttgggggctggggggctagattttaaggacctacgttctaggtggccactaggtgtgtcaagtctcagtgcgtggagtggacaaagcgaggaagatcaggtgggtgggggtcacctcttacattcctctcttagaaggtggactctacttccagggtcttcttggatttcctggaagccaaggataatattgagggattctagaagacgtagagtaaattagggagcggtgacatttctacttcgtgtagatgcctctgaagaatgtccagaatatcactcattttccactggaaaaggaattagctctccctttactcattttctctcctcttcactggtgtgtttctggctatctgtctctccctctcctaacccaaacctcatttttcaaaccctttgttgttacaggttatcctgccagccttgactcttgtctatttttccattctctggacactaacccacatttctaaatcagatgcttcccaggtgagtgtgggtcttagatgggataatgggaacagaggagtctgtgtcttcattcttccccttcaagccactgtgcccacagaagcagctgtcgagtttgagggacagaatggtggccttctgtgaactctgccagagttgcctctcagatgtggatactgagatccaggagcaggtgagtactgactcaagtgggagcaacaaggcgagtatccctgcccccattccaaggagaaattgacagtgtcatttctaccttgggaaacattctgtccttttaaacatcctttcttttccccctacaggcttttgtcttattaagtgatctacttctcatctttagccctcagatgattgttgggggccgtgatttccttaggccacttgtcttttttcctgaagctactctccagtctgagctagccagcttcctcatggaccacgtcttcatccagccgggagacctgggcagtggtgcagtgactctatacctggggctcagtaagggctggggcttgggtgtagctcagaaatatagggcaggaagcttaagtctgtgattcccttttgccttccatgtgagccaggtgattcccaggaggatcatttacagatagagcggctacaccagcggcgccgcctcctagccgggttctgcaagctgttgctttatggggtgctggagatggatgcagcctcagatgttttcaaacactacaacaaggtaacaagttctacaatgactatggtgacattatcaaggaaacattaactagagcaaggcagattgaccgaagtcattgttcccgaatcctgctgctgagcctcaagcagctgtacacagaactgctgcaggagcatgggccccagggcctgaatgagcttcctgccttcatcgagatgagggacctggcccggaggtttgccttgagttttggaccccagcagctgcagaaccgtgacctcgtggtcatgctacacaaggaaggcatccagttctccttgtctgagcttcctccagctggctcctccaatcagcctccaaatctggcattcctggagctcctttcagagttttccccccgactcttccatcaggacaagcagcttttgctgtcctatctagaaaagtgcctgcagcatgtctcccaggcacctggccatccctggggcccagtcaccacctactgccactccctcagccctgtggagaacacagcagagaccagccctcaggtcctccccagctccaagaggaggcgcgttgaagggcctgccaagcctaacagagaggacgtctcctcgtcccaggaagaaagtctgcagctgaacagcatcccgcccacgcccaccctcacctccacagctgtgaagagcaggcagcccctgtgggggttgaaagagatggaggaagaagatggctcagagttggattttgcccaggggtgaggccatggagggaatctgggtgtctgagttcccagtttggtgtctggctgcctccatcttgctgtttctgtttcatggttccctgctgtagcactcccacattgttgggttcttctcaaacccttctccattgtttagctttaaaatgcatctctctgagcttttctccccattaacaccagctgccttacatcctcttcttacccttgatttttatcccatcattgatcctgcttcattcccagcagtcagcccgtcgcaggcaccgagaggtcaaggttcttgggtccacaatatttccagactccacacaacccttcaggtcctggcctgggcaaccagctgatgcggtgagcttttctcatcatctcctgtcttcacttcagatctgtcgcccactgtgaggggattcctgtctcacccattgcctctctgtgggtgctttttggacttgttttagccacagagcacttcctgtcagcacaatcgggaaactactatgctgtacttactgctccccacttcccccaccccgggtgtctgagaaactctcaggggtcctcaaagaacagtttgaaaagccagtctctttgcccctacatcagactcagccttatggaagaggacgaggaagaagagttagaaatccaggatgagtcaaatgaagaacggcaggatacagacatgcaagcaagtagctactcttccaccagtgagcgcgggctggacctcttagattctacagagctggatattgaggatttctgacaggactctgggcccctccccagctccactccctacctcaagaatgtgaccatttggaaaaggcaaagagaaaaggagcaaaatgaagcattcccccaggcttcagccctgggctctgaggggaaagagttgggcattgtttttctaacctaacctttccctctggggtagagaagccgagagaccctgtcctccctaatgcactgtggcccagtccccttgcctttttcctgttctgtttggagtggagaagggcagcacctctgtgtttaatggaaatagcccatagtctcctggatttttggaacatctttctcagcctattttgtgtcctaatgattcgctcaataaacatgtttgaatccaaaaaaaaaacacaaaacaaaaaaacaaaaaaaaaagaagaccacaaccacaacaaaaccgcgggcacccccagcacggcgcgccgcgaacaaaaggcggagaccacacaccgcgccacggggcagacagagcgcacagacagcccaagcgccgcagcgccacaacacggcaccaacgcgccagagaccaaagacagcgcggcgagcaacgcgcaaacgacagggaagcccacagaac

SEQ ID NO: 381937 - DNA, 6323 bp, Homo sapiens
ccgggccgcccgcgtgcccaagcccacgtgagagggcaggacgcctgagagcttgaggccacacgaggctgtggagcggcgtgactcaaacgtggcgcgcatcagctcgcacacttccaaacctcgcgatagctactggccctgggcgagccgttgggattgcgcttgcgcacagcgtgtcttgtacgttcccgcgcttttctggaatctttcgcccccggaagggcagcggcgggcgcctgtgtggaaggtggggtggccagagacacccgagggacctgagctggatcgccatacctaccctgtggtcctcatcttcctggcctcatagctcctcctctccaagcatgtcttccccgttgcaaagagctgtgggagataccaagagggccttgtctgcatcttctagttcctctgccagtctaccctttgatgacagggactcaaaccatacctcagaggggaatggcgactctttgttagctgatgaagacactgactttgaagacagcttgaatcgcaatgtgaagaagagagcagcaaaacgaccaccgaaaacaacaccggtggcaaaacatccaaagaaagggtcccgagtggtacatcgtcatagccggaaacagtcagagccaccagccaatgatcttttcaatgctgtgaaagccgccaaaagtgacatgcagtctttggtagatgagtggctggatagctacaagcaagaccaggatgcaggatttctggagcttgttaactttttcatccaatcttgcggatgtaaaggcattgtgacccctgagatgttcaagaagatgtccaactcagagatcatccagcacctaacagagcagtttaatgaggactcgggggactaccctctcatagctccaggtccatcctggaagaagttccagggcagcttctgtgaatttgtgaggacattggtctgtcagtgccagtacagcctcctctatgatggcttccctatggacgacctcatctccctgctcactggcctctcagactcacaagtccgcgccttccgtcacactagcaccctggctgctatgaaactgatgacctccctggtaaaagttgccctccaactgagtgtgcaccaagataacaatcagcgtcagtatgaggctgaaagaaacaaggggccagggcagagggcacctgagcggctggagagcctgttggagaaacgcaaagagctccaagagcatcaagaggagattgaggggatgatgaatgccctcttcaggggtgtctttgttcatcggtacagggatgtccttcctgagatccgtgctatctgcattgaggaaattgggtgttggatgcaaagctacagcacgtctttcctcaccgacagctatttaaaatatattggttggactctgcatgataagcaccgagaagtccgcctgaagtgtgtgaaggccctgaaagggctgtacggtaaccgggacctgaccacacgcctggagctcttcaccagccgcttcaaggaccggatggtttccatggtcatggacagagagtatgatgtggcagtggaggctgtcagattactgatacttatccttaagaacatggaagggttgctgacggacgcggattgtgagagcgtctaccccgttgtgtatccttctaatcgaggcctggcttctgccgcaggcgaatttctgtactggaaacttttctaccctgagtgcgagataagaacgatgggtggaagagagcaacgccagagcccaggcgcccagaggactttcttccagcttctgctgtccttctttgtggagagcgagctccatgaccacgctgcttacttagtagacagtctgtgggactgtgcaggggctcggctgaaggactgggagggtctgacaagcctgctgctggagaaggaccagaacctgggtgatgtgcaggagagcacactgatagaaatccttgtgtccagtgcccggcaagcttcagaggggcacccgcctgtgggccgggtcactgggaggaagggcttaacctctaaggagcgcaagacccaagccgatgacagggtgaagttgactgagcacctcatccccctgctgccccagctcctggccaagttctcagctgatgcagagaaggtcactcccctgctccagcttctcagctgctttgacctccacatctactgcactgggcgcttggagaagcacctggagctgttcctgcagcaactccaggaggtggtggtgaagcatgcagagccagcggtgcttgaggctggggcgcatgccctctacctgctctgtaatcccgaattcactttcttcagccgggcggactttgcccgcagccagctagtagatttgctgactgaccgcttccagcaggagcttgaagagctgttacaggtaggagctggggctggacaatgggacaccccaaacaagggtgggaggggctgcaagacgggggatgtggactgatgagttctgggggaaatgctattgtggatcttctttccttctcagtcgtccttcctagatgaggatgaggtatataatctggcagccactctgaaacgcctctctgccttctacaagtgagtggctttcctcctcttccccatcccgtttttactggtgtctgtggagttggttccctctgttcttttccagtataacattcccctttctcccccaaagcactcatgacctgactcgctgggagctctatgagccatgttgccaactcctgcagaaggctgtggacacaggagaggttcctcaccaggtgagtggacaggctagagatgggttgggggctggggggctagattttaaggacctacgttctaggtggccactaggtgtgtcaagtctcagtgcgtggagtggacaaagcgaggaagatcaggtgggtgggggtcacctcttacattcctctcttagaaggtggactctacttccagggtcttcttggatttcctggaagccaaggataatattgagggattctagaagacgtagagtaaattagggagcggtgacatttctacttcgtgtagatgcctctgaagaatgtccagaatatcactcattttccactggaaaaggaattagctctccctttactcattttctctcctcttcactggtgtgtttctggctatctgtctctccctctcctaacccaaacctcatttttcaaaccctttgttgttacaggttatcctgccagccttgactcttgtctatttttccattctctggacactaacccacatttctaaatcagatgcttcccaggtgagtgtgggtcttagatgggataatgggaacagaggagtctgtgtcttcattcttccccttcaagccactgtgcccacagaagcagctgtcgagtttgagggacagaatggtggccttctgtgaactctgccagagttgcctctcagatgtggatactgagatccaggagcaggtgagtactgactcaagtgggagcaacaaggcgagtatccctgcccccattccaaggagaaattgacagtgtcatttctaccttgggaaacattctgtccttttaaacatcctttcttttccccctacaggcttttgtcttattaagtgatctacttctcatctttagccctcagatgattgttgggggccgtgatttccttaggccacttgtcttttttcctgaagctactctccagtctgagctagccagcttcctcatggaccacgtcttcatccagccgggagacctgggcagtggtgcagtgactctatacctggggctcagtaagggctggggcttgggtgtagctcagaaatatagggcaggaagcttaagtctgtgattcccttttgccttccatgtgagccaggtgattcccaggaggatcatttacagatagagcggctacaccagcggcgccgcctcctagccgggttctgcaagctgttgctttatggggtgctggagatggatgcagcctcagatgttttcaaacactacaacaaggtaacaagttctacaatgactatggtgacattatcaaggaaacattaactagagcaaggcagattgaccgaagtcattgttcccgaatcctgctgctgagcctcaagcagctgtacacagaactgctgcaggagcatgggccccagggcctgaatgagcttcctgccttcatcgagatgagggacctggcccggaggtttgccttgagttttggaccccagcagctgcagaaccgtgacctcgtggtcatgctacacaaggaaggcatccagttctccttgtctgagcttcctccagctggctcctccaatcagcctccaaatctggcattcctggagctcctttcagagttttccccccgactcttccatcaggacaagcagcttttgctgtcctatctagaaaagtgcctgcagcatgtctcccaggcacctggccatccctggggcccagtcaccacctactgccactccctcagccctgtggagaacacagcagagaccagccctcaggtcctccccagctccaagaggaggcgcgttgaagggcctgccaagcctaacagagaggacgtctcctcgtcccaggaagaaagtctgcagctgaacagcatcccgcccacgcccaccctcacctccacagctgtgaagagcaggcagcccctgtgggggttgaaagagatggaggaagaagatggctcagagttggattttgcccaggggtgaggccatggagggaatctgggtgtctgagttcccagtttggtgtctggctgcctccatcttgctgtttctgtttcatggttccctgctgtagcactcccacattgttgggttcttctcaaacccttctccattgtttagctttaaaatgcatctctctgagcttttctccccattaacaccagctgccttacatcctcttcttacccttgatttttatcccatcattgatcctgcttcattcccagcagtcagcccgtcgcaggcaccgagaggtcaaggttcttgggtccacaatatttccagactccacacaacccttcaggtcctggcctgggcaaccagctgatgcggtgagcttttctcatcatctcctgtcttcacttcagatctgtcgcccactgtgaggggattcctgtctcacccattgcctctctgtgggtgctttttggacttgttttagccacagagcacttcctgtcagcacaatcgggaaactactatgctgtacttactgctccccacttcccccaccccgggtgtctgagaaactctcaggggtcctcaaagaacagtttgaaaagccagtctctttgcccctacatcagactcagccttatggaagaggacgaggaagaagagttagaaatccaggatgagtcaaatgaagaacggcaggatacagacatgcaagcaagtagctactcttccaccagtgagcgcgggctggacctcttagattctacagagctggatattgaggtgagtgtccccagagcaggagttatgtatccttgggaaatgctggcaggcaacccgtgcactcatcaaattgacaggccatagcctgggggtggccctctgggctgtctctggggctttgagggtaacccaggggaggatggtctgcccattggcccgttgctgtgtcctgtgtattcctttcatctttctcattatgatttctgacaggactctgggcccctccccagctccactccctacctcaagaatgtgaccatttggaaaaggcaaagagaaaaggagcaaaatgaagcattcccccaggcttcagccctgggctctgaggggaaagagttgggcattgtttttctaacctaacctttccctctggggtagagaagccgagagaccctgtcctccctaatgcactgtggcccagtccccttgcctttttcctgttctgtttggagtggagaagggcagcacctctgtgtttaatggaaatagcccatagtctcctggatttttggaacatctttctcagcctattttgtgtcctaatgattcgctcaataaacatgtttgaatccaaaaaaaaaacacaaaacaaaaaaacaaaaaaaaaagaagaccacaaccacaacaaaaccgcgggcacccccagcacggcgcgccgcgaacaaaaggcggagaccacacaccgcgccacggggcagacagagcgcacagacagcccaagcgccgcagcgccacaacacggcaccaacgcgccagagaccaaagacagcgcggcgagcaacgcgcaaacgacagggaagcccacagaac

SEQ ID NO: 381938 - DNA, 5585 bp, Homo sapiens
ccgggccgcccgcgtgcccaagcccacgtgagagggcaggacgcctgagagcttgaggccacacgaggctgtggagcggcgtgactcaaacgtggcgcgcatcagctcgcacacttccaaacctcgcgatagctactggccctgggcgagccgttgggattgcgcttgcgcacagcgtgtcttgtacgttcccgcgcttttctggaatctttcgcccccggaagggcagcggcgggcgcctgtgtggaagctggatcgccatacctaccctgtggtcctcatcttcctggcctcatagctcctcctctccaagcatgtcttccccgttgcaaagagctgtgggagataccaagagggccttgtctgcatcttctagttcctctgccagtctaccctttgatgacagggactcaaaccatacctcagaggggaatggcgactctttgttagctgatgaagacactgactttgaagacagcttgaatcgcaatgtgaagaagagagcagcaaaacgaccaccgaaaacaacaccggtggcaaaacatccaaagaaagggtcccgagtggtacatcgtcatagccggaaacagtcagagccaccagccaatgatcttttcaatgctgtgaaagccgccaaaagtgacatgcagtctttggtagatgagtggctggatagctacaagcaagaccaggatgcaggatttctggagcttgttaactttttcatccaatcttgcggatgtaaaggcattgtgacccctgagatgttcaagaagatgtccaactcagagatcatccagcacctaacagagcagtttaatgaggactcgggggactaccctctcatagctccaggtccatcctggaagaagttccagggcagcttctgtgaatttgtgaggacattggtctgtcagtgccagtacagcctcctctatgatggcttccctatggacgacctcatctccctgctcactggcctctcagactcacaagtccgcgccttccgtcacactagcaccctggctgctatgaaactgatgacctccctggtaaaagttgccctccaactgagtgtgcaccaagataacaatcagcgtcagtatgaggctgaaagaaacaaggggccagggcagagggcacctgagcggctggagagcctgttggagaaacgcaaagagctccaagagcatcaagaggagattgaggggatgatgaatgccctcttcaggggtgtctttgttcatcggtacagggatgtccttcctgagatccgtgctatctgcattgaggaaattgggtgttggatgcaaagctacagcacgtctttcctcaccgacagctatttaaaatatattggttggactctgcatgataagcaccgagaagtccgcctgaagtgtgtgaaggccctgaaagggctgtacggtaaccgggacctgaccacacgcctggagctcttcaccagccgcttcaaggaccggatggtttccatggtcatggacagagagtatgatgtggcagtggaggctgtcagattactgatacttatccttaagaacatggaagggttgctgacggacgcggattgtgagagcgtctaccccgttgtgtatccttctaatcgaggcctggcttctgccgcaggcgaatttctgtactggaaacttttctaccctgagtgcgagataagaacgatgggtggaagagagcaacgccagagcccaggcgcccagaggactttcttccagcttctgctgtccttctttgtggagagcgagctccatgaccacgctgcttacttagtagacagtctgtgggactgtgcaggggctcggctgaaggactgggagggtctgacaagcctgctgctggagaaggaccagaacctgggtgatgtgcaggagagcacactgatagaaatccttgtgtccagtgcccggcaagcttcagaggggcacccgcctgtgggccgggtcactgggaggaagggcttaacctctaaggagcgcaagacccaagccgatgacagggtgaagttgactgagcacctcatccccctgctgccccagctcctggccaagttctcagctgatgcagagaaggtcactcccctgctccagcttctcagctgctttgacctccacatctactgcactgggcgcttggagaagcacctggagctgttcctgcagcaactccaggaggtggtggtgaagcatgcagagccagcggtgcttgaggctggggcgcatgccctctacctgctctgtaatcccgaattcactttcttcagccgggcggactttgcccgcagccagctagtagatttgctgactgaccgcttccagcaggagcttgaagagctgttacaggtaggagctggggctggacaatgggacaccccaaacaagggtgggaggggctgcaagacgggggatgtggactgatgagttctgggggaaatgctattgtggatcttctttccttctcagtcgtccttcctagatgaggatgaggtatataatctggcagccactctgaaacgcctctctgccttctacaagtgagtggctttcctcctcttccccatcccgtttttactggtgtctgtggagttggttccctctgttcttttccagtataacattcccctttctcccccaaagcactcatgacctgactcgctgggagctctatgagccatgttgccaactcctgcagaaggctgtggacacaggagaggttcctcaccaggtgagtggacaggctagagatgggttgggggctggggggctagattttaaggacctacgttctaggtggccactaggtgtgtcaagtctcagtgcgtggagtggacaaagcgaggaagatcaggtgggtgggggtcacctcttacattcctctcttagaaggtggactctacttccagggtcttcttggatttcctggaagccaaggataatattgagggattctagaagacgtagagtaaattagggagcggtgacatttctacttcgtgtagatgcctctgaagaatgtccagaatatcactcattttccactggaaaaggaattagctctccctttactcattttctctcctcttcactggtgtgtttctggctatctgtctctccctctcctaacccaaacctcatttttcaaaccctttgttgttacaggttatcctgccagccttgactcttgtctatttttccattctctggacactaacccacatttctaaatcagatgcttcccaggtgagtgtgggtcttagatgggataatgggaacagaggagtctgtgtcttcattcttccccttcaagccactgtgcccacagaagcagctgtcgagtttgagggacagaatggtggccttctgtgaactctgccagagttgcctctcagatgtggatactgagatccaggagcaggtgagtactgactcaagtgggagcaacaaggcgagtatccctgcccccattccaaggagaaattgacagtgtcatttctaccttgggaaacattctgtccttttaaacatcctttcttttccccctacaggcttttgtcttattaagtgatctacttctcatctttagccctcagatgattgttgggggccgtgatttccttaggccacttgtcttttttcctgaagctactctccagtctgagctagccagcttcctcatggaccacgtcttcatccagccgggagacctgggcagtggtgcagtgactctatacctggggctcagtaagggctggggcttgggtgtagctcagaaatatagggcaggaagcttaagtctgtgattcccttttgccttccatgtgagccaggtgattcccaggaggatcatttacagatagagcggctacaccagcggcgccgcctcctagccgggttctgcaagctgttgctttatggggtgctggagatggatgcagcctcagatgttttcaaacactacaacaaggtaacaagttctacaatgactatggtgacattatcaaggaaacattaactagagcaaggcagattgaccgaagtcattgttcccgaatcctgctgctgagcctcaagcagctgtacacagaactgctgcaggagcatgggccccagggcctgaatgagcttcctgccttcatcgagatgagggacctggcccggaggtttgccttgagttttggaccccagcagctgcagaaccgtgacctcgtggtcatgctacacaaggaaggcatccagttctccttgtctgagcttcctccagctggctcctccaatcagcctccaaatctggcattcctggagctcctttcagagttttccccccgactcttccatcaggacaagcagcttttgctgtcctatctagaaaagtgcctgcagcatgtctcccaggcacctggccatccctggggcccagtcaccacctactgccactccctcagccctgtggagaacacagcagagaccagccctcaggtcctccccagctccaagaggaggcgcgttgaagggcctgccaagcctaacagagaggacgtctcctcgtcccaggaagaaagtctgcagctgaacagcatcccgcccacgcccaccctcacctccacagctgtgaagagcaggcagcccctgtgggggttgaaagagatggaggaagaagatggctcagagttggattttgcccagggtcagcccgtcgcaggcaccgagaggtcaaggttcttgggtccacaatatttccagactccacacaacccttcaggtcctggcctgggcaaccagctgatgcgactcagccttatggaagaggacgaggaagaagagttagaaatccaggatgagtcaaatgaagaacggcaggatacagacatgcaagcaagtagctactcttccaccagtgagcgcgggctggacctcttagattctacagagctggatattgaggatttctgacaggactctgggcccctccccagctccactccctacctcaagaatgtgaccatttggaaaaggcaaagagaaaaggagcaaaatgaagcattcccccaggcttcagccctgggctctgaggggaaagagttgggcattgtttttctaacctaacctttccctctggggtagagaagccgagagaccctgtcctccctaatgcactgtggcccagtccccttgcctttttcctgttctgtttggagtggagaagggcagcacctctgtgtttaatggaaatagcccatagtctcctggatttttggaacatctttctcagcctattttgtgtcctaatgattcgctcaataaacatgtttgaatccaaaaaaaaaacacaaaacaaaaaaacaaaaaaaaaagaagaccacaaccacaacaaaaccgcgggcacccccagcacggcgcgccgcgaacaaaaggcggagaccacacaccgcgccacggggcagacagagcgcacagacagcccaagcgccgcagcgccacaacacggcaccaacgcgccagagaccaaagacagcgcggcgagcaacgcgcaaacgacagggaagcccacagaac

SEQ ID NO: 381939 - DNA, 4744 bp, Homo sapiens
ttttttttttggcagggacggagtctcactgtgttgcccaggagaattaggctgtacaaggctggtgtttaactattttatggtttggtaacagaaagaaaatatttactaactgggtatggcacatttttgtagtcctagctacttgagaggccaaagtgggaagatgacttgaacccaggagttcaaggccagcttgggcaacatagcaagagatcctatcccttaaaaaaaatatttacatgtattttactatatatatagtatttacatcgggaggaagaaatgaaaggcatggggtacatggcatttcaagaaaataaattcttccatgagagggagttatctggtaggatggaaagtgagtttggagagagggtggctctaagagtcaacttatctgtctgtgtctagggatgtccttcctgagatccgtgctatctgcattgaggaaattgggtgttggatgcaaagctacagcacgtctttcctcaccgacagctatttaaaatatattggttggactctgcatgataagcaccgagaagtccgcctgaagtgtgtgaaggccctgaaagggctgtacggtaaccgggacctgaccacacgcctggagctcttcaccagccgcttcaaggaccggatggtttccatggtcatggacagagagtatgatgtggcagtggaggctgtcagattactgatacttatccttaagaacatggaagggttgctgacggacgcggattgtgagagcgtctaccccgttgtgtatccttctaatcgaggcctggcttctgccgcaggcgaatttctgtactggaaacttttctaccctgagtgcgagataagaacgatgggtggaagagagcaacgccagagcccaggcgcccagaggactttcttccagcttctgctgtccttctttgtggagagcgagctccatgaccacgctgcttacttagtagacagtctgtgggactgtgcaggggctcggctgaaggactgggagggtctgacaagcctgctgctggagaaggaccagaacctgggtgatgtgcaggagagcacactgatagaaatccttgtgtccagtgcccggcaagcttcagaggggcacccgcctgtgggccgggtcactgggaggaagggcttaacctctaaggagcgcaagacccaagccgatgacagggtgaagttgactgagcacctcatccccctgctgccccagctcctggccaagttctcagctgatgcagagaaggtcactcccctgctccagcttctcagctgctttgacctccacatctactgcactgggcgcttggagaagcacctggagctgttcctgcagcaactccaggaggtggtggtgaagcatgcagagccagcggtgcttgaggctggggcgcatgccctctacctgctctgtaatcccgaattcactttcttcagccgggcggactttgcccgcagccagctagtagatttgctgactgaccgcttccagcaggagcttgaagagctgttacaggtaggagctggggctggacaatgggacaccccaaacaagggtgggaggggctgcaagacgggggatgtggactgatgagttctgggggaaatgctattgtggatcttctttccttctcagtcgtccttcctagatgaggatgaggtatataatctggcagccactctgaaacgcctctctgccttctacaagtgagtggctttcctcctcttccccatcccgtttttactggtgtctgtggagttggttccctctgttcttttccagtataacattcccctttctcccccaaagcactcatgacctgactcgctgggagctctatgagccatgttgccaactcctgcagaaggctgtggacacaggagaggttcctcaccaggtgagtggacaggctagagatgggttgggggctggggggctagattttaaggacctacgttctaggtggccactaggtgtgtcaagtctcagtgcgtggagtggacaaagcgaggaagatcaggtgggtgggggtcacctcttacattcctctcttagaaggtggactctacttccagggtcttcttggatttcctggaagccaaggataatattgagggattctagaagacgtagagtaaattagggagcggtgacatttctacttcgtgtagatgcctctgaagaatgtccagaatatcactcattttccactggaaaaggaattagctctccctttactcattttctctcctcttcactggtgtgtttctggctatctgtctctccctctcctaacccaaacctcatttttcaaaccctttgttgttacaggttatcctgccagccttgactcttgtctatttttccattctctggacactaacccacatttctaaatcagatgcttcccaggtgagtgtgggtcttagatgggataatgggaacagaggagtctgtgtcttcattcttccccttcaagccactgtgcccacagaagcagctgtcgagtttgagggacagaatggtggccttctgtgaactctgccagagttgcctctcagatgtggatactgagatccaggagcaggtgagtactgactcaagtgggagcaacaaggcgagtatccctgcccccattccaaggagaaattgacagtgtcatttctaccttgggaaacattctgtccttttaaacatcctttcttttccccctacaggcttttgtcttattaagtgatctacttctcatctttagccctcagatgattgttgggggccgtgatttccttaggccacttgtcttttttcctgaagctactctccagtctgagctagccagcttcctcatggaccacgtcttcatccagccgggagacctgggcagtggtgcagtgactctatacctggggctcagtaagggctggggcttgggtgtagctcagaaatatagggcaggaagcttaagtctgtgattcccttttgccttccatgtgagccaggtgattcccaggaggatcatttacagatagagcggctacaccagcggcgccgcctcctagccgggttctgcaagctgttgctttatggggtgctggagatggatgcagcctcagatgttttcaaacactacaacaaggtaacaagttctacaatgactatggtgacattatcaaggaaacattaactagagcaaggcagattgaccgaagtcattgttcccgaatcctgctgctgagcctcaagcagctgtacacagaactgctgcaggagcatgggccccagggcctgaatgagcttcctgccttcatcgagatgagggacctggcccggaggtttgccttgagttttggaccccagcagctgcagaaccgtgacctcgtggtcatgctacacaaggaaggcatccagttctccttgtctgagcttcctccagctggctcctccaatcagcctccaaatctggcattcctggagctcctttcagagttttccccccgactcttccatcaggacaagcagcttttgctgtcctatctagaaaagtgcctgcagcatgtctcccaggcacctggccatccctggggcccagtcaccacctactgccactccctcagccctgtggagaacacagcagagaccagccctcaggtcctccccagctccaagaggaggcgcgttgaagggcctgccaagcctaacagagaggacgtctcctcgtcccaggaagaaagtctgcagctgaacagcatcccgcccacgcccaccctcacctccacagctgtgaagagcaggcagcccctgtgggggttgaaagagatggaggaagaagatggctcagagttggattttgcccagggtcagcccgtcgcaggcaccgagaggtcaaggttcttgggtccacaatatttccagactccacacaacccttcaggtcctggcctgggcaaccagctgatgcgactcagccttatggaagaggacgaggaagaagagttagaaatccaggatgagtcaaatgaagaacggcaggatacagacatgcaagcaagtagctactcttccaccagtgagcgcgggctggacctcttagattctacagagctggatattgaggatttctgacaggactctgggcccctccccagctccactccctacctcaagaatgtgaccatttggaaaaggcaaagagaaaaggagcaaaatgaagcattcccccaggcttcagccctgggctctgaggggaaagagttgggcattgtttttctaacctaacctttccctctggggtagagaagccgagagaccctgtcctccctaatgcactgtggcccagtccccttgcctttttcctgttctgtttggagtggagaagggcagcacctctgtgtttaatggaaatagcccatagtctcctggatttttggaacatctttctcagcctattttgtgtcctaatgattcgctcaataaacatgtttgaatccaaaaaaaaaacacaaaacaaaaaaacaaaaaaaaaagaagaccacaaccacaacaaaaccgcgggcacccccagcacggcgcgccgcgaacaaaaggcggagaccacacaccgcgccacggggcagacagagcgcacagacagcccaagcgccgcagcgccacaacacggcaccaacgcgccagagaccaaagacagcgcggcgagcaacgcgcaaacgacagggaagcccacagaac

SEQ ID NO: 381940 - DNA, 2354 bp, Homo sapiens
ttttttttttggcagggacggagtctcactgtgttgcccaggtgagtgtgggtcttagatgggataatgggaacagaggagtctgtgtcttcattcttccccttcaagccactgtgcccacagaagcagctgtcgagtttgagggacagaatggtggccttctgtgaactctgccagagttgcctctcagatgtggatactgagatccaggagcaggtgagtactgactcaagtgggagcaacaaggcgagtatccctgcccccattccaaggagaaattgacagtgtcatttctaccttgggaaacattctgtccttttaaacatcctttcttttccccctacaggcttttgtcttattaagtgatctacttctcatctttagccctcagatgattgttgggggccgtgatttccttaggccacttgtcttttttcctgaagctactctccagtctgagctagccagcttcctcatggaccacgtcttcatccagccgggagacctgggcagtggtgcagtgactctatacctggggctcagtaagggctggggcttgggtgtagctcagaaatatagggcaggaagcttaagtctgtgattcccttttgccttccatgtgagccaggtgattcccaggaggatcatttacagatagagcggctacaccagcggcgccgcctcctagccgggttctgcaagctgttgctttatggggtgctggagatggatgcagcctcagatgttttcaaacactacaacaaggtaacaagttctacaatgactatggtgacattatcaaggaaacattaactagagcaaggcagattgaccgaagtcattgttcccgaatcctgctgctgagcctcaagcagctgtacacagaactgctgcaggagcatgggccccagggcctgaatgagcttcctgccttcatcgagatgagggacctggcccggaggtttgccttgagttttggaccccagcagctgcagaaccgtgacctcgtggtcatgctacacaaggaaggcatccagttctccttgtctgagcttcctccagctggctcctccaatcagcctccaaatctggcattcctggagctcctttcagagttttccccccgactcttccatcaggacaagcagcttttgctgtcctatctagaaaagtgcctgcagcatgtctcccaggcacctggccatccctggggcccagtcaccacctactgccactccctcagccctgtggagaacacagcagagaccagccctcaggtcctccccagctccaagaggaggcgcgttgaagggcctgccaagcctaacagagaggacgtctcctcgtcccaggaagaaagtctgcagctgaacagcatcccgcccacgcccaccctcacctccacagctgtgaagagcaggcagcccctgtgggggttgaaagagatggaggaagaagatggctcagagttggattttgcccagggtcagcccgtcgcaggcaccgagaggtcaaggttcttgggtccacaatatttccagactccacacaacccttcaggtcctggcctgggcaaccagctgatgcgactcagccttatggaagaggacgaggaagaagagttagaaatccaggatgagtcaaatgaagaacggcaggatacagacatgcaagcaagtagctactcttccaccagtgagcgcgggctggacctcttagattctacagagctggatattgaggatttctgacaggactctgggcccctccccagctccactccctacctcaagaatgtgaccatttggaaaaggcaaagagaaaaggagcaaaatgaagcattcccccaggcttcagccctgggctctgaggggaaagagttgggcattgtttttctaacctaacctttccctctggggtagagaagccgagagaccctgtcctccctaatgcactgtggcccagtccccttgcctttttcctgttctgtttggagtggagaagggcagcacctctgtgtttaatggaaatagcccatagtctcctggatttttggaacatctttctcagcctattttgtgtcctaatgattcgctcaataaacatgtttgaatccaaaaaaaaaacacaaaacaaaaaaacaaaaaaaaaagaagaccacaaccacaacaaaaccgcgggcacccccagcacggcgcgccgcgaacaaaaggcggagaccacacaccgcgccacggggcagacagagcgcacagacagcccaagcgccgcagcgccacaacacggcaccaacgcgccagagaccaaagacagcgcggcgagcaacgcgcaaacgacagggaagcccacagaac

SEQ ID NO: 381941 - DNA, 257 bp, Homo sapiens
cccgactcttccatcaggacaagcagcttttgtaagttggtgggtggatagagatgtggattagggaagggcctgctgagggcccagtagccccttcaggcttttggttctacctctttcataggctgtcctatctagaaaagtgcctgcagcatgtctcccaggcacctggccatccctggggcccagtcaccacctactgccactccctcagccctgtggagaacacagcagagaccagccctcaggtcctcccc

SEQ ID NO: 381942 - DNA, 919 bp, Homo sapiens
catatctctgcaaagtcttaatgtaggtttccaggatttaatgattctttcaatcaactttaaagttcttcaggaagattctccaggtccgtcaacagttttccccttcatgactttgtgacaaagctttcttgttccactatccaggtgttcccaacaagttgctgtaacggtggcccctcataagcttgcctggaaaccctagaaagctcagaaaaattatgaactttgcccagtaagaggctgggaagtcagaaagggttttaaacaaaactgaccccacttgttacatgctcctttcactgtccaaacgtcaaccaaaggaacttttgtgacgctaagacgctcccggcgtcctcacccgttcacagccagagttgatcttagaaggcagggggctcgcaccgagacgctcctagcaagcccctcacgcgagcgaatgactggcgccaggagaaacgcataggacctcccgaagccgccgagagcaaaaggacccatcagagctgtgctgagacccgctgcgggccgggctcgcactcgagattctcgcccgtgggattccagtcctgagctcaggtcccgcccgcggcaggcctgtgggctgcgaggaggagctttgcctagcttgcaggcagcgcagggcagacggcggcaggagaagcaagatgaatgcaggctcagatcctgtggtcatcgtctcggcggcgcggaccatcataggtgagtggccggcgggagccgcgcagagtccgaggcgcctgctgcttcggcaggagcgccgagggccggacttgtgtaggagaggggcgtatgtggaggaagccggtcaggccaagccgcgaggagccgcgggatccctggaaccctgcggctcccgcgttccctgacctggtgctacagccccaccctctcctct

SEQ ID NO: 381943 - DNA, 2996 bp, Homo sapiens
catatctctgcaaagtcttaatgtaggtttccaggatttaatgattctttcaatcaactttaaagttcttcaggaagattctccaggtccgtcaacagttttccccttcatgactttgtgacaaagctttcttgttccactatccaggtgttcccaacaagttgctgtaacggtggcccctcataagcttgcctggaaaccctagaaagctcagaaaaattatgaactttgcccagtaagaggctgggaagtcagaaagggttttaaacaaaactgaccccacttgttacatgctcctttcactgtccaaacgtcaaccaaaggaacttttgtgacgctaagacgctcccggcgtcctcacccgttcacagccagagttgatcttagaaggcagggggctcgcaccgagacgctcctagcaagcccctcacgcgagcgaatgactggcgccaggagaaacgcataggacctcccgaagccgccgagagcaaaaggacccatcagagctgtgctgagacccgctgcgggccgggctcgcactcgagattctcgcccgtgggattccagtcctgagctgaacgagagataagtctttgtcaccccccagtctttactgtttcgagaaaccctaagattttttaaaaaaaagcccaaaacgtcaagtcggggaactccaacattggggtgtccagaaacactggggtttcaggcgctctgtaaatgcgtccgaggtccgcggttctgcccgcaggcccagaccccggcctcacttccgccccgcgccccgcgccccggccctcaggtcccgcccgcggcaggcctgtgggctgcgaggaggagctttgcctagcttgcaggcagcgcagggcagacggcggcaggagaagcaagatgaatgcaggctcagatcctgtggtcatcgtctcggcggcgcggaccatcataggttccttcaatggtgccttagctgctgttcctgtccaggacctgggctccactgtcatcaaagaagtcttgaagagggccactgtggctccggaagatgtgtctgaggtcatctttggacatgtcttggcagcaggctgtgggcagaatcctgttagacaagccagtgtgggtgcaggaattccctactctgttccagcatggagctgccagatgatctgtgggtcaggcctaaaagctgtgtgccttgcagtccagtcaatagggataggagactccagcattgtggttgcaggaggcatggaaaatatgagcaaggctcctcacttggcttacttgagaacaggagtaaagataggtgagatgccactgactgacagtatactctgtgatggtcttacagatgcatttcacaactgtcatatgggtattacagctgaaaatgtagccaaaaaatggcaagtgagtagagaagatcaggacaaggttgcagttctgtcccagaacaggacagagaatgcacagaaagctggccattttgacaaagagattgtaccagttttggtgtcaactagaagaggtcttattgaagttaaaacagatgagtttcctcgccatgggagcaacatagaagccatgtccaagctaaagccttactttcttactgatggaacgggaacagtcaccccagccaatgcttcaggaataaatgatggtgctgcagctgtcgttcttatgaagaagtcagaagctgataaacgtgggcttacacctttagcacggatagtttcctggtcccaagtgggtgtggagccttccattatgggaataggaccaattccagccataaagcaagctgttacaaaagcaggttggtcactggaagatgttgacatatttgaaatcaatgaagcctttgcagctgtctctgctgcaatagttaaagaacttggattaaacccagagaaggtcaatattgaaggaggggctatagccttgggccaccctcttggagcatctggctgtcgaattcttgtgaccctgttacacacactggagagaatgggcagaagtcgtggtgttgcagccctgtgcattgggggtgggatgggaatagcaatgtgtgttcagagagaatgaattgcttaaactttgaacaacctcaatttctttttaaactaataaagtactaggttgcaatatgtgaaatcagaggaccaaagtacagatggaaaccatttcctacatcacaaaaacccaagtttacagcttgtactttactttaatgtgtaatactcaactcaaggtacaagacaattgcatttaacattgttataaataaaaggaacatcagatcaatcattaagggctccagagtgaacagcatcttcataacttccatgtttatcatctttactttctggatgtaatttaataagatcatcaattcgaagaatggtgattgcagcttctgttgcaaatttcaaactcttaactttaactatggttggttcaaacacccctgcttgtttgttgtctcgaggtttaccattgctcaaatcaagaccaatccattttagatttttacgttctgggttaacctgggcctcattatgaaaagctcttaattttgcaaccagatctgtggagtcctgggcagcattaactgctagtgtattgggaataacaagaagtgatcttgcaaactctgcaatcgcaagctgttcccgagaccccatgctggttgcatagttttcaaggtatatggaaagggctgcttctacagcacccccaccgggaaccacagattttgactccaaaactctcttcactacacaaagtgcatcatgtaaagagcgctccatctcatcacacatgaaatcatttgccccacgtaagataatcgatgcagacgtacgagccttagtatttttgattaagatcagctcatcatcacaaattctctcctgtaccacttcttctgcctgtcccaacattgcagcttcaaaagtttcttcaccttccaaattggccagggttgacagaatagt

SEQ ID NO: 381944 - DNA, 2251 bp, Homo sapiens
tgcgcggggaggtggtgcgcggggaggtggagggcgaggggcggggctacctctcaggtcccgcccgcggcaggcctgtgggctgcgaggaggagctttgcctagcttgcaggcagcgcagggcagacggcggcaggagaagcaagatgaatgcaggctcagatcctgtggtcatcgtctcggcggcgcggaccatcataggttccttcaatggtgccttagctgctgttcctgtccaggacctgggctccactgtcatcaaagaagtcttgaagagggccactgtggctccggaagatgtgtctgaggtcatctttggacatgtcttggcagcaggctgtgggcagaatcctgttagacaagccagtgtgggtgcaggaattccctactctgttccagcatggagctgccagatgatctgtgggtcaggcctaaaagctgtgtgccttgcagtccagtcaatagggataggagactccagcattgtggttgcaggaggcatggaaaatatgagcaaggctcctcacttggcttacttgagaacaggagtaaagataggtgagatgccactgactgacagtatactctgtgatggtcttacagatgcatttcacaactgtcatatgggtattacagctgaaaatgtagccaaaaaatggcaagtgagtagagaagatcaggacaaggttgcagttctgtcccagaacaggacagagaatgcacagaaagctggccattttgacaaagagattgtaccagttttggtgtcaactagaagaggtcttattgaagttaaaacagatgagtttcctcgccatgggagcaacatagaagccatgtccaagctaaagccttactttcttactgatggaacgggaacagtcaccccagccaatgcttcaggaataaatgatggtgctgcagctgtcgttcttatgaagaagtcagaagctgataaacgtgggcttacacctttagcacggatagtttcctggtcccaagtgggtgtggagccttccattatgggaataggaccaattccagccataaagcaagctgttacaaaagcaggttggtcactggaagatgttgacatatttgaaatcaatgaagcctttgcagctgtctctgctgcaatagttaaagaacttggattaaacccagagaaggtcaatattgaaggaggggctatagccttgggccaccctcttggagcatctggctgtcgaattcttgtgaccctgttacacacactggagagaatgggcagaagtcgtggtgttgcagccctgtgcattgggggtgggatgggaatagcaatgtgtgttcagagagaatgaattgcttaaactttgaacaacctcaatttctttttaaactaataaagtactaggttgcaatatgtgaaatcagaggaccaaagtacagatggaaaccatttcctacatcacaaaaacccaagtttacagcttgtactttactttaatgtgtaatactcaactcaaggtacaagacaattgcatttaacattgttataaataaaaggaacatcagatcaatcattaagggctccagagtgaacagcatcttcataacttccatgtttatcatctttactttctggatgtaatttaataagatcatcaattcgaagaatggtgattgcagcttctgttgcaaatttcaaactcttaactttaactatggttggttcaaacacccctgcttgtttgttgtctcgaggtttaccattgctcaaatcaagaccaatccattttagatttttacgttctgggttaacctgggcctcattatgaaaagctcttaattttgcaaccagatctgtggagtcctgggcagcattaactgctagtgtattgggaataacaagaagtgatcttgcaaactctgcaatcgcaagctgttcccgagaccccatgctggttgcatagttttcaaggtatatggaaagggctgcttctacagcacccccaccgggaaccacagattttgactccaaaactctcttcactacacaaagtgcatcatgtaaagagcgctccatctcatcacacatgaaatcatttgccccacgtaagataatcgatgcagacgtacgagccttagtatttttgattaagatcagctcatcatcacaaattctctcctgtaccacttcttctgcctgtcccaacattgcagcttcaaaagtttcttcaccttccaaattggccagggttgacagaatagt

SEQ ID NO: 381945 - DNA, 2745 bp, Homo sapiens
catatctctgcaaagtcttaatgtaggtttccaggatttaatgattctttcaatcaactttaaagttcttcaggaagattctccaggtccgtcaacagttttccccttcatgactttgtgacaaagctttcttgttccactatccaggtgttcccaacaagttgctgtaacggtggcccctcataagcttgcctggaaaccctagaaagctcagaaaaattatgaactttgcccagtaagaggctgggaagtcagaaagggttttaaacaaaactgaccccacttgttacatgctcctttcactgtccaaacgtcaaccaaaggaacttttgtgacgctaagacgctcccggcgtcctcacccgttcacagccagagttgatcttagaaggcagggggctcgcaccgagacgctcctagcaagcccctcacgcgagcgaatgactggcgccaggagaaacgcataggacctcccgaagccgccgagagcaaaaggacccatcagagctgtgctgagacccgctgcgggccgggctcgcactcgagattctcgcccgtgggattccagtcctgagctgaacgagagataagtctttgtcaccccccagtctttactgtttcgagaaaccctaagattttttaaaaaaaagcccaaaacgtcaagtcggggaactccaacattggggtgtccagaaacactggggtttcaggcgctctgtaaatgcgtccgaggtccgcggttctgcccgcaggcccagaccccggcctcacttccgccccgcgccccgcgccccggccctcaggtcccgcccgcggcaggcctgtgggctgcgaggaggagctttgcctagcttgcaggcagcgcagggcagacggcggcaggagaagcaagatgaatgcaggctcagatcctgtggtcatcgtctcggcggcgcggaccatcataggttccttcaatggtgccttagctgctgttcctgtccaggacctgggctccactgtcatcaaagaagtcttgaagagggccactgtggctccggaagatgtgtctgaggtcatctttggacatgtcttggcagcaggctgtgggcagaatcctgttagacaagccagtgtgggtgcaggaattccctactctgttccagcatggagctgccagatgatctgtgggtcaggcctaaaagctgtgtgccttgcagtccagtcaatagggataggagactccagcattgtggttgcaggaggcatggaaaatatgagcaaggctcctcacttggcttacttgagaacaggagtaaagataggtgagatgccactgactgacagtatactctgtgatggtcttacagatgcatttcacaactgtcatatgggtattacagctgaaaatgtagccaaaaaatggcaagtgagtagagaagatcaggacaaggttgcagttctgtcccagaacaggacagagaatgcacagaaagctggccattttgacaaagagattgtaccagttttggtgtcaactagaagaggtcttattgaagttaaaacagatgagtttcctcgccatgggagcaacatagaagccatgtccaagctaaagccttactttcttactgatggaacgggaacagtcaccccagccaatgcttcaggaataaatgatggtgctgcagctgtcgttcttatgaagaagtcagaagctgataaacgtgggcttacacctttagcacggatagtttcctggtcccaagtgggtgtggagccttccattatgggaataggaccaattccagccataaagcaagctgttacaaaagcaggttggtcactggaagatgttgacatatttgaaatcaatgaagcctttgcagctgtctctgctgcaatagttaaagaacttggattaaacccagagaaggtcaatattgaaggaggggctatagccttgggccaccctcttggagcatctggctgtcgaattcttgtgaccctgttacacacactggagagaatgggcagaagtcgtggtgttgcagccctgtgcattgggggtgggatgggaatagcaatgtgtgttcagagagaatgaattgcttaaactttgaacaacctcaatttctttttaaactaataaagtactaggttgcaatatgtgaaatcagaggaccaaagtacagatggaaaccatttcctacatcacaaaaacccaagtttacagcttgtactttactttaatgtgtaatactcaactcaaggtacaagacaattgcatttaacattgttataaataaaaggaacatcagatcaatcattaagggctccagagtgaacagcatcttcataacttccatgtttatcatctttactttctggatgtaatttaataagatcatcaattcgaagaatggtgattgcagcttctgttgcaaatttcaaactcttaactttaactatggttggttcaaacacccctgcttgtttgttgtctcgaggtttaccattgctcaaatcaagaccaatcctgcaattaagaaagaattatttaacggccgcttacaatttcattaggtggcctattaactccagcatttcattcaagtattaaggttgatttttaaatcagactagagatcttgtaggtagtctttctaccaaaagaagcagggagagattagcaatcacagttaacgaagacacaccagtgctaataattagtcattatcccttgaattacagtgactgaacaaca

SEQ ID NO: 381946 - DNA, 2520 bp, Homo sapiens
catatctctgcaaagtcttaatgtaggtttccaggatttaatgattctttcaatcaactttaaagttcttcaggaagattctccaggtccgtcaacagttttccccttcatgactttgtgacaaagctttcttgttccactatccaggtgttcccaacaagttgctgtaacggtggcccctcataagcttgcctggaaaccctagaaagctcagaaaaattatgaactttgcccagtaagaggctgggaagtcagaaagggttttaaacaaaactgaccccacttgttacatgctcctttcactgtccaaacgtcaaccaaaggaacttttgtgacgctaagacgctcccggcgtcctcacccgttcacagccagagttgatcttagaaggcagggggctcgcaccgagacgctcctagcaagcccctcacgcgagcgaatgactggcgccaggagaaacgcataggacctcccgaagccgccgagagcaaaaggacccatcagagctgtgctgagacccgctgcgggccgggctcgcactcgagattctcgcccgtgggattccagtcctgagctgaacgagagataagtctttgtcaccccccagtctttactgtttcgagaaaccctaagattttttaaaaaaaagcccaaaacgtcaagtcggggaactccaacattggggtgtccagaaacactggggtttcaggcgctctgtaaatgcgtccgaggtccgcggttctgcccgcaggcccagaccccggcctcacttccgccccgcgccccgcgccccggccctcaggtcccgcccgcggcaggcctgtgggctgcgaggaggagctttgcctagcttgcaggcagcgcagggcagacggcggcaggagaagcaagatgaatgcaggctcagatcctgtggtcatcgtctcggcggcgcggaccatcataggttccttcaatggtgccttagctgctgttcctgtccaggacctgggctccactgtcatcaaagaagtcttgaagagggccactgtggctccggaagatgtgtctgaggtcatctttggacatgtcttggcagcaggctgtgggcagaatcctgttagacaagccagtgtgggtgcaggaattccctactctgttccagcatggagctgccagatgatctgtgggtcaggcctaaaagctgtgtgccttgcagtccagtcaatagggataggagactccagcattgtggttgcaggaggcatggaaaatatgagcaaggctcctcacttggcttacttgagaacaggagtaaagataggtgagatgccactgactgacagtatactctgtgatggtcttacagatgcatttcacaactgtcatatgggtattacagctgaaaatgtagccaaaaaatggcaagtgagtagagaagatcaggacaaggttgcagttctgtcccagaacaggacagagaatgcacagaaagctggccattttgacaaagagattgtaccagttttggtgtcaactagaagaggtcttattgaagttaaaacagatgagtttcctcgccatgggagcaacatagaagccatgtccaagctaaagccttactttcttactgatggaacgggaacagtcaccccagccaatgcttcaggaataaatgatggtgctgcagctgtcgttcttatgaagaagtcagaagctgataaacgtgggcttacacctttagcacggatagtttcctggtcccaagtgggtgtggagccttccattatgggaataggaccaattccagccataaagcaagctgttacaaaagcaggttggtcactggaagatgttgacatatttgaaatcaatgaagcctttgcagctgtctctgctgcaatagttaaagaacttggattaaacccagagaaggtcaatattgaaggaggggctatagccttgggccaccctcttggagcatctggctgtcgaattcttgtgaccctgttacacacactggagagaatgggcagaagtcgtggtgttgcagccctgtgcattgggggtgggatgggaatagcaatgtgtgttcagagagaatgaattgcttaaactttgaacaacctcaatttctttttaaactaataaagtactaggttgcaatatgtgaaatcagaggaccaaagtacagatggaaaccatttcctacatcacaaaaacccaagtttacagcttgtactttactttaatgtgtaatactcaactcaaggtacaagacaattgcatttaacattgttataaataaaaggaacatcagatcaatcattagaaaacaaaaagggggcgcaaaagtatcctcagggccagttacgcgtaccagtttctgtcaaaagggcctataggagcgttttaggaaggccgcctcgttaacacgtgggctggacacggtccttgcctgggagcaccccctcgggcattgggccacctccgttaactcggagtacactagttggacacgcttcgcgatgcgtattaagc

SEQ ID NO: 381947 - DNA, 2656 bp, Homo sapiens
catatctctgcaaagtcttaatgtaggtttccaggatttaatgattctttcaatcaactttaaagttcttcaggaagattctccaggtccgtcaacagttttccccttcatgactttgtgacaaagctttcttgttccactatccaggtgttcccaacaagttgctgtaacggtggcccctcataagcttgcctggaaaccctagaaagctcagaaaaattatgaactttgcccagtaagaggctgggaagtcagaaagggttttaaacaaaactgaccccacttgttacatgctcctttcactgtccaaacgtcaaccaaaggaacttttgtgacgctaagacgctcccggcgtcctcacccgttcacagccagagttgatcttagaaggcagggggctcgcaccgagacgctcctagcaagcccctcacgcgagcgaatgactggcgccaggagaaacgcataggacctcccgaagccgccgagagcaaaaggacccatcagagctgtgctgagacccgctgcgggccgggctcgcactcgagattctcgcccgtgggattccagtcctgagctgaacgagagataagtctttgtcaccccccagtctttactgtttcgagaaaccctaagattttttaaaaaaaagcccaaaacgtcaagtcggggaactccaacattggggtgtccagaaacactggggtttcaggcgctctgtaaatgcgtccgaggtccgcggttctgcccgcaggcccagaccccggcctcacttccgccccgcgccccgcgccccggccctcaggtcccgcccgcggcaggcctgtgggctgcgaggaggagctttgcctagcttgcaggcagcgcagggcagacggcggcaggagaagcaagatgaatgcaggctcagatcctgtggtcatcgtctcggcggcgcggaccatcataggttccttcaatggtgccttagctgctgttcctgtccaggacctgggctccactgtcatcaaagaagtcttgaagagggccactgtggctccggaagatgtgtctgaggtcatctttggacatgtcttggcagcaggctgtgggcagaatcctgttagacaagccagtgtgggtgcaggaattccctactctgttccagcatggagctgccagatgatctgtgggtcaggcctaaaagctgtgtgccttgcagtccagtcaatagggataggagactccagcattgtggttgcaggaggcatggaaaatatgagcaaggctcctcacttggcttacttgagaacaggagtaaagataggtgagatgccactgactgacagtatactctgtgatggtcttacagatgcatttcacaactgtcatatgggtattacagctgaaaatgtagccaaaaaatggcaagtgagtagagaagatcaggacaaggttgcagttctgtcccagaacaggacagagaatgcacagaaagctggccattttgacaaagagattgtaccagttttggtgtcaactagaagaggtcttattgaagttaaaacagatgagtttcctcgccatgggagcaacatagaagccatgtccaagctaaagccttactttcttactgatggaacgggaacagtcaccccagccaatgcttcaggaataaatgatggtgctgcagctgtcgttcttatgaagaagtcagaagctgataaacgtgggcttacacctttagcacggatagtttcctggtcccaagtgggtgtggagccttccattatgggaataggaccaattccagccataaagcaagctgttacaaaagcaggttggtcactggaagatgttgacatatttgaaatcaatgaagcctttgcagctgtctctgctgcaatagttaaagaacttggattaaacccagagaaggtcaatattgaaggaggggctatagccttgggccaccctcttggagcatctggctgtcgaattcttgtgaccctgttacacacactggagagaatgggcagaagtcgtggtgttgcagccctgtgcattgggggtgggatgggaatagcaatgtgtgttcagagagaatgaattgcttaaactttgaacaacctcaatttctttttaaactaataaagtactaggttgcaatatgtgaaaaaacaaaaaaaaaaaaaaaaaaaaaactccgagggcatctttattttttcggggggcgccggaaaaaggagggttttaggaaagggggccctgttggccattacctgggttttccagtgacccagtttttcttgtgttccaagtggggctaaatcttggccgggttcccccaatatatggggagggtcggaattaaatttccggataaaacccagggtttaccctgtgcttttatggactccggcgaacagggcaggaaagacaaaaaacagccgaagacgcagaaacaacaagcactagagacagggggtacacaaccaacttggttacacaccacacgtgcgccacgacacgaacgcgcacacacaacacatgcgaaactaaaaaacacacatatgacagcaacaacaaccagacacaacgccaacaacaatcaacaaaaacaacaaccaaacaacacaacaaaaagcgaaacaaacaacaataatcaagtaacacgacg

SEQ ID NO: 381948 - DNA, 3002 bp, Homo sapiens
  misc_feature (1764)..(1764): n is a, c, g, or t
  misc_feature (1770)..(1772): n is a, c, g, or t
  misc_feature (1777)..(1779): n is a, c, g, or t
  misc_feature (1790)..(1791): n is a, c, g, or t
  misc_feature (1793)..(1793): n is a, c, g, or t
  misc_feature (1798)..(1798): n is a, c, g, or t
  misc_feature (1803)..(1803): n is a, c, g, or t
  misc_feature (1815)..(1815): n is a, c, g, or t
  misc_feature (1820)..(1820): n is a, c, g, or t
  misc_feature (1854)..(1854): n is a, c, g, or t
  misc_feature (1856)..(1856): n is a, c, g, or t
  misc_feature (1861)..(1861): n is a, c, g, or t
  misc_feature (1863)..(1863): n is a, c, g, or t
  misc_feature (1869)..(1869): n is a, c, g, or t
  misc_feature (1873)..(1873): n is a, c, g, or t
  misc_feature (1879)..(1879): n is a, c, g, or t
  misc_feature (1881)..(1881): n is a, c, g, or t
  misc_feature (1898)..(1898): n is a, c, g, or t
  misc_feature (1918)..(1918): n is a, c, g, or t
catatctctgcaaagtcttaatgtaggtttccaggatttaatgattctttcaatcaactttaaagttcttcaggaagattctccaggtccgtcaacagttttccccttcatgactttgtgacaaagctttcttgttccactatccaggtgttcccaacaagttgctgtaacggtggcccctcataagcttgcctggaaaccctagaaagctcagaaaaattatgaactttgcccagtaagaggctgggaagtcagaaagggttttaaacaaaactgaccccacttgttacatgctcctttcactgtccaaacgtcaaccaaaggaacttttgtgacgctaagacgctcccggcgtcctcacccgttcacagccagagttgatcttagaaggcagggggctcgcaccgagacgctcctagcaagcccctcacgcgagcgaatgactggcgccaggagaaacgcataggacctcccgaagccgccgagagcaaaaggacccatcagagctgtgctgagacccgctgcgggccgggctcgcactcgagattctcgcccgtgggattccagtcctgagctgaacgagagataagtctttgtcaccccccagtctttactgtttcgagaaaccctaagattttttaaaaaaaagcccaaaacgtcaagtcggggaactccaacattggggtgtccagaaacactggggtttcaggcgctctgtaaatgcgtccgaggtccgcggttctgcccgcaggcccagaccccggcctcacttccgccccgcgccccgcgccccggccctcaggtcccgcccgcggcaggcctgtgggctgcgaggaggagctttgcctagcttgcaggcagcgcagggcagacggcggcaggagaagcaagatgaatgcaggctcagatcctgtggtcatcgtctcggcggcgcggaccatcataggttccttcaatggtgccttagctgctgttcctgtccaggacctgggctccactgtcatcaaagaagtcttgaagagggccactgtggctccggaagatgtgtctgaggtcatctttggacatgtcttggcagcaggctgtgggcagaatcctgttagacaagccagtgtgggtgcaggaattccctactctgttccagcatggagctgccagatgatctgtgggtcaggcctaaaagctgtgtgccttgcagtccagtcaatagggataggagactccagcattgtggttgcaggaggcatggaaaatatgagcaaggctcctcacttggcttacttgagaacaggagtaaagataggtgagatgccactgactgacagtatactctgtgatggtcttacagatgcatttcacaactgtcatatgggtattacagctgaaaatgtagccaaaaaatggcaagtgagtagagaagatcaggacaaggttgcagttctgtcccagaacaggacagagaatgcacagaaagctggccattttgacaaagagattgtaccagttttggtgtcaactagaagaggtcttattgaagttaaaacagatgagtttcctcgccatgggagcaacatagaagccatgtccaagctaaagccttactttcttactgatggaacgggaacagtcaccccagccaatgcttcaggaataaatgatggtgctgcagctgtcgttcttatgaagaagtcagaagctgataaacgtgggcttacacctttagcacggatagtttcctggtcccaagtgggtgtggagccttcntttttnnnttttnnntccttatttcnntnttttntgtcntgcttttacatntttcnttttttttttttgaagtttttttcatatttttantnatttntncctttncttntttttntntctgcaatagttaaagnacttggattaaacccagagnaggtcaatattgaaggaggggctatagccttgggccaccctcttggagcatctggctgtcgaattcttgtgaccctgttacacacactggagagaatgggcagaagtcgtggtgttgcagccctgtgcattgggggtgggatgggaatagcaatgtgtgttcagagagaatgaattgcttaaactttgaacaacctcaatttctttttaaactaataaagtactaggttgcaatatgtgaaatcagaggaccaaagtacagatggaaaccatttcctacatcacaaaaacccaagtttacagcttgtactttactttaatgtgtaatactcaactcaaggtacaagacaattgcatttaacattgttataaataaaaggaacatcagatcaatcattaagggctccagagtgaacagcatcttcataacttccatgtttatcatctttactttctggatgtaatttaataagatcatcaattcgaagaatggtgattgcagcttctgttgcaaatttcaaactcttaactttaactatggttggttcaaacacccctgcttgtttgttgtctcgaggtttaccattgctcaaatcaagaccaatccattttagatttttacgttctgggttaacctgggcctcattatgaaaagctcttaattttgcaaccagatctgtggagtcctgggcagcattaactgctagtgtattgggaataacaagaagtgatcttgcaaactctgcaatcgcaagctgttcccgagaccccatgctggttgcatagttttcaaggtatatggaaagggctgcttctacagcacccccaccgggaaccacagattttgactccaaaactctcttcactacacaaagtgcatcatgtaaagagcgctccatctcatcacacatgaaatcatttgccccacgtaagataatcgatgcagacgtacgagccttagtatttttgattaagatcagctcatcatcacaaattctctcctgtaccacttcttctgcctgtcccaacattgcagcttcaaaagtttcttcaccttccaaattggccagggttgacagaatagt

SEQ ID NO: 381949 - DNA, 1839 bp, Homo sapiens
  misc_feature (1782)..(1783): n is a, c, g, or t
  misc_feature (1789)..(1789): n is a, c, g, or t
  misc_feature (1795)..(1797): n is a, c, g, or t
  misc_feature (1809)..(1809): n is a, c, g, or t
catatctctgcaaagtcttaatgtaggtttccaggatttaatgattctttcaatcaactttaaagttcttcaggaagattctccaggtccgtcaacagttttccccttcatgactttgtgacaaagctttcttgttccactatccaggtgttcccaacaagttgctgtaacggtggcccctcataagcttgcctggaaaccctagaaagctcagaaaaattatgaactttgcccagtaagaggctgggaagtcagaaagggttttaaacaaaactgaccccacttgttacatgctcctttcactgtccaaacgtcaaccaaaggaacttttgtgacgctaagacgctcccggcgtcctcacccgttcacagccagagttgatcttagaaggcagggggctcgcaccgagacgctcctagcaagcccctcacgcgagcgaatgactggcgccaggagaaacgcataggacctcccgaagccgccgagagcaaaaggacccatcagagctgtgctgagacccgctgcgggccgggctcgcactcgagattctcgcccgtgggattccagtcctgagctgaacgagagataagtctttgtcaccccccagtctttactgtttcgagaaaccctaagattttttaaaaaaaagcccaaaacgtcaagtcggggaactccaacattggggtgtccagaaacactggggtttcaggcgctctgtaaatgcgtccgaggtccgcggttctgcccgcaggcccagaccccggcctcacttccgccccgcgccccgcgccccggccctcaggtcccgcccgcggcaggcctgtgggctgcgaggaggagctttgcctagcttgcaggcagcgcagggcagacggcggcaggagaagcaagatgaatgcaggctcagatcctgtggtcatcgtctcggcggcgcggaccatcataggttccttcaatggtgccttagctgctgttcctgtccaggacctgggctccactgtcatcaaagaagtcttgaagagggccactgtggctccggaagatgtgtctgaggtcatctttggacatgtcttggcagcaggctgtgggcagaatcctgttagacaagccagtgtgggtgcaggaattccctactctgttccagcatggagctgccagatgatctgtgggtcaggcctaaaagctgtgtgccttgcagtccagtcaatagggataggagactccagcattgtggttgcaggaggcatggaaaatatgagcaaggctcctcacttggcttacttgagaacaggagtaaagataggtgagatgccactgactgacagtatactctgtgatggtcttacagatgcatttcacaactgtcatatgggtattacagctgaaaatgtagccaaaaaatggcaagtgagtagagaagatcaggacaaggttgcagttctgtcccagaacaggacagagaatgcacagaaagctggccattttgacaaagagattgtaccagttttggtgtcaactagaagaggtcttattgaagttaaaacagatgagtttcctcgccatgggagcaacatagaagccatgtccaagctaaagccttactttcttactgatggaacgggaacagtcaccccagccaatgcttcaggaataaatgatggtgctgcagctgtcgttcttatgaagaagtcagaagctgataaacgtgggcttacacctttagcacggatagtttcctggtcccaagtgggtgtggagccttcgggcctcctttgggaaggnncatccnctaagnnngggtgaaaccgnggccgggatcgcactttaccaagcactcgg

SEQ ID NO: 381950 - DNA, 2946 bp, Homo sapiens
catatctctgcaaagtcttaatgtaggtttccaggatttaatgattctttcaatcaactttaaagttcttcaggaagattctccaggtccgtcaacagttttccccttcatgactttgtgacaaagctttcttgttccactatccaggtgttcccaacaagttgctgtaacggtggcccctcataagcttgcctggaaaccctagaaagctcagaaaaattatgaactttgcccagtaagaggctgggaagtcagaaagggttttaaacaaaactgaccccacttgttacatgctcctttcactgtccaaacgtcaaccaaaggaacttttgtgacgctaagacgctcccggcgtcctcacccgttcacagccagagttgatcttagaaggcagggggctcgcaccgagacgctcctagcaagcccctcacgcgagcgaatgactggcgccaggagaaacgcataggacctcccgaagccgccgagagcaaaaggacccatcagagctgtgctgagacccgctgcgggccgggctcgcactcgagattctcgcccgtgggattccagtcctgagctgaacgagagataagtctttgtcaccccccagtctttactgtttcgagaaaccctaagattttttaaaaaaaagcccaaaacgtcaagtcggggaactccaacattggggtgtccagaaacactggggtttcaggcgctctgtaaatgcgtccgaggtccgcggttctgcccgcaggcccagaccccggcctcacttccgccccgcgccccgcgccccggccctcaggtcccgcccgcggcaggcctgtgggctgcgaggaggagctttgcctagcttgcaggcagcgcagggcagacggcggcaggagaagcaagatgaatgcaggctcagatcctgtggtcatcgtctcggcggcgcggaccatcataggttccttcaatggtgccttagctgctgttcctgtccaggacctgggctccactgtcatcaaagaagtcttgaagagggccactgtggctccggaagatgtgtctgaggtcatctttggacatgtcttggcagcaggctgtgggcagaatcctgttagacaagccagtgtgggtgcaggaattccctactctgttccagcatggagctgccagatgatctgtgggtcaggcctaaaagctgtgtgccttgcagtccagtcaatagggataggagactccagcattgtggttgcaggaggcatggaaaatatgagcaaggctcctcacttggcttacttgagaacaggagtaaagataggtgagatgccactgactgacagtatactctgtgatggtcttacagatgcatttcacaactgtcatatgggtattacaggttgcagttctgtcccagaacaggacagagaatgcacagaaagctggccattttgacaaagagattgtaccagttttggtgtcaactagaagaggtcttattgaagttaaaacagatgagtttcctcgccatgggagcaacatagaagccatgtccaagctaaagccttactttcttactgatggaacgggaacagtcaccccagccaatgcttcaggaataaatgatggtgctgcagctgtcgttcttatgaagaagtcagaagctgataaacgtgggcttacacctttagcacggatagtttcctggtcccaagtgggtgtggagccttccattatgggaataggaccaattccagccataaagcaagctgttacaaaagcaggttggtcactggaagatgttgacatatttgaaatcaatgaagcctttgcagctgtctctgctgcaatagttaaagaacttggattaaacccagagaaggtcaatattgaaggaggggctatagccttgggccaccctcttggagcatctggctgtcgaattcttgtgaccctgttacacacactggagagaatgggcagaagtcgtggtgttgcagccctgtgcattgggggtgggatgggaatagcaatgtgtgttcagagagaatgaattgcttaaactttgaacaacctcaatttctttttaaactaataaagtactaggttgcaatatgtgaaatcagaggaccaaagtacagatggaaaccatttcctacatcacaaaaacccaagtttacagcttgtactttactttaatgtgtaatactcaactcaaggtacaagacaattgcatttaacattgttataaataaaaggaacatcagatcaatcattaagggctccagagtgaacagcatcttcataacttccatgtttatcatctttactttctggatgtaatttaataagatcatcaattcgaagaatggtgattgcagcttctgttgcaaatttcaaactcttaactttaactatggttggttcaaacacccctgcttgtttgttgtctcgaggtttaccattgctcaaatcaagaccaatccattttagatttttacgttctgggttaacctgggcctcattatgaaaagctcttaattttgcaaccagatctgtggagtcctgggcagcattaactgctagtgtattgggaataacaagaagtgatcttgcaaactctgcaatcgcaagctgttcccgagaccccatgctggttgcatagttttcaaggtatatggaaagggctgcttctacagcacccccaccgggaaccacagattttgactccaaaactctcttcactacacaaagtgcatcatgtaaagagcgctccatctcatcacacatgaaatcatttgccccacgtaagataatcgatgcagacgtacgagccttagtatttttgattaagatcagctcatcatcacaaattctctcctgtaccacttcttctgcctgtcccaacattgcagcttcaaaagtttcttcaccttccaaattggccagggttgacagaatagt

SEQ ID NO: 381951 - DNA, 2046 bp, Homo sapiens
cttgtgatgtccacgctctccgcctttctattgtaggttccttcaatggtgccttagctgctgttcctgtccaggacctgggctccactgtcatcaaagaagtcttgaagagggccactgtggctccggaagatgtgtctgaggtcatctttggacatgtcttggcagcaggctgtgggcagaatcctgttagacaagccagtgtgggtgcaggaattccctactctgttccagcatggagctgccagatgatctgtgggtcaggcctaaaagctgtgtgccttgcagtccagtcaatagggataggagactccagcattgtggttgcaggaggcatggaaaatatgagcaaggtgagatgccactgactgacagtatactctgtgatggtcttacagatgcatttcacaactgtcatatgggtattacagctgaaaatgtagccaaaaaatggcaagtgagtagagaagatcaggacaaggttgcagttctgtcccagaacaggacagagaatgcacagaaagctggccattttgacaaagagattgtaccagttttggtgtcaactagaagaggtcttattgaagttaaaacagatgagtttcctcgccatgggagcaacatagaagccatgtccaagctaaagccttactttcttactgatggaacgggaacagtcaccccagccaatgcttcaggaataaatgatggtgctgcagctgtcgttcttatgaagaagtcagaagctgataaacgtgggcttacacctttagcacggatagtttcctggtcccaagtgggtgtggagccttccattatgggaataggaccaattccagccataaagcaagctgttacaaaagcaggttggtcactggaagatgttgacatatttgaaatcaatgaagcctttgcagctgtctctgctgcaatagttaaagaacttggattaaacccagagaaggtcaatattgaaggaggggctatagccttgggccaccctcttggagcatctggctgtcgaattcttgtgaccctgttacacacactggagagaatgggcagaagtcgtggtgttgcagccctgtgcattgggggtgggatgggaatagcaatgtgtgttcagagagaatgaattgcttaaactttgaacaacctcaatttctttttaaactaataaagtactaggttgcaatatgtgaaatcagaggaccaaagtacagatggaaaccatttcctacatcacaaaaacccaagtttacagcttgtactttactttaatgtgtaatactcaactcaaggtacaagacaattgcatttaacattgttataaataaaaggaacatcagatcaatcattaagggctccagagtgaacagcatcttcataacttccatgtttatcatctttactttctggatgtaatttaataagatcatcaattcgaagaatggtgattgcagcttctgttgcaaatttcaaactcttaactttaactatggttggttcaaacacccctgcttgtttgttgtctcgaggtttaccattgctcaaatcaagaccaatccattttagatttttacgttctgggttaacctgggcctcattatgaaaagctcttaattttgcaaccagatctgtggagtcctgggcagcattaactgctagtgtattgggaataacaagaagtgatcttgcaaactctgcaatcgcaagctgttcccgagaccccatgctggttgcatagttttcaaggtatatggaaagggctgcttctacagcacccccaccgggaaccacagattttgactccaaaactctcttcactacacaaagtgcatcatgtaaagagcgctccatctcatcacacatgaaatcatttgccccacgtaagataatcgatgcagacgtacgagccttagtatttttgattaagatcagctcatcatcacaaattctctcctgtaccacttcttctgcctgtcccaacattgcagcttcaaaagtttcttcaccttccaaattggccagggttgacagaatagt

SEQ ID NO: 381952 - DNA, 1344 bp, Homo sapiens
ccccacgtaaagccccgttttttaaaaaggggattttgtttcaaatgtggaaaacactttaacctattttcgggtaaattcctttgaatttaaaaagggtttttccaattttggcccattgggttaaaaattaggttttttaccaaaaaatttaccggatttttccaaaattttacggcttcaaattccctttgccaattaaggtgggcaaatttttggaaaggccaacggttcgggcctttttggtattacgccaacttgggaaaaggggatttttttcaaagcgatttaatttgggaaccccaaggtttttccaattccgacgtttttaaaacccggcccattaatttttaaacggccccctataaggggaaattgcccaattagccccaaattcggccccaatgaaaaaatttgcccaatttaaaaatcgattgggccaaaggggccaaaaagtttttttttttttttttttttttttgttttggtttttttttgttgttttttttctttgttttttttttcttttcttttttttttttttttttttttttttttacagcttgtactttactttaatgtgtaatactcaactcaaggtacaagacaattgcatttaacattgttataaataaaaggaacatcagatcaatcattaagggctccagagtgaacagcatcttcataacttccatgtttatcatctttactttctggatgtaatttaataagatcatcaattcgaagaatggtgattgcagcttctgttgcaaatttcaaactcttaactttaactatggttggttcaaacacccctgcttgtttgttgtctcgaggtttaccattgctcaaatcaagaccaatccattttagatttttacgttctgggttaacctgggcctcattatgaaaagctcttaattttgcaaccagatctgtggagtcctgggcagcattaactgctagtgtattgggaataacaagaagtgatcttgcaaactctgcaatcgcaagctgttcccgagaccccatgctggttgcatagttttcaaggtatatggaaagggctgcttctacagcacccccaccgggaaccacagattttgactccaaaactctcttcactacacaaagtgcatcatgtaaagagcgctccatctcatcacacatgaaatcatttgccccacgtaagataatcgatgcagacgtacgagccttagtatttttgattaagatcagctcatcatcacaaattctctcctgtaccacttcttctgcctgtcccaacattgcagcttcaaaagtttcttcaccttccaaattggccagggttgacagaatagt

SEQ ID NO: 381953 - DNA, 1193 bp, Homo sapiens
  misc_feature (959)..(959): n is a, c, g, or t
  misc_feature (965)..(966): n is a, c, g, or t
  misc_feature (978)..(978): n is a, c, g, or t
  misc_feature (980)..(980): n is a, c, g, or t
  misc_feature (986)..(987): n is a, c, g, or t
  misc_feature (990)..(990): n is a, c, g, or t
  misc_feature (992)..(992): n is a, c, g, or t
  misc_feature (1005)..(1007): n is a, c, g, or t
  misc_feature (1010)..(1010): n is a, c, g, or t
  misc_feature (1019)..(1019): n is a, c, g, or t
  misc_feature (1021)..(1021): n is a, c, g, or t
  misc_feature (1028)..(1028): n is a, c, g, or t
  misc_feature (1040)..(1040): n is a, c, g, or t
  misc_feature (1043)..(1045): n is a, c, g, or t
  misc_feature (1050)..(1050): n is a, c, g, or t
  misc_feature (1072)..(1072): n is a, c, g, or t
  misc_feature (1075)..(1075): n is a, c, g, or t
  misc_feature (1152)..(1152): n is a, c, g, or t
  misc_feature (1178)..(1178): n is a, c, g, or t
  misc_feature (1190)..(1190): n is a, c, g, or t
catatctctgcaaagtcttaatgtaggtttccaggatttaatgattctttcaatcaactttaaagttcttcaggaagattctccaggtccgtcaacagttttccccttcatgactttgtgacaaagctttcttgttccactatccaggtgttcccaacaagttgctgtaacggtggcccctcataagcttgcctggaaaccctagaaagctcagaaaaattatgaactttgcccagtaagaggctgggaagtcagaaagggttttaaacaaaactgaccccacttgttacatgctcctttcactgtccaaacgtcaaccaaaggaacttttgtgacgctaagacgctcccggcgtcctcacccgttcacagccagagttgatcttagaaggcagggggctcgcaccgagacgctcctagcaagcccctcacgcgagcgaatgactggcgccaggagaaacgcataggacctcccgaagccgccgagagcaaaaggacccatcagagctgtgctgagacccgctgcgggccgggctcgcactcgagattctcgcccgtgggattccagtcctgagctgaacgagagataagtctttgtcaccccccagtctttactgtttcgagaaaccctaagattttttaaaaaaaagcccaaaacgtcaagtcggggaactccaacattggggtgtccagaaacactggggtttcaggcgctctgtaaatgcgtccgaggtccgcggttctgcccgcaggcccagaccccggcctcacttccgccccgcgccccgcgccccggccctcaggtcccgcccgcggcaggcctgtgggctgcgaggaggagctttgcctagcttgcaggcagcgcagggcagacggcggcaggagaagcaagatgaatgcaggctcagatcctgtggtcatcgtctcggcggcgcggaccatcatagtccttcaatggtntttttnnttgctgttcctntncaggannttngntccattttttttnnnatnttgtttttntnttttttncttttttttttntcnnnttttnttttttttttggtcattttttnacntgtttttgcagcaggctgtgggcagaatcctgttatttttttttttttttttttttttttttttttttttttttttnttttttttttttttttttttatgatntgtgggttaggntta

SEQ ID NO: 381954 - DNA, 825 bp, Homo sapiens
tactactactaaattcgcgcccgcgtcgaccttttatttataacaatgttaaatgcaattgtcttgtaccgtgagttgagtattacacattaaagtaaagtccaagctgtaaataaaaggaacatcagatcaatcattaagggctccagagtgaacagcatcttcataacttccatgtttatcatctttactttctggatgtaatttaataagatcatcaattcgaagaatggtgattgcagcttctgttgcaaatttcaaactcttaactttaactatggttggttcaaacacccctgcttgtttgttgtctcgaggtttaccattgctcaaatcaagaccaatccattttagatttttacgttctgggttaacctgggcctcattatgaaaagctcttaattttgcaaccagatctgtggagtcctgggcagcattaactgctagtgtattgggaataacaagaagtgatcttgcaaactctgcaatcgcaagctgttcccgagaccccatgctggttgcatagttttcaaggtatatggaaagggctgcttctacagcacccccaccgggaaccacagattttgactccaaaactctcttcactacacaaagtgcatcatgtaaagagcgctccatctcatcacacatgaaatcatttgccccacgtaagataatcgatgcagacgtacgagccttagtatttttgattaagatcagctcatcatcacaaattctctcctgtaccacttcttctgcctgtcccaacattgcagcttcaaaagtttcttcaccttccaaattggccagggttgacagaatagt

SEQ ID NO: 381955 - DNA, 354 bp, Homo sapiens
ttaccagtatcatgcagcatatatttatgttgacaaagaatggtttaactttagcctttccacccaagtttagacctcttttctatgaatctttcctctaggttacaaaagcaggttggtcactggaagatgttgacatatttgaaatcaatgaagcctttgcagctgtctctgctgcaatagttaaagaacttggattaaacccagagaaggtaaagatgcacaagtaaccctgagagcttaccagtgaatttcacaatccaattttaagatagtatcttctaggtgttggccatgtgggtaatagttaaagaaatactagttactaggactgagttcattacttcccaaggt

SEQ ID NO: 381956 - DNA, 336 bp, Homo sapiens
acagcttgtactttactttaatgtgtaatactcaactcaaggtacaagacaattgcatttaacattgttataaataaaaggaacatcagatcaatcattaagggctccagagtgaacagcatcttcataacttccatgtttatcatctttactttctggatgtaatttaataagatcatcaattcgaagaatggtgattgcagcttctgttgcaaatttcaaactcttaactttaactatggttggttcaaacacccctgcttgtttgttgtctcgaggtttaccattgctcaaatcaagaccaatcctgcaattaagaaagaattatttaacggc

SEQ ID NO: 381957 - DNA, 370 bp, Homo sapiens
tctgtggagtcctgggcagcattaactgctagtgtattgggaataacaagaagtgatcttgcaaactctgcaatcgcaagctgttcccgagacccctaggaaaagaagaaaattaggtgacttcacaaaagggaaaaaaaaaattgaagtccacagctactgctctcaggcctctaagacaagaaatgactgttcttaccatgctggttgcatagttttcaaggtatatggaaagggctgcttctacagcacccccaccgggaaccacagattttgactccaaaactctcttcactacacaaagtgcatcatgtaaagagcgctccatctcatcacacatgaaatcatttgccccacgtaagataatcga

SEQ ID NO: 381958 - DNA, 2154 bp, Homo sapiens
catatctctgcaaagtcttaatgtaggtttccaggatttaatgattctttcaatcaactttaaagttcttcaggaagattctccaggtccgtcaacagttttccccttcatgactttgtgacaaagctttcttgttccactatccaggtgttcccaacaagttgctgtaacggtggcccctcataagcttgcctggaaaccctagaaagctcagaaaaattatgaactttgcccagtaagaggctgggaagtcagaaagggttttaaacaaaactgaccccacttgttacatgctcctttcactgtccaaacgtcaaccaaaggaacttttgtgacgctaagacgctcccggcgtcctcacccgttcacagccagagttgatcttagaaggcagggggctcgcaccgagacgctcctagcaagcccctcacgcgagcgaatgactggcgccaggagaaacgcataggacctcccgaagccgccgagagcaaaaggacccatcagagctgtgctgagacccgctgcgggccgggctcgcactcgagattctcgcccgtgggattccagtcctgagctgaacgagagataagtctttgtcaccccccagtctttactgtttcgagaaaccctaagattttttaaaaaaaagcccaaaacgtcaagtcggggaactccaacattggggtgtccagaaacactggggtttcaggcgctctgtaaatgcgtccgaggtccgcggttctgcccgcaggcccagaccccggcctcacttccgccccgcgccccgcgccccggccctcaggtcccgcccgcggcaggcctgtgggctgcgaggaggagctttgcctagcttgcaggcagcgcagggcagacggcggcaggagaagcaagatgaatgcaggctcagatcctgtggtcatcgtctcggcggcgcggaccatcataggttccttcaatggtgccttagctgctgttcctgtccaggacctgggctccactgtcatcaaagaagtcttgaagagggccactgtggctccggaagatgtgtctgaggtcatctttggacatgtcttggcagcaggctgtgggcagaatcctgttagacaagccagtgtgggtgcaggaattccctactctgttccagcatggagctgccagatgatctgtgggtcaggcctaaaagctgtgtgccttgcagtccagtcaatagggataggagactccagcattgtggttgcaggaggcatggaaaatatgagcaaggctcctcacttggcttacttgagaacaggagtaaagataggtgagatgccactgactgacagtatactctgtgatggtcttacagatgcatttcacaactgtcatatgggtattacagctgaaaatgtagccaaaaaatggcaagtgagtagagaagatcaggacaaggttgcagttctgtcccagaacaggacagagaatgcacagaaagctggccattttgacaaagagattgtaccagttttggtgtcaactagaagaggtcttattgaagttaaaacagatgagtttcctcgccatgggagcaacatagaagccatgtccaagctaaagccttactttcttactgatggaacgggaacagtcaccccagccaatgcttcaggaataaatgatggtgctgcagctgtcgttcttatgaagaagtcagaagctgataaacgtgggcttacacctttagcacggatagtttcctggtcccaagtgggtgtggagccttccattatgggaataggaccaattccagccataaagcaagctgttacaaaagcaggttggtcactggaagatgttgacatatttgaaatcaatgaagcctttgcagctgtctctgctgcaatagttaaagaacttggattaaacccagagaaggtcaatattgaaggaggggctatagccttgggccaccctcttggagcatctggctgtcgaattcttgtgaccctgttacacacactggagagaatgggcagaagtcgtggtgttgcagccctgtgcattgggggtgggatgggaatagcaatgtgtgttcagagagaatgaattgcttaaactttgaacaacctcaatttctttttaaactaataaagtactaggttgcaatatgtgaaa

SEQ ID NO: 381959 - DNA, 2066 bp, Homo sapiens
catatctctgcaaagtcttaatgtaggtttccaggatttaatgattctttcaatcaactttaaagttcttcaggaagattctccaggtccgtcaacagttttccccttcatgactttgtgacaaagctttcttgttccactatccaggtgttcccaacaagttgctgtaacggtggcccctcataagcttgcctggaaaccctagaaagctcagaaaaattatgaactttgcccagtaagaggctgggaagtcagaaagggttttaaacaaaactgaccccacttgttacatgctcctttcactgtccaaacgtcaaccaaaggaacttttgtgacgctaagacgctcccggcgtcctcacccgttcacagccagagttgatcttagaaggcagggggctcgcaccgagacgctcctagcaagcccctcacgcgagcgaatgactggcgccaggagaaacgcataggacctcccgaagccgccgagagcaaaaggacccatcagagctgtgctgagacccgctgcgggccgggctcgcactcgagattctcgcccgtgggattccagtcctgagctgaacgagagataagtctttgtcaccccccagtctttactgtttcgagaaaccctaagattttttaaaaaaaagcccaaaacgtcaagtcggggaactccaacattggggtgtccagaaacactggggtttcaggcgctctgtaaatgcgtccgaggtccgcggttctgcccgcaggcccagaccccggcctcacttccgccccgcgccccgcgccccggccctcaggtcccgcccgcggcaggcctgtgggctgcgaggaggagctttgcctagcttgcaggcagcgcagggcagacggcggcaggagaagcaagatgaatgcaggctcagatcctgtggtcatcgtctcggcggcgcggaccatcataggttccttcaatggtgccttagctgctgttcctgtccaggacctgggctccactgtcatcaaagaagtcttgaagagggccactgtggctccggaagatgtgtctgaggtcatctttggacatgtcttggcagcaggctgtgggcagaatcctgttagacaagccagtgtgggtgcaggaattccctactctgttccagcatggagctgccagatgatctgtgggtcaggcctaaaagctgtgtgccttgcagtccagtcaatagggataggagactccagcattgtggttgcaggaggcatggaaaatatgagcaaggctcctcacttggcttacttgagaacaggagtaaagataggtgagatgccactgactgacagtatactctgtgatggtcttacagatgcatttcacaactgtcatatgggtattacagctgaaaatgtagccaaaaaatggcaagtgagtagagaagatcaggacaaggttgcagttctgtcccagaacaggacagagaatgcacagaaagctggccattttgacaaagagattgtaccagttttggtgtcaactagaagaggtcttattgaagttaaaacagatgagtttcctcgccatgggagcaacatagaagccatgtccaagctaaagccttactttcttactgatggaacgggaacagtcaccccagccaatgcttcaggaataaatgatggtgctgcagctgtcgttcttatgaagaagtcagaagctgataaacgtgggcttacacctttagcacggatagtttcctggtcccaagtgggtgtggagccttccattatgggaataggaccaattccagccataaagcaagctgttacaaaagcaggttggtcactggaagatgttgacatatttgaaatcaatgaagcctttgcagctgtctctgctgcaatagttaaagaacttcaatattgacctagcgggggagaaaagatttagattgtttattcttctgtggacacagtttaaaatcttaaacttgtctttttcctcttaatgtatcagcatgctaccctttcaaactcaaattttcattttaactgcttaggaataaatttacacctttgtgaaaattc

SEQ ID NO: 381960 - DNA, 2333 bp, Homo sapiens
ggggcggaactgctaggtggtctgagcccggctttgggctggggtcgggctgtcacacaatggctagaagtcgtgacttcgtctccttcgtgccgcatggttttcaacgcccttgacccgccggttccttttgtttgggaagcatggggtcgcatccagtccttcggatttggggaaatagaagggctacagcggcgtccctaggccgttctggaggtcgcctgtccagccctcggctgctgcgagttgtggcacccaccttgacctttgctcagaccagcaggttccttcaatggtgccttagctgctgttcctgtccaggacctgggctccactgtcatcaaagaagtcttgaagagggccactgtggctccggaagatgtgtctgaggtcatctttggacatgtcttggcagcaggctgtgggcagaatcctgttagacaagccagtgtgggtgcaggaattccctactctgttccagcatggagctgccagatgatctgtgggtcaggcctaaaagctgtgtgccttgcagtccagtcaatagggataggagactccagcattgtggttgcaggaggcatggaaaatatgagcaaggctcctcacttggcttacttgagaacaggagtaaagataggtgagatgccactgactgacagtatactctgtgatggtcttacagatgcatttcacaactgtcatatgggtattacagctgaaaatgtagccaaaaaatggcaagtgagtagagaagatcaggacaaggttgcagttctgtcccagaacaggacagagaatgcacagaaagctggccattttgacaaagagattgtaccagttttggtgtcaactagaagaggtcttattgaagttaaaacagatgagtttcctcgccatgggagcaacatagaagccatgtccaagctaaagccttactttcttactgatggaacgggaacagtcaccccagccaatgcttcaggaataaatgatggtgctgcagctgtcgttcttatgaagaagtcagaagctgataaacgtgggcttacacctttagcacggatagtttcctggtcccaagtgggtgtggagccttccattatgggaataggaccaattccagccataaagcaagctgttacaaaagcaggttggtcactggaagatgttgacatatttgaaatcaatgaagcctttgcagctgtctctgctgcaatagttaaagaacttggattaaacccagagaaggtcaatattgaaggaggggctatagccttgggccaccctcttggagcatctggctgtcgaattcttgtgaccctgttacacacactggagagaatgggcagaagtcgtggtgttgcagccctgtgcattgggggtgggatgggaatagcaatgtgtgttcagagagaatgaattgcttaaactttgaacaacctcaatttctttttaaactaataaagtactaggttgcaatatgtgaaatcagaggaccaaagtacagatggaaaccatttcctacatcacaaaaacccaagtttacagcttgtactttactttaatgtgtaatactcaactcaaggtacaagacaattgcatttaacattgttataaataaaaggaacatcagatcaatcattaagggctccagagtgaacagcatcttcataacttccatgtttatcatctttactttctggatgtaatttaataagatcatcaattcgaagaatggtgattgcagcttctgttgcaaatttcaaactcttaactttaactatggttggttcaaacacccctgcttgtttgttgtctcgaggtttaccattgctcaaatcaagaccaatccattttagatttttacgttctgggttaacctgggcctcattatgaaaagctcttaattttgcaaccagatctgtggagtcctgggcagcattaactgctagtgtattgggaataacaagaagtgatcttgcaaactctgcaatcgcaagctgttcccgagaccccatgctggttgcatagttttcaaggtatatggaaagggctgcttctacagcacccccaccgggaaccacagattttgactccaaaactctcttcactacacaaagtgcatcatgtaaagagcgctccatctcatcacacatgaaatcatttgccccacgtaagataatcgatgcagacgtacgagccttagtatttttgattaagatcagctcatcatcacaaattctctcctgtaccacttcttctgcctgtcccaacattgcagcttcaaaagtttcttcaccttccaaattggccagggttgacagaatagt

SEQ ID NO: 381961 - DNA, 2160 bp, Homo sapiens
  misc_feature (33)..(33): n is a, c, g, or t
  misc_feature (41)..(41): n is a, c, g, or t
tcgagaactgatttatgatgtgcccagagtcancccggatntgtatttcatcacgtgcagctaaagtaactaaatggtacgtggccttacaattaacaggtgcatcataggttccttcaatggtgccttagctgctgttcctgtccaggacctgggctccactgtcatcaaagaagtcttgaagagggccactgtggctccggaagatgtgtctgaggtcatctttggacatgtcttggcagcaggctgtgggcagaatcctgttagacaagccagtgtgggtgcaggaattccctactctgttccagcatggagctgccagatgatctgtgggtcaggcctaaaagctgtgtgccttgcagtccagtcaatagggataggagactccagcattgtggttgcaggaggcatggaaaatatgagcaaggctcctcacttggcttacttgagaacaggagtaaagataggtgagatgccactgactgacagtatactctgtgatggtcttacagatgcatttcacaactgtcatatgggtattacagctgaaaatgtagccaaaaaatggcaagtgagtagagaagatcaggacaaggttgcagttctgtcccagaacaggacagagaatgcacagaaagctggccattttgacaaagagattgtaccagttttggtgtcaactagaagaggtcttattgaagttaaaacagatgagtttcctcgccatgggagcaacatagaagccatgtccaagctaaagccttactttcttactgatggaacgggaacagtcaccccagccaatgcttcaggaataaatgatggtgctgcagctgtcgttcttatgaagaagtcagaagctgataaacgtgggcttacacctttagcacggatagtttcctggtcccaagtgggtgtggagccttccattatgggaataggaccaattccagccataaagcaagctgttacaaaagcaggttggtcactggaagatgttgacatatttgaaatcaatgaagcctttgcagctgtctctgctgcaatagttaaagaacttggattaaacccagagaaggtcaatattgaaggaggggctatagccttgggccaccctcttggagcatctggctgtcgaattcttgtgaccctgttacacacactggagagaatgggcagaagtcgtggtgttgcagccctgtgcattgggggtgggatgggaatagcaatgtgtgttcagagagaatgaattgcttaaactttgaacaacctcaatttctttttaaactaataaagtactaggttgcaatatgtgaaatcagaggaccaaagtacagatggaaaccatttcctacatcacaaaaacccaagtttacagcttgtactttactttaatgtgtaatactcaactcaaggtacaagacaattgcatttaacattgttataaataaaaggaacatcagatcaatcattaagggctccagagtgaacagcatcttcataacttccatgtttatcatctttactttctggatgtaatttaataagatcatcaattcgaagaatggtgattgcagcttctgttgcaaatttcaaactcttaactttaactatggttggttcaaacacccctgcttgtttgttgtctcgaggtttaccattgctcaaatcaagaccaatccattttagatttttacgttctgggttaacctgggcctcattatgaaaagctcttaattttgcaaccagatctgtggagtcctgggcagcattaactgctagtgtattgggaataacaagaagtgatcttgcaaactctgcaatcgcaagctgttcccgagaccccatgctggttgcatagttttcaaggtatatggaaagggctgcttctacagcacccccaccgggaaccacagattttgactccaaaactctcttcactacacaaagtgcatcatgtaaagagcgctccatctcatcacacatgaaatcatttgccccacgtaagataatcgatgcagacgtacgagccttagtatttttgattaagatcagctcatcatcacaaattctctcctgtaccacttcttctgcctgtcccaacattgcagcttcaaaagtttcttcaccttccaaattggccagggttgacagaatagt

SEQ ID NO: 381962 - DNA, 2266 bp, Homo sapiens
ggggcggaactgctaggtggtctgagcccggctttgggctggggtcgggctgtcacacaatggctagaagtcgtgacttcgtctccttcgtgccgcatggttttcaacgcccttgacccgccggttccttttgtttgggaagcatggggtcgcatccagtccttcggatttggggaaatagaagggctacagcggcgtccctaggccgttctggaggttccttcaatggtgccttagctgctgttcctgtccaggacctgggctccactgtcatcaaagaagtcttgaagagggccactgtggctccggaagatgtgtctgaggtcatctttggacatgtcttggcagcaggctgtgggcagaatcctgttagacaagccagtgtgggtgcaggaattccctactctgttccagcatggagctgccagatgatctgtgggtcaggcctaaaagctgtgtgccttgcagtccagtcaatagggataggagactccagcattgtggttgcaggaggcatggaaaatatgagcaaggctcctcacttggcttacttgagaacaggagtaaagataggtgagatgccactgactgacagtatactctgtgatggtcttacagatgcatttcacaactgtcatatgggtattacagctgaaaatgtagccaaaaaatggcaagtgagtagagaagatcaggacaaggttgcagttctgtcccagaacaggacagagaatgcacagaaagctggccattttgacaaagagattgtaccagttttggtgtcaactagaagaggtcttattgaagttaaaacagatgagtttcctcgccatgggagcaacatagaagccatgtccaagctaaagccttactttcttactgatggaacgggaacagtcaccccagccaatgcttcaggaataaatgatggtgctgcagctgtcgttcttatgaagaagtcagaagctgataaacgtgggcttacacctttagcacggatagtttcctggtcccaagtgggtgtggagccttccattatgggaataggaccaattccagccataaagcaagctgttacaaaagcaggttggtcactggaagatgttgacatatttgaaatcaatgaagcctttgcagctgtctctgctgcaatagttaaagaacttggattaaacccagagaaggtcaatattgaaggaggggctatagccttgggccaccctcttggagcatctggctgtcgaattcttgtgaccctgttacacacactggagagaatgggcagaagtcgtggtgttgcagccctgtgcattgggggtgggatgggaatagcaatgtgtgttcagagagaatgaattgcttaaactttgaacaacctcaatttctttttaaactaataaagtactaggttgcaatatgtgaaatcagaggaccaaagtacagatggaaaccatttcctacatcacaaaaacccaagtttacagcttgtactttactttaatgtgtaatactcaactcaaggtacaagacaattgcatttaacattgttataaataaaaggaacatcagatcaatcattaagggctccagagtgaacagcatcttcataacttccatgtttatcatctttactttctggatgtaatttaataagatcatcaattcgaagaatggtgattgcagcttctgttgcaaatttcaaactcttaactttaactatggttggttcaaacacccctgcttgtttgttgtctcgaggtttaccattgctcaaatcaagaccaatccattttagatttttacgttctgggttaacctgggcctcattatgaaaagctcttaattttgcaaccagatctgtggagtcctgggcagcattaactgctagtgtattgggaataacaagaagtgatcttgcaaactctgcaatcgcaagctgttcccgagaccccatgctggttgcatagttttcaaggtatatggaaagggctgcttctacagcacccccaccgggaaccacagattttgactccaaaactctcttcactacacaaagtgcatcatgtaaagagcgctccatctcatcacacatgaaatcatttgccccacgtaagataatcgatgcagacgtacgagccttagtatttttgattaagatcagctcatcatcacaaattctctcctgtaccacttcttctgcctgtcccaacattgcagcttcaaaagtttcttcaccttccaaattggccagggttgacagaatagt

SEQ ID NO: 381963 - DNA, 2697 bp, Homo sapiens
catatctctgcaaagtcttaatgtaggtttccaggatttaatgattctttcaatcaactttaaagttcttcaggaagattctccaggtccgtcaacagttttccccttcatgactttgtgacaaagctttcttgttccactatccaggtgttcccaacaagttgctgtaacggtggcccctcataagcttgcctggaaaccctagaaagctcagaaaaattatgaactttgcccagtaagaggctgggaagtcagaaagggttttaaacaaaactgaccccacttgttacatgctcctttcactgtccaaacgtcaaccaaaggaacttttgtgacgctaagacgctcccggcgtcctcacccgttcacagccagagttgatcttagaaggcagggggctcgcaccgagacgctcctagcaagcccctcacgcgagcgaatgactggcgccaggagaaacgcataggacctcccgaagccgccgagagcaaaaggacccatcagagctgtgctgagacccgctgcgggccgggctcgcactcgagattctcgcccgtgggattccagtcctgagctgaacgagagataagtctttgtcaccccccagtctttactgtttcgagaaaccctaagattttttaaaaaaaagcccaaaacgtcaagtcggggaactccaacattggggtgtccagaaacactggggtttcaggcgctctgtaaatgcgtccgaggtccgcggttctgcccgcaggcccagaccccggcctcacttccgccccgcgccccgcgccccggccctcaggtcccgcccgcggcaggcctgtgggctgcgaggaggagctttgcctagcttgcaggcagcgcagggcagacggcggcaggagaagcaagatgaatgcaggctcagatcctgtggtcatcgtctcggcggcgcggaccatcataggttccttcaatggtgccttagctgctgttcctgtccaggacctgggctccactgtcatcaaagaagtcttgaagagggccactgtggctccggaagatgtgtctgaggtcatctttggacatgtcttggcagcaggctgtgggcagaatcctgttagacaagccagtgtgggtgcaggaattccctactctgttccagcatggagctgccagatgatctgtgggtcaggcctaaaagctgtgtgccttgcagtccagtcaatagggataggagactccagcattgtggttgcaggaggcatggaaaatatgagcaaggctcctcacttggcttacttgagaacaggagtaaagataggtgagatgccactgactgacagtatactctgtgatggtcttacagatgcatttcacaactgtcatatgggtattacagctgaaaatgtagccaaaaaatggcaagtgagtagagaagatcaggacaaggttgcagttctgtcccagaacaggacagagaatgcacagaaagctggccattttgacaaagagattgtaccagttttggtgtcaactagaagaggtcttattgaagttaaaacagatgagtttcctcgccatgggagcaacatagaagccatgtccaagctaaagccttactttcttactgatggaacgggaacagtcaccccagccaatgcttcaggaataaatgatggtgctgcagctgtcgttcttatgaagaagtcagaagctgataaacgtgggcttacacctttagcacggatagtttcctggtcccaagtgggtgtggagccttccaatgtgtgttcagagagaatgaattgcttaaactttgaacaacctcaatttctttttaaactaataaagtactaggttgcaatatgtgaaatcagaggaccaaagtacagatggaaaccatttcctacatcacaaaaacccaagtttacagcttgtactttactttaatgtgtaatactcaactcaaggtacaagacaattgcatttaacattgttataaataaaaggaacatcagatcaatcattaagggctccagagtgaacagcatcttcataacttccatgtttatcatctttactttctggatgtaatttaataagatcatcaattcgaagaatggtgattgcagcttctgttgcaaatttcaaactcttaactttaactatggttggttcaaacacccctgcttgtttgttgtctcgaggtttaccattgctcaaatcaagaccaatccattttagatttttacgttctgggttaacctgggcctcattatgaaaagctcttaattttgcaaccagatctgtggagtcctgggcagcattaactgctagtgtattgggaataacaagaagtgatcttgcaaactctgcaatcgcaagctgttcccgagaccccatgctggttgcatagttttcaaggtatatggaaagggctgcttctacagcacccccaccgggaaccacagattttgactccaaaactctcttcactacacaaagtgcatcatgtaaagagcgctccatctcatcacacatgaaatcatttgccccacgtaagataatcgatgcagacgtacgagccttagtatttttgattaagatcagctcatcatcacaaattctctcctgtaccacttcttctgcctgtcccaacattgcagcttcaaaagtttcttcaccttccaaattggccagggttgacagaatagt

SEQ ID NO: 381964 - DNA, 2956 bp, Homo sapiens
catatctctgcaaagtcttaatgtaggtttccaggatttaatgattctttcaatcaactttaaagttcttcaggaagattctccaggtccgtcaacagttttccccttcatgactttgtgacaaagctttcttgttccactatccaggtgttcccaacaagttgctgtaacggtggcccctcataagcttgcctggaaaccctagaaagctcagaaaaattatgaactttgcccagtaagaggctgggaagtcagaaagggttttaaacaaaactgaccccacttgttacatgctcctttcactgtccaaacgtcaaccaaaggaacttttgtgacgctaagacgctcccggcgtcctcacccgttcacagccagagttgatcttagaaggcagggggctcgcaccgagacgctcctagcaagcccctcacgcgagcgaatgactggcgccaggagaaacgcataggacctcccgaagccgccgagagcaaaaggacccatcagagctgtgctgagacccgctgcgggccgggctcgcactcgagattctcgcccgtgggattccagtcctgagctgaacgagagataagtctttgtcaccccccagtctttactgtttcgagaaaccctaagattttttaaaaaaaagcccaaaacgtcaagtcggggaactccaacattggggtgtccagaaacactggggtttcaggcgctctgtaaatgcgtccgaggtccgcggttctgcccgcaggcccagaccccggcctcacttccgccccgcgccccgcgccccggccctcaggtcccgcccgcggcaggcctgtgggctgcgaggaggagctttgcctagcttgcaggcagcgcagggcagacggcggcaggagaagcaagatgaatgcaggctcagatcctgtggtcatcgtctcggcggcgcggaccatcataggttccttcaatggtgccttagctgctgttcctgtccaggacctgggctccactgtcatcaaagaagtcttgaagagggccactgtggctccggaagatgtgtctgaggtcatctttggacatgtcttggcagcaggctgtgggcagaatcctgttagacaagccagtgtgggtgcaggaattccctactctgttccagcatggagctgccagatgatctgtgggtcaggcctaaaagctgtgtgccttgcagtccagtcaatagggataggagactccagcattgtggttgcaggaggcatggaaaatatgagcaaggtgagatgccactgactgacagtatactctgtgatggtcttacagatgcatttcacaactgtcatatgggtattacagctgaaaatgtagccaaaaaatggcaagtgagtagagaagatcaggacaaggttgcagttctgtcccagaacaggacagagaatgcacagaaagctggccattttgacaaagagattgtaccagttttggtgtcaactagaagaggtcttattgaagttaaaacagatgagtttcctcgccatgggagcaacatagaagccatgtccaagctaaagccttactttcttactgatggaacgggaacagtcaccccagccaatgcttcaggaataaatgatggtgctgcagctgtcgttcttatgaagaagtcagaagctgataaacgtgggcttacacctttagcacggatagtttcctggtcccaagtgggtgtggagccttccattatgggaataggaccaattccagccataaagcaagctgttacaaaagcaggttggtcactggaagatgttgacatatttgaaatcaatgaagcctttgcagctgtctctgctgcaatagttaaagaacttggattaaacccagagaaggtcaatattgaaggaggggctatagccttgggccaccctcttggagcatctggctgtcgaattcttgtgaccctgttacacacactggagagaatgggcagaagtcgtggtgttgcagccctgtgcattgggggtgggatgggaatagcaatgtgtgttcagagagaatgaattgcttaaactttgaacaacctcaatttctttttaaactaataaagtactaggttgcaatatgtgaaatcagaggaccaaagtacagatggaaaccatttcctacatcacaaaaacccaagtttacagcttgtactttactttaatgtgtaatactcaactcaaggtacaagacaattgcatttaacattgttataaataaaaggaacatcagatcaatcattaagggctccagagtgaacagcatcttcataacttccatgtttatcatctttactttctggatgtaatttaataagatcatcaattcgaagaatggtgattgcagcttctgttgcaaatttcaaactcttaactttaactatggttggttcaaacacccctgcttgtttgttgtctcgaggtttaccattgctcaaatcaagaccaatccattttagatttttacgttctgggttaacctgggcctcattatgaaaagctcttaattttgcaaccagatctgtggagtcctgggcagcattaactgctagtgtattgggaataacaagaagtgatcttgcaaactctgcaatcgcaagctgttcccgagaccccatgctggttgcatagttttcaaggtatatggaaagggctgcttctacagcacccccaccgggaaccacagattttgactccaaaactctcttcactacacaaagtgcatcatgtaaagagcgctccatctcatcacacatgaaatcatttgccccacgtaagataatcgatgcagacgtacgagccttagtatttttgattaagatcagctcatcatcacaaattctctcctgtaccacttcttctgcctgtcccaacattgcagcttcaaaagtttcttcaccttccaaattggccagggttgacagaatagt

SEQ ID NO: 381965 - DNA, 2708 bp, Homo sapiens
catatctctgcaaagtcttaatgtaggtttccaggatttaatgattctttcaatcaactttaaagttcttcaggaagattctccaggtccgtcaacagttttccccttcatgactttgtgacaaagctttcttgttccactatccaggtgttcccaacaagttgctgtaacggtggcccctcataagcttgcctggaaaccctagaaagctcagaaaaattatgaactttgcccagtaagaggctgggaagtcagaaagggttttaaacaaaactgaccccacttgttacatgctcctttcactgtccaaacgtcaaccaaaggaacttttgtgacgctaagacgctcccggcgtcctcacccgttcacagccagagttgatcttagaaggcagggggctcgcaccgagacgctcctagcaagcccctcacgcgagcgaatgactggcgccaggagaaacgcataggacctcccgaagccgccgagagcaaaaggacccatcagagctgtgctgagacccgctgcgggccgggctcgcactcgagattctcgcccgtgggattccagtcctgagctgaacgagagataagtctttgtcaccccccagtctttactgtttcgagaaaccctaagattttttaaaaaaaagcccaaaacgtcaagtcggggaactccaacattggggtgtccagaaacactggggtttcaggcgctctgtaaatgcgtccgaggtccgcggttctgcccgcaggcccagaccccggcctcacttccgccccgcgccccgcgccccggccctcaggtcccgcccgcggcaggcctgtgggctgcgaggaggagctttgcctagcttgcaggcagcgcagggcagacggcggcaggagaagcaagatgaatgcaggctcagatcctgtggtcatcgtctcggcggcgcggaccatcataggttccttcaatggtgccttagctgctgttcctgtccaggacctgggctccactgtcatcaaagaagtcttgaagagggccactgtggctccggaagatgtgtctgaggctcctcacttggcttacttgagaacaggagtaaagatagctgaaaatgtagccaaaaaatggcaagtgagtagagaagatcaggacaaggttgcagttctgtcccagaacaggacagagaatgcacagaaagctggccattttgacaaagagattgtaccagttttggtgtcaactagaagaggtcttattgaagttaaaacagatgagtttcctcgccatgggagcaacatagaagccatgtccaagctaaagccttactttcttactgatggaacgggaacagtcaccccagccaatgcttcaggaataaatgatggtgctgcagctgtcgttcttatgaagaagtcagaagctgataaacgtgggcttacacctttagcacggatagtttcctggtcccaagtgggtgtggagccttccattatgggaataggaccaattccagccataaagcaagctgttacaaaagcaggttggtcactggaagatgttgacatatttgaaatcaatgaagcctttgcagctgtctctgctgcaatagttaaagaacttggattaaacccagagaaggtcaatattgaaggaggggctatagccttgggccaccctcttggagcatctggctgtcgaattcttgtgaccctgttacacacactggagagaatgggcagaagtcgtggtgttgcagccctgtgcattgggggtgggatgggaatagcaatgtgtgttcagagagaatgaattgcttaaactttgaacaacctcaatttctttttaaactaataaagtactaggttgcaatatgtgaaatcagaggaccaaagtacagatggaaaccatttcctacatcacaaaaacccaagtttacagcttgtactttactttaatgtgtaatactcaactcaaggtacaagacaattgcatttaacattgttataaataaaaggaacatcagatcaatcattaagggctccagagtgaacagcatcttcataacttccatgtttatcatctttactttctggatgtaatttaataagatcatcaattcgaagaatggtgattgcagcttctgttgcaaatttcaaactcttaactttaactatggttggttcaaacacccctgcttgtttgttgtctcgaggtttaccattgctcaaatcaagaccaatccattttagatttttacgttctgggttaacctgggcctcattatgaaaagctcttaattttgcaaccagatctgtggagtcctgggcagcattaactgctagtgtattgggaataacaagaagtgatcttgcaaactctgcaatcgcaagctgttcccgagaccccatgctggttgcatagttttcaaggtatatggaaagggctgcttctacagcacccccaccgggaaccacagattttgactccaaaactctcttcactacacaaagtgcatcatgtaaagagcgctccatctcatcacacatgaaatcatttgccccacgtaagataatcgatgcagacgtacgagccttagtatttttgattaagatcagctcatcatcacaaattctctcctgtaccacttcttctgcctgtcccaacattgcagcttcaaaagtttcttcaccttccaaattggccagggttgacagaatagt

SEQ ID NO: 381966 - DNA, 2040 bp, Homo sapiens
gcactggctcatggttgttaggaggcaccagctgacctgtttcctgtataggctcaacctcctcagaagtggacacccattacttctcgctgtttctgtgtgatctccatttcacatttctaaagggtggatcttttggggtcactcgctattttctaatacagaatgctcccgtcaagctcccttattgataactgatatctcttatgtcctgccagcagtgcacgattggctttgagactgcctgatccactcactcgtaaccagccaagtactatgacccaaactatagcagaatttggcacaaacaggtccctggtagctactttcctcaggaaggcctatggatttggaaaacacaggtgtctcataaggacatactcataaattgttttcatgtacaataattcttgtgtgtactttcctcctgttgtcatcaaagtggtcacatattaaaacttttctgctaaatatgaatcctcatgtttaatggcagagaacccaccattcccagcacacttacttctgtctctggactaatcttgagtaattggttttcctttgcttaggtcttattgaagttaaaacagatgagtttcctcgccatgggagcaacatagaagccatgtccaagctaaagccttactttcttactgatggaacgggaacagtcaccccagccaatgcttcaggaataaatgatggtgctgcagctgtcgttcttatgaagaagtcagaagctgataaacgtgggcttacacctttagcacggatagtttcctggtcccaagtgggtgtggagccttccattatgggaataggaccaattccagccataaagcaagctgttacaaaagcaggttggtcactggaagatgttgacatatttgaaatcaatgaagcctttgcagctgtctctgctgcaatagttaaagaacttggattaaacccagagaaggtcaatattgaaggaggggctatagccttgggccaccctcttggagcatctggctgtcgaattcttgtgaccctgttacacacactggagagaatgggcagaagtcgtggtgttgcagccctgtgcattgggggtgggatgggaatagcaatgtgtgttcagagagaatgaattgcttaaactttgaacaacctcaatttctttttaaactaataaagtactaggttgcaatatgtgaaatcagaggaccaaagtacagatggaaaccatttcctacatcacaaaaacccaagtttacagcttgtactttactttaatgtgtaatactcaactcaaggtacaagacaattgcatttaacattgttataaataaaaggaacatcagatcaatcattaagggctccagagtgaacagcatcttcataacttccatgtttatcatctttactttctggatgtaatttaataagatcatcaattcgaagaatggtgattgcagcttctgttgcaaatttcaaactcttaactttaactatggttggttcaaacacccctgcttgtttgttgtctcgaggtttaccattgctcaaatcaagaccaatccattttagatttttacgttctgggttaacctgggcctcattatgaaaagctcttaattttgcaaccagatctgtggagtcctgggcagcattaactgctagtgtattgggaataacaagaagtgatcttgcaaactctgcaatcgcaagctgttcccgagaccccatgctggttgcatagttttcaaggtatatggaaagggctgcttctacagcacccccaccgggaaccacagattttgactccaaaactctcttcactacacaaagtgcatcatgtaaagagcgctccatctcatcacacatgaaatcatttgccccacgtaagataatcgatgcagacgtacgagccttagtatttttgattaagatcagctcatcatcacaaattctctcctgtaccacttcttctgcctgtcccaacattgcagcttcaaaagtttcttcaccttccaaattggccagggttgacagaatagt

SEQ ID NO: 381967 - DNA, 1172 bp, Homo sapiens
tggcccgggaagtctcgcgatgccgtagccggctgctcccgctgcgggtggctcgggctgttgctgtggtttcctgagttgctgctgctgcggcggcggcagcggcgtctgtgcttgtggaggtgtcggcctctgggcggatgttgacattgtgttgttgttattgctgatggtaatggcggcggcggtggcggcgacggtccagaccccatcccctctgtagccggagccgagacagccgacagcgaactccgcggcctcggagccggcggcagcggcgactcccctcagcctccgccgcctcgcccgccggtaccccggcgccaaccccgggagtcaggccctttgggcaggggagctcggaggctcaggatggcggatttcgacgaaatctatgaggaagaggaggacgaggagcgggccctggaggagcagctgctcaagtactcgccggacccggtggtcgtccgcggctccggtcacgtcaccgtatttggactgagcaacaaatttgaatctgaattcccttcttcattaactggaaaagtagctcctgaagaatttaaagccagcatcaacagagttaacagttgtcttaagaagaaccttcctgttaatgtacgttggctactttgtggctgcctttgttgctgctgcacattaggttgcagtatgtggccagttatttgcctcagtaaaagaacacgaagatcgattgagaagttattagaatgggaaaacaataggttataccacaagctgtgcttgcattggagactgagcaaaaggaaatgtgaaacgaataacatgatggaatatgtcatcctcatagaatttttaccaaagacaccgatttttcgaccagattagcatttactttatttatagagactttccaagtatgttgtctttccaatggtgccttgcttggtgctctcctggtggtgacataacattggttctacagaatcgtgtggtgttttttttgtttttgttttttttttttttttaaataaccgcatgttctaagtgtgcatttttgtcaatctttgcaacagttatttcatacagatgtttaatacttaagttattgtgctcttttctgttatgtattctgattttcaaggattacttttttgtattatcaaaaaaatacatttgaacttagcata

SEQ ID NO: 381968 - DNA, 2602 bp, Homo sapiens
tggcccgggaagtctcgcgatgccgtagccggctgctcccgctgcgggtggctcgggctgttgctgtggtttcctgagttgctgctgctgcggcggcggcagcggcgtctgtgcttgtggaggtgtcggcctctgggcggatgttgacattgtgttgttgttattgctgatggtaatggcggcggcggtggcggcgacggtccagaccccatcccctctgtagccggagccgagacagccgacagcgaactccgcggcctcggagccggcggcagcggcgactcccctcagcctccgccgcctcgcccgccggtaccccggcgccaaccccgggagtcaggccctttgggcaggggagctcggaggctcaggatggcggatttcgacgaaatctatgaggaagaggaggacgaggagcgggccctggaggagcagctgctcaagtactcgccggacccggtggtcgtccgcggctccggtcacgtcaccgtatttggactgagcaacaaatttgaatctgaattcccttcttcattaactggaaaagtagctcctgaagaatttaaagccagcatcaacagagttaacagttgtcttaagaagaaccttcctgttaatgtacgttggctactttgtggctgcctttgttgctgctgcacattaggttgcagtatgtggccagttatttgcctcagtaaaagaacacgaagatcgattgagaagttattagaatgggaaaacaataggttataccacaagctgtgcttgcattggagactgagcaaaaggaaatgtgaaacgaataacatgatggaatatgtcatcctcatagaatttttaccaaagacaccgatttttcgaccagattagcatttactttatttatagagactttccaagtatgttgtctttccaatggtgccttgcttggtgctctcctggtggtgacataacattggttctacagaatcgtgtggtgttttttttgtttttgttttttttttttttttaaataaccgcatgttctaagtgtgcatttttgtcaatctttgcaacagttatttcatacagatgtttaatacttaagttattgtgctcttttctgttatgtattctgattttcaaggattacttttttgtattatcaaaaaaatacatttgaacttagcataaaaagtggccagccttttttattttgtcaccaaggtacacacagtcctttatttataaattccttaacagagaaaaacacctttgtaaggctcaacttacctattccagcaagcacactttttctgtcattttttctttcttttcaaatttgatattgtcattattttaaaatagtaagttttctttaatagtcttttgggacctaacataccctttctcatacaattcctaatgctctgtttatggcagataatctgtaatgttatgaagacctatcaaaaagttttaaaagtatttctgtcttcaaaggtagtaagacaggattaaatttttattagaatagacaaatcagtgaatggtatgcatgtatctagtggttactagaactcaggatcacacaatatagtagcatcacgatctgtgtatatttttgatcaagatgataataatggccttacttgggtttttatcgtttatcaaatcttacatacaaaagagtggaagtattcctttacaaaatttctaaggaaaatatttcttccaatctatcacaattatagaatggatatatgtttctgaaaagtttttgaaagaaagcaaaagttctagaactaaaagtaagctggtatttaatatcccgttgatatttagaaaagattgttaataagaaatggaggatgcatttagtactatttttatccactagttcactttcagtacagttatgtatacttgttttgattgagagtgtgacatacatgttaaatcagattagcttgtttcttttaaatatacatatacacaaatacatataattttttctcctttttgttgtgcatatctctatgcatttttaaacttttagatttgtgaatgacctatgtgtaaatttttgtttttataaaccagaaattatacaagttttaatgtgtgtcaagaacttgttccatacaactgtggtatcgagcaataatgttaataacttttggaattatataaactatgcttaataatttgtattgagaattggtaccactatacaatacttttttcctgtattaaatcttttaaataccagtttcattaatttatatacctgtatttttaaaagtatttctttgtacttgccaaagtactgtaatcctatataaatttgaatagtcaaatgccagtatctcatgtcctatatcctgtcttggatattaggagctatcttaaaaactaggatttaagatttttttttgcttgagaattatatgttttccttgccccccaagtaacaacttgaatttgtagaacacttttcctgtgaagagttcaaagtacaaagaactcaaatacttattttatttaacttgtatctagggtgtgtcctaccaccttaaagtagtgcaattaaaaataatgccatctagaaacttcagtattc

SEQ ID NO: 381969 - DNA, 1376 bp, Homo sapiens
tggcccgggaagtctcgcgatgccgtagccggctgctcccgctgcgggtggctcgggctgttgctgtggtttcctgagttgctgctgctgcggcggcggcagcggcgtctgtgcttgtggaggtgtcggcctctgggcggatgttgacattgtgttgttgttattgctgatggtaatggcggcggcggtggcggcgacggtccagaccccatcccctctgtagccggagccgagacagccgacagcgaactccgcggcctcggagccggcggcagcggcgactcccctcagcctccgccgcctcgcccgccggtaccccggcgccaaccccgggagtcaggccctttgggcaggggagctcggaggctcaggatggcggatttcgacgaaatctatgaggaagaggaggacgaggagcgggccctggaggagcagctgctcaagtactcgccggacccggtggtcgtccgcggctccggtcacgtcaccgtatttggactgagcaacaaatttgaatctgaattcccttcttcattaactggaaaagtagctcctgaagaatttaaagccagcatcaacagagttaacagttgtcttaagaagaaccttcctgttaatgtacgttggctactttgtggctgcctttgttgctgctgcacattaggttgcagtatgtggccagttatttgcctcagtaaaagagtaagttgaattatatattttaatttaaatttagaagtggacaagcaagtcttgcatttatctagtttttattttttgtattgaatgaatcacactatcctgaataaaatatgaaaataatctgatccaggagaggagtgagtcagtaaagttactatatatccaagtgctgttattaaatagccatctaaaaattatatttataattttagaagcaaggagtagtgtatggcattgtctgtatctgtacattgacggtggtgtggtatagtgatcaaggatgctggcttcagctctaccacttttctctgtgaccttaggcacgtttcctaacctctttaaaccctacttgacacaactgtaaaatgttcacctactacttgaatataaaggtaaaatgaaaatgtttggaaaactcttagctgaatatctcaaaggaagtggttaataagtattaattaatagtattcttactgactgtaagatggtacccatacaagaaataaaatggttacaatggttgtttcttgttggtaagattatgggacattcttttctgctttttatattttacaagtttcctgtagtgagcacaaagtgattctgtaatcagaaaaaataatttcaaagactcattattttgactgcttataataaaaaattctggccaggca

SEQ ID NO: 381970 - DNA, 2055 bp, Homo sapiens
gttccagaggatccccgtcgtccagcatcaacagagttaacagttgtcttaagaagaaccttcctgttaatgtacgttggctactttgtggctgcctttgttgctgctgcacattaggttgcagtatgtggccagttatttgcctcagtaaaagaacacgaagatcgattgagaagttattagaatgggaaaacaataggttataccacaagctgtgcttgcattggagactgagcaaaaggaaatgtgaaacgaataacatgatggaatatgtcatcctcatagaatttttaccaaagacaccgatttttcgaccagattagcatttactttatttatagagactttccaagtatgttgtctttccaatggtgccttgcttggtgctctcctggtggtgacataacattggttctacagaatcgtgtggtgttttttttgtttttgttttttttttttttttaaataaccgcatgttctaagtgtgcatttttgtcaatctttgcaacagttatttcatacagatgtttaatacttaagttattgtgctcttttctgttatgtattctgattttcaaggattacttttttgtattatcaaaaaaatacatttgaacttagcataaaaagtggccagccttttttattttgtcaccaaggtacacacagtcctttatttataaattccttaacagagaaaaacacctttgtaaggctcaacttacctattccagcaagcacactttttctgtcattttttctttcttttcaaatttgatattgtcattattttaaaatagtaagttttctttaatagtcttttgggacctaacataccctttctcatacaattcctaatgctctgtttatggcagataatctgtaatgttatgaagacctatcaaaaagttttaaaagtatttctgtcttcaaaggtagtaagacaggattaaatttttattagaatagacaaatcagtgaatggtatgcatgtatctagtggttactagaactcaggatcacacaatatagtagcatcacgatctgtgtatatttttgatcaagatgataataatggccttacttgggtttttatcgtttatcaaatcttacatacaaaagagtggaagtattcctttacaaaatttctaaggaaaatatttcttccaatctatcacaattatagaatggatatatgtttctgaaaagtttttgaaagaaagcaaaagttctagaactaaaagtaagctggtatttaatatcccgttgatatttagaaaagattgttaataagaaatggaggatgcatttagtactatttttatccactagttcactttcagtacagttatgtatacttgttttgattgagagtgtgacatacatgttaaatcagattagcttgtttcttttaaatatacatatacacaaatacatataattttttctcctttttgttgtgcatatctctatgcatttttaaacttttagatttgtgaatgacctatgtgtaaatttttgtttttataaaccagaaattatacaagttttaatgtgtgtcaagaacttgttccatacaactgtggtatcgagcaataatgttaataacttttggaattatataaactatgcttaataatttgtattgagaattggtaccactatacaatacttttttcctgtattaaatcttttaaataccagtttcattaatttatatacctgtatttttaaaagtatttctttgtacttgccaaagtactgtaatcctatataaatttgaatagtcaaatgccagtatctcatgtcctatatcctgtcttggatattaggagctatcttaaaaactaggatttaagatttttttttgcttgagaattatatgttttccttgccccccaagtaacaacttgaatttgtagaacacttttcctgtgaagagttcaaagtacaaagaactcaaatacttattttatttaacttgtatctagggtgtgtcctaccaccttaaagtagtgcaattaaaaataatgccatctagaaacttcagtattc

SEQ ID NO: 381971 - DNA, 2518 bp, Homo sapiens
tggcccgggaagtctcgcgatgccgtagccggctgctcccgctgcgggtggctcgggctgttgctgtggtttcctgagttgctgctgctgcggcggcggcagcggcgtctgtgcttgtggaggtgtcggcctctgggcggatgttgacattgtgttgttgttattgctgatggtaatggcggcggcggtggcggcgacggtccagaccccatcccctctgtagccggagccgagacagccgacagcgaactccgcggcctcggagccggcggcagcggcgactcccctcagcctccgccgcctcgcccgccggtaccccggcgccaaccccgggagtcaggccctttgggcaggggagctcggaggctcaggatggcggatttcgacgaaatctatgaggaagaggaggacgaggagcgggccctggaggagcagctgctcaagtactcgccggacccggtggtcgtccgcggctccggtcacgtcaccgtatttggactgagcaacaaatttgaatctgaattcccttcttcattaactggaaaagtagctcctgaagaatttaaagccagcatcaacagagttaacagttgtcttaagaagaaccttcctgttaatacacgaagatcgattgagaagttattagaatgggaaaacaataggttataccacaagctgtgcttgcattggagactgagcaaaaggaaatgtgaaacgaataacatgatggaatatgtcatcctcatagaatttttaccaaagacaccgatttttcgaccagattagcatttactttatttatagagactttccaagtatgttgtctttccaatggtgccttgcttggtgctctcctggtggtgacataacattggttctacagaatcgtgtggtgttttttttgtttttgttttttttttttttttaaataaccgcatgttctaagtgtgcatttttgtcaatctttgcaacagttatttcatacagatgtttaatacttaagttattgtgctcttttctgttatgtattctgattttcaaggattacttttttgtattatcaaaaaaatacatttgaacttagcataaaaagtggccagccttttttattttgtcaccaaggtacacacagtcctttatttataaattccttaacagagaaaaacacctttgtaaggctcaacttacctattccagcaagcacactttttctgtcattttttctttcttttcaaatttgatattgtcattattttaaaatagtaagttttctttaatagtcttttgggacctaacataccctttctcatacaattcctaatgctctgtttatggcagataatctgtaatgttatgaagacctatcaaaaagttttaaaagtatttctgtcttcaaaggtagtaagacaggattaaatttttattagaatagacaaatcagtgaatggtatgcatgtatctagtggttactagaactcaggatcacacaatatagtagcatcacgatctgtgtatatttttgatcaagatgataataatggccttacttgggtttttatcgtttatcaaatcttacatacaaaagagtggaagtattcctttacaaaatttctaaggaaaatatttcttccaatctatcacaattatagaatggatatatgtttctgaaaagtttttgaaagaaagcaaaagttctagaactaaaagtaagctggtatttaatatcccgttgatatttagaaaagattgttaataagaaatggaggatgcatttagtactatttttatccactagttcactttcagtacagttatgtatacttgttttgattgagagtgtgacatacatgttaaatcagattagcttgtttcttttaaatatacatatacacaaatacatataattttttctcctttttgttgtgcatatctctatgcatttttaaacttttagatttgtgaatgacctatgtgtaaatttttgtttttataaaccagaaattatacaagttttaatgtgtgtcaagaacttgttccatacaactgtggtatcgagcaataatgttaataacttttggaattatataaactatgcttaataatttgtattgagaattggtaccactatacaatacttttttcctgtattaaatcttttaaataccagtttcattaatttatatacctgtatttttaaaagtatttctttgtacttgccaaagtactgtaatcctatataaatttgaatagtcaaatgccagtatctcatgtcctatatcctgtcttggatattaggagctatcttaaaaactaggatttaagatttttttttgcttgagaattatatgttttccttgccccccaagtaacaacttgaatttgtagaacacttttcctgtgaagagttcaaagtacaaagaactcaaatacttattttatttaacttgtatctagggtgtgtcctaccaccttaaagtagtgcaattaaaaataatgccatctagaaacttcagtattc

SEQ ID NO: 381972 - DNA, 1032 bp, Homo sapiens
agaagggctggaataagttctcaaagtttcctggagtcaacttctggtgctagacattcaaaaaaacctagactttgtcaaatggactggtcctggcagattcatagccacaggcagccttatatgcactccacccttccacagtcagtattcagaagcttggtctgactatttctcatcttaaatggattctaattgatctctggagtcatttttaagtccaacttaaagaggtggttgtcagggctggcatttattcctcttgaggtagttactataataaatagcttccacttcctttgaggagtacagacattgtatacaaaaacatgatactgaatcaactcagctttaactcagaagtgccactggtggtgaagtgcatgcacttatacttatcttaccatcaatgctgtacaggtccagggtaccacccatgctcctgtcccagggaggaaccaggtacaggatgaaggcaatccggcgcccttccagctcatcatcatggcacagcagggcatctgcaatagtttaatggacaccttagatccctgcagatagtgaccagctgacacctgactctgcatttaatatcagtccgtttgacattcaactgtaatgtcagctccagctttaaatgtcctccagctttaaaatgacacttatttctcctcttttataagtaaacaaataagtcaatatagaaaactctaaaaataaagagcacataattagatagatccagatataatcgctaacaatatttttacatatcatcttccagtatttttcctacatatatgtatttactttaaaaaaaatagcatccgacagtgtctatttgtggcctgctttttaaattacatggcaagtatctttccctatcaatatacacacttggtatcacttttaatggctgtagttattctactatatggattatgaacttacctccttccacccttaatagattttctatttgttaattaagttgtttctatttcttggctactataaagactaatttaatga

SEQ ID NO: 381973 - DNA, 2741 bp, Homo sapiens
tgtcaagtatgcagggtgcagcttggatgtggtgctagaaggggaagcctctgggctgagcatgtaggctcgtcagtagagttcaacccgcaggagtaaattactgcagtgagaaacaaccgcacccgcggcccagcaggggttccactgcgcagccgcaaaaggcgccgaggctccaccgcgcagccacagaaggcgccgaggctccaccgcgcagccgcaaaaagagcggacgggtctgcgccgccgcaggaggagcaggcggtacctggacgggttcgtcccgggctgtttcgcgtccggcctgaggcggctggggccgcgcaggtagtgtccctgcacttcttgcccgggcgcgtgaggccagctccgctgcgcttgtctccagcttccagccctcctcccctaagccgccgccatcatgctgctgcctgtgttcaccctgaaactgcgccacaaaatcagcccccgaatggtggccatagggcgctacgacgggactcacccgtgcctggcggccgccacccaaacgggcaaggtttttattcataatcctcatacacggaaccagcatgtcagtgcatccagggtcttccagagccccctggaatctgatgtttctcttctcaacattaaccaggcagtcagctgtctgactgcaggcgtattgaaccctgagcttggctatgatgcccttttagtggggacacagactaatcttttggcttatgatgtctacaataattcggatttgttctacagagaggtagcagatggggcaaatgcaattgtgctggggacattgggagacatttcttcccctcttgcgattattggtggcaattgtgctctgcaaggtttcaatcatgaaggaagtgatctcttttggacggttactggagacaatgttaattccttggccttgtgtgactttgatggtgatggaaagaaagagcttcttgttggatctgaggattttgatatccgagtttttaaggaagatgagattgtggcagaaatgacagaaacagagatagtcacctctctttgtcccatgtatggcagtcgatttggttatgccctttccaatggcacagttggagtttatgacaaaacatcccgatactggagaattaaatcgaaaaatcatgccatgagcattcatgcttttgaccttaattctgatggagtgaatgaactgataactggttggtccaatgggaaggttgatgctcgaagtgaccgaactggggaggtcatctttaaggacaatttttcttctgcaattgccggtgtggtagagggagattaccggatggatggccacatacagttaatctgctgctcagtggatggggaaatccggggctacctgcctggcacggctgagatgaggggcaacctcatggacaccagtgcagagcaggacctgatccgagagctgagtcagaagaagcagaatctgttgctggaactccgtaactatgaggaaaatgccaaggctgaattggccagtccactgaacgaggctgatgggcatcggggcataatcccagccaataccaggctccacaccacgctctcagtcagcctggggaatgagacccaaactgctcatacagaattacgcatttccacttctaatgacaccatcatccgagcagtattgatttttgcagaaggaatttttacaggtgaaagccacgtggtacatcccagcattcacaacctctccagttccatctgcatccctattgtgcctcccaaagatgtccctgtggatctgcacttgaaggcattcgtgggttacagaagcagcacccagtttcatgtatttgaatcgacaagacagctccctcgattctccatgtatgcgctgaccagcctggaccctgccagtgagccaatcagttatgttaactttaccattgcagaacgggcacagagggttgttgtatggctcggtcagaactttctgttaccagaagacactcacattcagaatgctccatttcaagtgtgtttcacatctttacggaatggcggccacctgcatataaaaataaaacttagtggagagatcactataaatactgatgatattgatttggctggtgatatcatccagtcaatggcatcattttttgctattgaagaccttcaagtagaagcggattttcctgtctattttgaggaattacgaaaggtgctagttaaggtggatgaatatcattcagtgcatcagaagctcagtgctgatatggctgatcattctaatttgatccgaagtttgctggtcggagctgaggatgctcgtctgatgagggacatgaaaacaatgaagagtcgttatatggaactctatgaccttaatagagacttgctaaatggatataaaattcgctgtaacaatcacacagagctgttgggaaacctcaaagcagtaaatcaagcaattcaaagagcaggtcgtctgcgggttggaaaaccaaagaaccaggtgatcactgcttgtcgggatgcaattcgaagcaataacatcaacacactgttcaaaatcatgcgagtggggacagcttcttcctaggtgaggaaaatacaggtcatgaagttcctggcaaagattttctgttaaaaacctatgctggtttgctttggatcacaccctggtgaaccccgggtgctaagaatgaaaataaccttggtgagttgtacaaattaaagacaaagaactacatgtg

SEQ ID NO: 381974 - DNA, 765 bp, Homo sapiens
  misc_feature (728)..(729): n is a, c, g, or t
tacctttcacactccagagctggcaccagtcacttatgtttcagtcagtcggcctagtgtttggcttttgtctccggacttcaaagggagagaaaaccttcagctccttttcttagaccttcctgcatcctctaaagaaaaacctactatatataacccaaaggaaatatataaacatatatatataaataaaaccatcaaggcccaattagcaaaaaagagactgaaaattaatgctaagtgtctaacttaaaaatttagaaaagaacaataggataaacccaaggaagcagaaatacagccagagatttatacctgaattctgctgttttgggtcgatgctttgacttctttagaaataatctttgctaggtgactatgagctttgatccttttctgtaaaactgactgttggtttctaggtttgagacagtctctaagtcagttttttcaataattccctcaccaagttattttttttagggaatggtaagataaatcatatttcaagtataactcttttccctcctggttttatgttgttttaaaactgacgtctaattttataatttcatgtctaacaatcttttggttcctgatgtttcttcttatgcagttggaaaaccaaagaaccaggtgatcactgcttgtcgggatgcaattcgaagcaataacatcaacacactgttcaaaatcatgcgagtggggacagcttcttcctagggccnnccccgttccttctctatgcccactctcatcactctc

SEQ ID NO: 381975 - DNA, 816 bp, Homo sapiens
tgctccattccacatgtccatgctccaaggcctcacagactttcgtgaatttctcaggcttaagaaactccttcaggagaatttcagaactttcttcaaactcttcttgaatttgaacttggtaatccatgtccagataagtagggttgatccaatcatacaaaatctcatgatcttgtgggatgtgagggctccgaggtatggggggttcaaagtagttgggaggccgagtcaatgatggaccatgaaaccagccacttatagacaaacgtgacttttcttcagacagcacttcagacacctggtgaaaggacacaggagatacttcaaagaaaaccagtttgttccacgaagggataagagacttgacaatctgcttcggctgaaagtgttcatcaatgctgtacaggtccagggtaccacccatgctcctgtcccagggaggaaccaggtacaggatgaaggcaatccggcgcccttccagctcatcatcatggcacagcagggcatcagtgaattcatatttagcacaggacatgtcaatggttgattccaggtcaattttagaaatatcagaaagccaggaccggaaatcttcaaacagaattttccttaaagtggagatgtgaggctctcttctcttcttcaaatcatcagattctcatggaagtccaagttcatcagttccttctgaagcccttctaagaagtcttggctttggatgaagtttgggatcacacagtgaagaaaagggtccatgtccatgacaatgacttgagggtactgcaactcccggcatgtcccctttatcgtgtt

SEQ ID NO: 381976 - DNA, 656 bp, Homo sapiens
ttgtgtttcattgattggccatagcacccagtttcatgtatttgaatcgacaagacagctccctcgattctccatgtatgcgctgaccagcctggaccctgccagtgagccaatcagttatgttaactttaccattgcagaacgggcacagagggttgttgtatggctcggtcagaactttctgttaccagaagacactcacattcagaatgctccatttcaagtgtgtttcacatctttacggaatggcggccacctgcatataaaaataaaacttagtggagagatcactataaatactgatgatattgatttggctggtgatatcatccagtcaatggcatcattttttgctattgaagaccttcaagtagaagcggattttcctgtctattttgaggaattacgaaaggtgctagttaaggtggatgaatatcattcagtgcatcagaagctcagtgctgatatggctgatcattctaatttgatccgaagtttgctggtcggagctgaggatgctcgtctgatgagggacattgaaaacaaattgaaaaagtcgttctttgggaacctcttacggccctaaataagaaactctggctcaaatgcataataaaaatccccgtgtgaacaaacccacgcagaatcgtgtggtg

SEQ ID NO: 381977 - DNA, 3007 bp, Homo sapiens
tgtcaagtatgcagggtgcagcttggatgtggtgctagaaggggaagcctctgggctgagcatgtaggctcgtcagtagagttcaacccgcaggagtaaattactgcagtgagaaacaaccgcacccgcggcccagcaggggttccactgcgcagccgcaaaaggcgccgaggctccaccgcgcagccacagaaggcgccgaggctccaccgcgcagccgcaaaaagagcggacgggtctgcgccgccgcaggaggagcaggcggtacctggacgggttcgtcccgggctgtttcgcgtccggcctgaggcggctggggccgcgcaggtagtgtccctgcacttcttgcccgggcgcgtgaggccagctccgctgcgcttgtctccagcttccagccctcctcccctaagccgccgccatcatgctgctgcctgtgttcaccctgaaactgcgccacaaaatcagcccccgaatggtggccatagggcgctacgacgggactcacccgtgcctggcggccgccacccaaacgggcaaggtttttattcataatcctcatacacggaaccagcatgtcagtgcatccagggtcttccagagccccctggaatctgatgtttctcttctcaacattaaccaggcagtcagctgtctgactgcaggcgtattgaaccctgagcttggctatgatgcccttttagtggggacacagactaatcttttggcttatgatgtctacaataattcggatttgttctacagagaggtagcagatggggcaaatgcaattgtgctggggacattgggagacatttcttcccctcttgcgattattggtggcaattgtgctctgcaaggtttcaatcatgaaggaagtgatctcttttggacggttactggagacaatgttaattccttggccttgtgtgactttgatggtgatggaaagaaagagcttcttgttggatctgaggattttgatatccgagtttttaaggaagatgagattgtggcagaaatgacagaaacagagatagtcacctctctttgtcccatgtatggcagtcgatttggttatgccctttccaatggcacagttggagtttatgacaaaacatcccgatactggagaattaaatcgaaaaatcatgccatgagcattcatgcttttgaccttaattctgatggagtgaatgaactgataactggttggtccaatgggaaggttgatgctcgaagtgaccgaactggggaggtcatctttaaggacaatttttcttctgcaattgccggtgtggtagagggagattaccggatggatggccacatacagttaatctgctgctcagtggatggggaaatccggggctacctgcctggcacggctgagatgaggggcaacctcatggacaccagtgcagagcaggacctgatccgagagctgagtcagaagaagcagaatctgttgctggaactccgtaactatgaggaaaatgccaaggctgaattggccagtccactgaacgaggctgatgggcatcggggcataatcccagccaataccaggctccacaccacgctctcagtcagcctggggaatgagacccaaactgctcatacagaattacgcatttccacttctaatgacaccatcatccgagcagtattgatttttgcagaaggaatttttacaggtgaaagccacgtggtacatcccagcattcacaacctctccagttccatctgcatccctattgtgcctcccaaagatgtccctgtggatctgcacttgaaggcattcgtgggttacagaagcagcacccagtttcatgtatttgaatcgacaagacagctccctcgattctccatgtatgcgctgaccagcctggaccctgccagtgagccaatcagttatgttaactttaccattgcagaacgggcacagagggttgttgtatggctcggtcagaactttctgttaccagaagacactcacattcagaatgctccatttcaagtgtgtttcacatctttacggaatggcggccacctgcatataaaaataaaacttagtggagagatcactataaatactgatgatattgatttggctggtgatatcatccagtcaatggcatcattttttgctattgaagaccttcaagtagaagcggattttcctgtctattttgaggaattacgaaaggtgctagttaaggtggatgaatatcattcagtgcatcagaagctcagtgctgatatggctgatcattctaatttgatccgaagtttgctggtcggagctgaggatgctcgtctgatgagggacatgaaaacaatgaagagtcgttatatggaactctatgaccttaatagagacttgctaaatggatataaaattcgctgtaacaatcacacagagctgttgggaaacctcaaagcagtaaatcaagcaattcaaagagcaggtcgtctgcgggttggaaaaccaaagaaccaggtgatcactgcttgtcgggatgcaattcgaagcaataacatcaacacactgttcaaaatcatgcgagtggggacagcttcttcctaggtgaggaaaatacaggtcatgaagttcctggcaaagattttctgttaaaaacctatgctggtttgctttggatcacaccctggtgaaccccgggtgctaagaatgaaaataaccttggtgagttgtacaaattaaagacaaagaactacatgtgaagatagacttgctttctatttttaaatcagtagtagtactgttgctgaataatactaggtttttatggaataggatgaatgcttttgaagtattagggcttcagagtccaattttgcttatttatggtatataaatacatatttttttcttgaaattgcaattgagtttgtacttttcaaatagattatctactttttcattaaaatgtaaagatgttaaactttgtgttgattgattataaaatcaccaccaaatcagaattgc

SEQ ID NO: 381978 - DNA, 3288 bp, Homo sapiens
tgtcaagtatgcagggtgcagcttggatgtggtgctagaaggggaagcctctgggctgagcatgtaggctcgtcagtagagttcaacccgcaggagtaaattactgcagtgagaaacaaccgcacccgcggcccagcaggggttccactgcgcagccgcaaaaggcgccgaggctccaccgcgcagccacagaaggcgccgaggctccaccgcgcagccgcaaaaagagcggacgggtctgcgccgccgcaggaggagcaggcggtacctggacgggttcgtcccgggctgtttcgcgtccggcctgaggcggctggggccgcgcaggtagtgtccctgcacttcttgcccgggcgcgtgaggccagctccgctgcgcttgtctccagcttccagccctcctcccctaagccgccgccatcatgctgctgcctgtgttcaccctgaaactgcgccacaaaatcagcccccgaatggtggccatagggcgctacgacgggactcacccgtgcctggcggccgccacccaaacgggcaaggtttttattcataatcctcatacacggaaccagcatgtcagtgcatccagggtcttccagagccccctggaatctgatgtttctcttctcaacattaaccaggcagtcagctgtctgactgcaggcgtattgaaccctgagcttggctatgatgcccttttagtggggacacagactaatcttttggcttatgatgtctacaataattcggatttgttctacagagaggtagcagatggggcaaatgcaattgtgctggggacattgggagacatttcttcccctcttgcgattattggtggcaattgtgctctgcaaggtttcaatcatgaaggaagtgatctcttttggacggttactggagacaatgttaattccttggccttgtgtgactttgatggtgatggaaagaaagagcttcttgttggatctgaggattttgatatccgagtttttaaggaagatgagattgtggcagaaatgacagaaacagagatagtcacctctctttgtcccatgtatggcagtcgatttggttatgccctttccaatggcacagttggagtttatgacaaaacatcccgatactggagaattaaatcgaaaaatcatgccatgagcattcatgcttttgaccttaattctgatggagtgaatgaactgataactggttggtccaatgggaaggttgatgctcgaagtgaccgaactggggaggtcatctttaaggacaatttttcttctgcaattgccggtgtggtagagggagattaccggatggatggccacatacagttaatctgctgctcagtggatggggaaatccggggctacctgcctggcacggctgagatgaggggcaacctcatggacaccagtgcagagcaggacctgatccgagagctgagtcagaagaagcagaatctgttgctggaactccgtaactatgaggaaaatgccaaggctgaattggccagtccactgaacgaggctgatgggcatcggggcataatcccagccaataccaggctccacaccacgctctcagtcagcctggggaatgagacccaaactgctcatacagaattacgcatttccacttctaatggtaagacagtactcacagctggtatttagaggcacctgtgccatcttggagtcattcttttttttttttttgagacagagtcttcctctgtcttggctcactgcaagctctgcctcccgggttcatgccattctcctgtctcagcctcccaagtagctgggactacaggcgcccaccaccacgcccagctaattttttgtatttttagtagagatagggtttcaccgtgttagccaagatggtctcgacctcctgacctcgtgatctgcccacctcagcttcccaaagttggagttgttcttaaactgtttttactcttccctgcagacaccatcatccgagcagtattgatttttgcagaaggaatttttacaggtgaaagccacgtggtacatcccagcattcacaacctctccagttccatctgcatccctattgtgcctcccaaagatgtccctgtggatctgcacttgaaggcattcgtgggttacagaagcagcacccagtttcatgtatttgaatcgacaagacagctccctcgattctccatgtatgcgctgaccagcctggaccctgccagtgagccaatcagttatgttaactttaccattgcagaacgggcacagagggttgttgtatggctcggtcagaactttctgttaccagaagacactcacattcagaatgctccatttcaagtgtgtttcacatctttacggaatggcggccacctgcatataaaaataaaacttagtggagagatcactataaatactgatgatattgatttggctggtgatatcatccagtcaatggcatcattttttgctattgaagaccttcaagtagaagcggattttcctgtctattttgaggaattacgaaaggtgctagttaaggtggatgaatatcattcagtgcatcagaagctcagtgctgatatggctgatcattctaatttgatccgaagtttgctggtcggagctgaggatgctcgtctgatgagggacatgaaaacaatgaagagtcgttatatggaactctatgaccttaatagagacttgctaaatggatataaaattcgctgtaacaatcacacagagctgttgggaaacctcaaagcagtaaatcaagcaattcaaagagcaggtcgtctgcgggttggaaaaccaaagaaccaggtgatcactgcttgtcgggatgcaattcgaagcaataacatcaacacactgttcaaaatcatgcgagtggggacagcttcttcctaggtgaggaaaatacaggtcatgaagttcctggcaaagattttctgttaaaaacctatgctggtttgctttggatcacaccctggtgaaccccgggtgctaagaatgaaaataaccttggtgagttgtacaaattaaagacaaagaactacatgtgaagatagacttgctttctatttttaaatcagtagtagtactgttgctgaataatactaggtttttatggaataggatgaatgcttttgaagtattagggcttcagagtccaattttgcttatttatggtatataaatacatatttttttcttgaaattgcaattgagtttgtacttttcaaatagattatctactttttcattaaaatgtaaagatgtta

SEQ ID NO: 381979 - DNA, 3089 bp, Homo sapiens
tgtcaagtatgcagggtgcagcttggatgtggtgctagaaggggaagcctctgggctgagcatgtaggctcgtcagtagagttcaacccgcaggagtaaattactgcagtgagaaacaaccgcacccgcggcccagcaggggttccactgcgcagccgcaaaaggcgccgaggctccaccgcgcagccacagaaggcgccgaggctccaccgcgcagccgcaaaaagagcggacgggtctgcgccgccgcaggaggagcaggcggtacctggacgggttcgtcccgggctgtttcgcgtccggcctgaggcggctggggccgcgcaggtagtgtccctgcacttcttgcccgggcgcgtgaggccagctccgctgcgcttgtctccagcttccagccctcctcccctaagccgccgccatcatgctgctgcctgtgttcaccctgaaactgcgccacaaaatcagcccccgaatggtggccatagggcgctacgacgggactcacccgtgcctggcggccgccacccaaacgggcaaggtttttattcataatcctcatacacggaaccagcatgtcagtgcatccagggtcttccagagccccctggaatctgatgtttctcttctcaacattaaccaggcagtcagctgtctgactgcaggcgtattgaaccctgagcttggctatgatgcccttttagtggggacacagactaatcttttggcttatgatgtctacaataattcggatttgttctacagagaggtagcagatggggcaaatgcaattgtgctggggacattgggagacatttcttcccctcttgcgattattggtggcaattgtgctctgcaaggtttcaatcatgaaggaagtgatctcttttggacggttactggagacaatgttaattccttggccttgtgtgactttgatggtgatggaaagaaagagcttcttgttggatctgaggattttgatatccgagtttttaaggaagatgagattgtggcagaaatgacagaaacagagatagtcacctctctttgtcccatgtatggcagtcgatttggttatgccctttccaatggcacagttggagtttatgacaaaacatcccgatactggagaattaaatcgaaaaatcatgccatgagcattcatgcttttgaccttaattctgatggagtgaatgaactgataactggttggtccaatgggaaggttgatgctcgaagtgaccgaactggggaggtcatctttaaggacaatttttcttctgcaattgccggtgtggtagagggagattaccggatggatggccacatacagttaatctgctgctcagtggatggggaaatccggggctacctgcctggcacggctgagatgaggggcaacctcatggacaccagtgcagagcaggacctgatccgagagctgagtcagaagaagcagaatctgttgctggaactccgtaactatgaggaaaatgccaaggctgaattggccagtccactgaacgaggctgatgggcatcggggcataatcccagccaataccaggctccacaccacgctctcagtcagcctggggaatgagacccaaactgctcatacagaattacgcatttccacttctaatgacaccatcatccgagcagtattgatttttgcagaaggaatttttacaggtgaaagccacgtggtacatcccagcattcacaacctctccagttccatctgcatccctattgtgcctcccaaagatgtccctgtggatctgcacttgaaggcattcgtgggttacagaagcagcacccagtttcatgtatttgaatcgacaagacagctccctcgattctccatgtatgcgctgaccagcctggaccctgccagtgagccaatcagttatgttaactttaccattgcagaacgggcacagaggcagtaaaactagaaagaaggagaactcttccctcaagaatggctgtaccttcatatctagaggcacattaaaaaaaagaacgtctgtaccttaaaaatggaggtcatttcattgtgttcattttcaaggttgttgtatggctcggtcagaactttctgttaccagaagacactcacattcagaatgctccatttcaagtgtgtttcacatctttacggaatggcggccacctgcatataaaaataaaacttagtggagagatcactataaatactgatgatattgatttggctggtgatatcatccagtcaatggcatcattttttgctattgaagaccttcaagtagaagcggattttcctgtctattttgaggaattacgaaaggtgctagttaaggtggatgaatatcattcagtgcatcagaagctcagtgctgatatggctgatcattctaatttgatccgaagtttgctggtcggagctgaggatgctcgtctgatgagggacatgaaaacaatgaagagtcgttatatggaactctatgaccttaatagagacttgctaaatggatataaaattcgctgtaacaatcacacagagctgttgggaaacctcaaagcagtaaatcaagcaattcaaagagcaggtcgtctgcgggttggaaaaccaaagaaccaggtgatcactgcttgtcgggatgcaattcgaagcaataacatcaacacactgttcaaaatcatgcgagtggggacagcttcttcctaggtgaggaaaatacaggtcatgaagttcctggcaaagattttctgttaaaaacctatgctggtttgctttggatcacaccctggtgaaccccgggtgctaagaatgaaaataaccttggtgagttgtacaaattaaagacaaagaactacatgtgaagatagacttgctttctatttttaaatcagtagtagtactgttgctgaataatactaggtttttatggaataggatgaatgcttttgaagtattagggcttcagagtccaattttgcttatttatggtatataaatacatatttttttcttgaaattgcaattgagtttgtacttttcaaatagattatctactttttcattaaaatgtaaagatgtta

SEQ ID NO: 381980 - DNA, 2801 bp, Homo sapiens
tgtcaagtatgcagggtgcagcttggatgtggtgctagaaggggaagcctctgggctgagcatgtaggctcgtcagtagagttcaacccgcaggagtaaattactgcagtgagaaacaaccgcacccgcggcccagcaggggttccactgcgcagccgcaaaaggcgccgaggctccaccgcgcagccacagaaggcgccgaggctccaccgcgcagccgcaaaaagagcggacgggtctgcgccgccgcaggaggagcaggcggtacctggacgggttcgtcccgggctgtttcgcgtccggcctgaggcggctggggccgcgcaggtagtgtccctgcacttcttgcccgggcgcgtgaggccagctccgctgcgcttgtctccagcttccagccctcctcccctaagccgccgccatcatgctgctgcctgtgttcaccctgaaactgcgccacaaaatcagcccccgaatggtggccatagggcgctacgacgggactcacccgtgcctggcggccgccacccaaacgggcaaggtttttattcataatcctcatacacggaaccagcatgtcagtgcatccagggtcttccagagccccctggaatctgatgtttctcttctcaacattaaccaggcagtcagctgtctgactgcaggcgtattgaaccctgagcttggctatgatgcccttttagtggggacacagactaatcttttggcttatgatgtctacaataattcggatttgttctacagagaggtagcagatggggcaaatgcaattgtgctggggacattgggagacatttcttcccctcttgcgattattggtggcaattgtgctctgcaaggtttcaatcatgaaggaagtgatctcttttggacggttactggagacaatgttaattccttggccttgtgtgactttgatggtgatggaaagaaagagcttcttgttggatctgaggattttgatatccgagtttttaaggaagatgagattgtggcagaaatgacagaaacagagatagtcacctctctttgtcccatgtatggcagtcgatttggttatgccctttccaatggcacagttggagtttatgacaaaacatcccgatactggagaattaaatcgaaaaatcatgccatgagcattcatgcttttgaccttaattctgatggagtgaatgaactgataactggttggtccaatgggaaggttgatgctcgaagtgaccgaactggggaggtcatctttaaggacaatttttcttctgcaattgccggtgtggtagagggagattaccggatggatggccacatacagttaatctgctgctcagtggatggggaaatccggggctacctgcctggcacggctgagatgaggggcaacctcatggacaccagtgcagagcaggacctgatccgagagctgagtcagaagaagcagaatctgttgctggaactccgtaactatgaggaaaatgccaaggctgaattggccagtccactgaacgaggctgatgggcatcggggcataatcccagccaataccaggctccacaccacgctctcagtcagcctggggaatgagacccaaactgctcatacagaattacgcatttccacttctaatgacaccatcatccgagcagtattgatttttgcagaaggaatttttacaggtgaaagccacgtggtacatcccagcattcacaacctctccagttccatctgcatccctattgtgcctcccaaagatgtccctgtggatctgcacttgaaggcattcgtgggttacagaagcagcacccagtttcatgtatttgaatcgacaagacagctccctcgattctccatgtatgcgctgaccagcctggaccctgccagtgagccaatcagttatgttaactttaccattgcagaacgggcacagagggttgttgtatggctcggtcagaactttctgttaccagaagacactcacattcagaatgctccatttcaagtgtgtttcacatctttacggaatggcggccacctgcatataaaaataaaacttagtggagagatcactataaatactgatgatattgatttggctggtgatatcatccagtcaatggcatcattttttgctattgaagaccttcaagtagaagcggattttcctgtctattttgaggaattacgaaaggtgctagttaaggtggatgaatatcattcagtgcatcagaagctcagtgctgatatggctgatcattctaatttgatccgaagtttgctggtcggagctgaggatgctcgtctgatgagggacatgaaaacaatgaagagtcgttatatggaactctatgaccttaatagagacttgctaaatggatataaaattcgctgtaacaatcacacagagctgttgggaaacctcaaagcagtaaatcaagcaattcaaagagcaggtcgtctgcgggttggaaaaccaaagaaccaggtgatcactgcttgtcgggatgcaattcgaagcaataacatcaacacactgttcaaaatcatgcgagtggggacagcttcttcctaggggccaagaaatgaagcttcaggcctgtgaagttggagagcagcaagaatagtgcctcagagcgaaataacttcatgcactccttcaatatctcaggaagcttactctcctcagctttctcataaaacctgaaaaacagcaatgtcaagttgttcatcaaagccacagatgtaaaatgactcacagaataaaagctgatcgttagctttgtacc

SEQ ID NO: 381981 - DNA, 1260 bp, Homo sapiens
gtttccacaattttttttctcgcggcttctttttatacctttctctcgactcttcttttcaaacatgttcctttaatatctttattctcaaggcctaaatacttcgccttacttgagctccaatttcttcatcctaaacttatcctctcaattttcagacttacttcccctcacctttctcataacccttttttaagggacctcgctcctcccaatccacatgtccatgcctccagccctcgcagacctttccttgaatgtctcagccttaagaaactccttcaggagaatttcagaactttcttcaaactcttcttgaatttgaacttggtaatccatgtccagataagtagggttgatccaatcatacaaaatctcatgatcttgtgggatgtgagggctccgaggtatggggggttcaaagtagttgggaggccgagtcaatgatggaccatgaaaccagccacttatagacaaacgtgacttttcttcagacagcacttcagacacctggtgaaaggacacaggagatacttcaaagaaaaccagtttgttccacgaagggataagagacttgacaatctgcttcggctgaaagtgttcatcaatgctgtacaggtccagggtaccacccatgctcctgtcccagggaggaaccaggtacaggatgaaggcaatccggcgcccttccagctcatcatcatggcacagcagggcatcagtgaattcatatttagcacaggacatgtcaatggttgattccaggtcaattttagaaatatcagaaagccaggaccggaaatcttcaaacagaattttccttaaagtggagatgtgaggctctcttctcttcttcaaatcatcagactgctggaacttatataaatcattatacttctcatggaagtccaagttcatcagttccttctgaagcccttctaagaagtcttggctttggatgaagtttgggatcacacagtgaagaaaagggtccatgtccatgacaatgacttcgtgactgaacggcgtcctgcggctccaggcctcagccacctgctttttcaaggtttcttccgtaacagcgtccgaaaactccgccatcacctccttctttcccttttttcccacccgggctgggccgggctccgctggccgcttcccattcatctcttcccaaggcacagaaccacgccacgcagatcaagacgctaccttcctgagagggtactgcaactcccggcatgtcccctttatcgtgtt

SEQ ID NO: 381982 - DNA, 1814 bp, Homo sapiens
cttttgaagctgaatagcaatattattgctgaattggccagtccactgaacgaggctgatgggcatcggggcataatcccagccaataccaggctccacaccacgctctcagtcagcctggggaatgagacccaaactgctcatacagaattacgcatttccacttctaatggtaagacagtactcacagctggtatttagaggcacctgtgccatcttggagtcattcttttttttttttttgagacagagtcttcctctgtcttggctcactgcaagctctgcctcccgggttcatgccattctcctgtctcagcctcccaagtagctgggactacaggcgcccaccaccacgcccagctaattttttgtatttttagtagagatagggtttcaccgtgttagccaagatggtctcgacctcctgacctcgtgatctgcccacctcagcttcccaaagttggagttgttcttaaactgtttttactcttccctgcagacaccatcatccgagcagtattgatttttgcagaaggaatttttacaggtgaaagccacgtggtacatcccagcattcacaacctctccagttccatctgcatccctattgtgcctcccaaagatgtccctgtggatctgcacttgaaggcattcgtgggttacagaagcagcacccagtttcatgtatttgaatcgacaagacagctccctcgattctccatgtatgcgctgaccagcctggaccctgccagtgagccaatcagttatgttaactttaccattgcagaacgggcacagagggttgttgtatggctcggtcagaactttctgttaccagaagacactcacattcagaatgctccatttcaagtgtgtttcacatctttacggaatggcggccacctgcatataaaaataaaacttagtggagagatcactataaatactgatgatattgatttggctggtgatatcatccagtcaatggcatcattttttgctattgaagaccttcaagtagaagcggattttcctgtctattttgaggaattacgaaaggtgctagttaaggtggatgaatatcattcagtgcatcagaagctcagtgctgatatggctgatcattctaatttgatccgaagtttgctggtcggagctgaggatgctcgtctgatgagggacatgaaaacaatgaagagtcgttatatggaactctatgaccttaatagagacttgctaaatggatataaaattcgctgtaacaatcacacagagctgttgggaaacctcaaagcagtaaatcaagcaattcaaagagcaggtcgtctgcgggttggaaaaccaaagaaccaggtgatcactgcttgtcgggatgcaattcgaagcaataacatcaacacactgttcaaaatcatgcgagtggggacagcttcttcctaggtgaggaaaatacaggtcatgaagttcctggcaaagattttctgttaaaaacctatgctggtttgctttggatcacaccctggtgaaccccgggtgctaagaatgaaaataaccttggtgagttgtacaaattaaagacaaagaactacatgtgaagatagacttgctttctatttttaaatcagtagtagtactgttgctgaataatactaggtttttatggaataggatgaatgcttttgaagtattagggcttcagagtccaattttgcttatttatggtatataaatacatatttttttcttgaaattgcaattgagtttgtacttttcaaatagattatctactttttcattaaaatgtaaagatgtta

SEQ ID NO: 381983 - DNA, 1244 bp, Homo sapiens
  misc_feature (1234)..(1234): n is a, c, g, or t
  misc_feature (1236)..(1236): n is a, c, g, or t
  misc_feature (1238)..(1238): n is a, c, g, or t
gtttccacaattttttttctcgcggcttctttttatacctttctctcgactcttcttttcaaacatgttcctttaatatctttattctcaaggcctaaatacttcgccttacttgagctccaatttcttcatcctaaacttatcctctcaattttcagacttacttcccctcacctttctcataacccttttttaagggacctcgctcctcccaatccacatgtccatgcctccagccctcgcagacctttccttgaatgtctcagccttaagaaactccttcaggagaatttcagaactttcttcaaactcttcttgaatttgaacttggtaatccatgtccagataagtagggttgatccaatcatacaaaatctcatgatcttgtgggatgtgagggctccgaggtatggggggttcaaagtagttgggaggccgagtcaatgatggaccatgaaaccagccacttatagacaaacgtgacttttcttcagacagcacttcagacacctggtgaaaggacacaggagatacttcaaagaaaaccagtttgttccacgaagggataagagacttgacaatctgcttcggctgaaagtgttcatcaatgctgtacaggtccagggtaccacccatgctcctgtcccagggaggaaccaggtacaggatgaaggcaatccggcgcccttccagctcatcatcatggcacagcagggcatcagtgaattcatatttagcacaggacatgtcaatggttgattccaggtcaattttagaaatatcagaaagccaggaccggaaatcttcaaacagaattttccttaaagtggagatgtgaggctctcttctcttcttcaaatcatcagactgctggaacttatataaatcattatacttctcatggaagtccaagttcatcagttccttctgaagcccttctaagaagtcttggctttggatgaagtttgggatcacacagtgaagaaaagggtccatgtccatgacaatgacttcgtgactgaacggcgtcctgcggctccaggcctcagccacctgctttttcaaggtttcttccgtaacagcgtccgaaaactccgccatcacctccttctttcccttttttcccacccgggctgggccgggctccgctggccgcttcccattcatctcttcccaaggcacagaaccacgccacgcagatcaagacgctaccttcctgaccccggccataaangncnaattgg

SEQ ID NO: 381984 - DNA, 1985 bp, Homo sapiens
tgtcaagtatgcagggtgcagcttggatgtggtgctagaaggggaagcctctgggctgagcatgtaggctcgtcagtagagttcaacccgcaggagtaaattactgcagtgagaaacaaccgcacccgcggcccagcaggggttccactgcgcagccgcaaaaggcgccgaggctccaccgcgcagccacagaaggcgccgaggctccaccgcgcagccgcaaaaagagcggacgggtctgcgccgccgcaggaggagcaggcggtacctggacgggttcgtcccgggctgtttcgcgtccggcctgaggcggctggggccgcgcaggtagtgtccctgcacttcttgcccgggcgcgtgaggccagctccgctgcgcttgtctccagcttccagccctcctcccctaagccgccgccatcatgctgctgcctgtgttcaccctgaaactgcgccacaaaatcagcccccgaatggtggccatagggcgctacgacgggactcacccgtgcctggcggccgccacccaaacgggcaaggtttttattcataatcctcatacacggaaccagcatgtcagtgcatccagggtcttccagagccccctggaatctgatgtttctcttctcaacattaaccaggcagtcagctgtctgactgcaggcgtattgaaccctgagcttggctatgatgcccttttagtggggacacagactaatcttttggcttatgatgtctacaataattcggatttgttctacagagaggtagcagatggggcaaatgcaattgtgctggggacattgggagacatttcttcccctcttgcgattattggtggcaattgtgctctgcaaggtttcaatcatgaaggaagtgatctcttttggacggttactggagacaatgttaattccttggccttgtgtgactttgatggtgatggaaagaaagagcttcttgttggatctgaggattttgatatccgagtttttaaggaagatgagattgtggcagaaatgacagaaacagagatagtcacctctctttgtcccatgtatggcagtcgatttggttatgccctttccaatggcacagttggagtttatgacaaaacatcccgatactggagaattaaatcgaaaaatcatgccatgagcattcatgcttttgaccttaattctgatggagtgaatgaactgataactggttggtccaatgggaaggttgatgctcgaagtgaccgaactggggaggtcatctttaaggacaatttttcttctgcaattgccggtgtggtagagggagattaccggatggatggccacatacagttaatctgctgctcagtggatggggaaatccggggctacctgcctggcacggctgagatgaggggcaacctcatggacaccagtgcagagcaggacctgatccgagagctgagtcagaagaagcagaatctgttgctggaactccgtaactatgaggaaaatgccaaggctgaattggccagtccactgaacgaggctgatgggcatcggggcataatcccagccaataccaggctccacaccacgctctcagtcagcctggggaatgagacccaaactgctcatacagaattacgcatttccacttctaatgacaccatcatccgagcagtattgatttttgcagaaggaatttttacaggtgaaagccacgtggtacatcccagcattcacaacctctccagttccatctgcatccctattgtgcctcccaaagatgtccctgtggatctgcacttgaaggcattcgtgggttacagaagcaggtgaccctttgcaagtcacagttcatttcaggacagcacttagaggagggcaagatgtataaattttccatatgcccagtggattcttgggggcctgagaaaccatttaatggttctgtctacccaaagtttctcatgaccttttatttcctcagtttgaaacctgt

SEQ ID NO: 381985 - DNA, 2312 bp, Homo sapiens
tgtcaagtatgcagggtgcagcttggatgtggtgctagaaggggaagcctctgggctgagcatgtaggctcgtcagtagagttcaacccgcaggagtaaattactgcagtgagaaacaaccgcacccgcggcccagcaggggttccactgcgcagccgcaaaaggcgccgaggctccaccgcgcagccacagaaggcgccgaggctccaccgcgcagccgcaaaaagagcggacgggtctgcgccgccgcaggaggagcaggcggtacctggacgggttcgtcccgggctgtttcgcgtccggcctgaggcggctggggccgcgcaggtagtgtccctgcacttcttgcccgggcgcgtgaggccagctccgctgcgcttgtctccagcttccagccctcctcccctaagccgccgccatcatgctgctgcctgtgttcaccctgaaactgcgccacaaaatcagcccccgaatggtggccatagggcgctacgacgggactcacccgtgcctggcggccgccacccaaacgggcaaggtttttattcataatcctcatacacggaaccagcatgtcagtgcatccagggtcttccagagccccctggaatctgatgtttctcttctcaacattaaccaggcagtcagctgtctgactgcaggcgtattgaaccctgagcttggctatgatgcccttttagtggggacacagactaatcttttggcttatgatgtctacaataattcggatttgttctacagagaggtagcagatggggcaaatgcaattgtgctggggacattgggagacatttcttcccctcttgcgattattggtggcaattgtgctctgcaaggtttcaatcatgaaggaagtgatctcttttggacggttactggagacaatgttaattccttggccttgtgtgactttgatggtgatggaaagaaagagcttcttgttggatctgaggattttgatatccgagtttttaaggaagatgagattgtggcagaaatgacagaaacagagatagtcacctctctttgtcccatgtatggcagtcgatttggttatgccctttccaatggcacagttggagtttatgacaaaacatcccgatactggagaattaaatcgaaaaatcatgccatgagcattcatgcttttgaccttaattctgatggagtgaatgaactgataactggttggtccaatgggaaggttgatgctcgaagtgaccgaactggggaggtcatctttaaggacaatttttcttctgcaattgccggtgtggtagagggagattaccggatggatggccacatacagttaatctgctgctcagtggatggggaaatccggggctacctgcctggcacggctgagatgaggggcaacctcatggacaccagtgcagagcaggacctgatccgagagctgagtcagaagaagcagaatctgttgctggaactccgtaactatgaggaaaatgccaaggctgaattggccagtccactgaacgaggctgatgggcatcggggcataatcccagccaataccaggctccacaccacgctctcagtcagcctggggaatgagacccaaactgctcatacagaattacgcatttccacttctaatggtaagacagtactcacagctggtatttagaggcacctgtgccatcttggagtcattcttttttttttttttgagacagagtcttcctctgtcttggctcactgcaagctctgcctcccgggttcatgccattctcctgtctcagcctcccaagtagctgggactacaggcgcccaccaccacgcccagctaattttttgtatttttagtagagatagggtttcaccgtgttagccaagatggtctcgacctcctgacctcgtgatctgcccacctcagcttcccaaagttggagttgttcttaaactgtttttactcttccctgcagacaccatcatccgagcagtattgatttttgcagaaggaatttttacaggtgaaagccacgtggtacatcccagcattcacaacctctccagttccatctgcatccctattgtgcctcccaaagatgtccctgtggatctgcacttgaaggcattcgtgggttacagaagcaggtgaccctttgcaagtcacagttcatttcaggacagcacttagaggagggcaagatgtataaattttccatatgcccagtggattcttgggggcctgagaaaccatttaatggttctgtctacccaaagtttctcatgaccttttatttcctcagtttgaaacctgt

SEQ ID NO: 381986 - DNA, 1097 bp, Homo sapiens
tacctttcacactccagagctggcaccagtcacttatgtttcagtcagtcggcctagtgtttggcttttgtctccggacttcaaagggagagaaaaccttcagctccttttcttagaccttcctgcatcctctaaagaaaaacctactatatataacccaaaggaaatatataaacatatatatataaataaaaccatcaaggcccaattagcaaaaaagagactgaaaattaatgctaagtgtctaacttaaaaatttagaaaagaacaataggataaacccaaggaagcagaaatacagccagagatttatacctgaattctgctgttttgggtcgatgctttgacttctttagaaataatctttgctaggtgactatgagctttgatccttttctgtaaaactgactgttggtttctaggtttgagacagtctctaagtcagttttttcaataattccctcaccaagttattttttttagggaatggtaagataaatcatatttcaagtataactcttttccctcctggttttatgttgttttaaaactgacgtctaattttataatttcatgtctaacaatcttttggttcctgatgtttcttcttatgcagttggaaaaccaaagaaccaggtgatcactgcttgtcgggatgcaattcgaagcaataacatcaacacactgttcaaaatcatgcgagtggggacagcttcttcctaggtgaggaaaatacaggtcatgaagttcctggcaaagattttctgttaaaaacctatgctggtttgctttggatcacaccctggtgaaccccgggtgctaagaatgaaaataaccttggtgagttgtacaaattaaagacaaagaactacatgtgaagatagacttgctttctatttttaaatcagtagtagtactgttgctgaataatactaggtttttatggaataggatgaatgcttttgaagtattagggcttcagagtccaattttgcttatttatggtatataaatacatatttttttcttgaaattgcaattgagtttgtacttttcaaatagattatctactttttcattaaaatgtaaagatgtta

SEQ ID NO: 381987 - DNA, 1046 bp, Homo sapiens
  misc_feature (1036)..(1036): n is a, c, g, or t
  misc_feature (1038)..(1038): n is a, c, g, or t
  misc_feature (1040)..(1040): n is a, c, g, or t
agaagggctggaataagttctcaaagtttcctggagtcaacttctggtgctagacattcaaaaaaacctagactttgtcaaatggactggtcctggcagattcatagccacaggcagccttatatgcactccacccttccacagtcagtattcagaagcttggtctgactatttctcatcttaaatggattctaattgatctctggagtcatttttaagtccaacttaaagaggtggttgtcagggctggcatttattcctcttgaggtagttactataataaatagcttccacttcctttgaggagtacagacattgtatacaaaaacatgatactgaatcaactcagctttaactcagaagtgccactggtggtgaagtgcatgcacttatacttatcttaccatcaatgctgtacaggtccagggtaccacccatgctcctgtcccagggaggaaccaggtacaggatgaaggcaatccggcgcccttccagctcatcatcatggcacagcagggcatcagtgaattcatatttagcacaggacatgtcaatggttgattccaggtcaattttagaaatatcagaaagccaggaccggaaatcttcaaacagaattttccttaaagtggagatgtgaggctctcttctcttcttcaaatcatcagactgctggaacttatataaatcattatacttctcatggaagtccaagttcatcagttccttctgaagcccttctaagaagtcttggctttggatgaagtttgggatcacacagtgaagaaaagggtccatgtccatgacaatgacttcgtgactgaacggcgtcctgcggctccaggcctcagccacctgctttttcaaggtttcttccgtaacagcgtccgaaaactccgccatcacctccttctttcccttttttcccacccgggctgggccgggctccgctggccgcttcccattcatctcttcccaaggcacagaaccacgccacgcagatcaagacgctaccttcctgaccccggccataaangncnaattgg

SEQ ID NO: 381988 - DNA, 1432 bp, Homo sapiens
gtttccacaattttttttctcgcggcttctttttatacctttctctcgactcttcttttcaaacatgttcctttaatatctttattctcaaggcctaaatacttcgccttacttgagctccaatttcttcatcctaaacttatcctctcaattttcagacttacttcccctcacctttctcataacccttttttaagggacctcgctcctcccaatccacatgtccatgcctccagccctcgcagacctttccttgaatgtctcagccttaagaaactccttcaggagaatttcagaactttcttcaaactcttcttgaatttgaacttggtaatccatgtccagataagtagggttgatccaatcatacaaaatctcatgatcttgtgggatgtgagggctccgaggtatggggggttcaaagtagttgggaggccgagtcaatgatggaccatgaaaccagccacttatagacaaacgtgacttttcttcagacagcacttcagacacctggtgaaaggacacaggagatacttcaaagaaaaccagtttgttccacgaagggataagagacttgacaatctgcttcggctgaaagtgttcatcaatgctgtacaggtccagggtaccacccatgctcctgtcccagggaggaaccaggtacaggatgaaggcaatccggcgcccttccagctcatcatcatggcacagcagggcatcagtgaattcatatttagcacaggacatgtcaatggttgattccaggtcaattttagaaatatcagaaagccaggaccggaaatcttcaaacagaattttccttaaagtggagatgtgaggctctcttctcttcttcaaatcatcagactgctggaacttatataaatcattatacttctcatggaagtccaagttcatcagttccttctgaagcccttctaagaagtcttggctttggatgaagtttgggatcacacagtgaagaaaagggtccatgtccatgacaatgacttctcttcaaagcacttgacaacggaaagaaaaattacggcaaactctagaaggggatgcctggcgcatgaagcagagctctgaacacctaaggtgatatttaaagctgaggctggaatcgttcaacgtaggcgcctttccttggtcaaagcgcgtttattttcatacatcatggagtcaaactacaggcgcgtagagacgagtacactagggagtcaagctggcagctcacgacaaatgccctggctagactctcctgggacagctgagcaatgcccttgcaggagaaatgacatcagccactcctgtatttgtccacatgtgtattgggccttactcagggaaacatttactgaagcctgcaagcattagtgtgtcgctcccattcaccgactttccgaggtaaatattatgaactatc

SEQ ID NO: 381989 - DNA, 413 bp, Homo sapiens
ataatcctcatacacggaaccagcatgtcagtgcatccagggtcttccagagccccctggaatctgatgtttctcttctcaacattaaccaggcagtcagctgtctgactgcaggcgtattgaaccctgagcttggctatgatgcccttttagtggggacacagactaatcttttggcttatgatgtctacaataattcggatttgttctacagagaggcaagtataacctttataaccataaaattgtcattactcattaatgtccattttttatgcttagaagagatcagatcatttattttggtctgtttgttgtatgactgttatagtataggtaaacaacatggagattttgctgttaacatctgctttatgtactcggaacttatttatttggttatggttgctaat

SEQ ID NO: 381990 - DNA, 675 bp, Homo sapiens
gggggttcaaagtagttgggaggccgagtcaatgatggaccatgaaaccagccacttatagacaaacgtgacttttcttcagacagcacttcagacacctgaaaggagaagcccagtagcacatcaacacgaagaatagggggattaccgccaatgcacattaatttcagggtcctccatgctaagcattaaaacaacatcagataacaagtctaacaggaagctgtcatgtttggataatgggtgattaaaaaacataatccttgctactctatttgtggcttacagtctttacctggtgaaaggacacaggagatacttcaaagaaaaccagtttgttccacgaagggataagagacttgacaatctgcttcggctgaaagtgttctgcaccaggaaagaacacatcaataaattatcattaaccacttccagcctgcctcattttactcttgacaatttccaaacttctgagggcatctagatgtgcccttcagaccctgaaataccgccctttccatctgcttcactcatacttgcgagtttgactacgtggcatctgttcttactacaccatccatctattattgagaagggctggaataagttctcaaagtttcctggagtcaacttctggtgctagacattcaaaaaaacctagactttgtcaaatgg

SEQ ID NO: 381991 - DNA, 663 bp, Homo sapiens
ggaatatccaagggattcttaacccactaagcatactgctgatactaatgttagtgttatcatcatttctatgtttcacttgaagaagggaatgacaaaaacattctaatcaggaacaaaacaaaaactccccagtgatgcctattcacccatttgggaagcaaaattgcatgccaaacaaaatattcagaacaacatacgctaagcttaccttaagaaactccttcaggagaatttcagaactttcttcaaactcttcttgaatttgaacttggtaatccatgtccagataagtagggttgatccaatcatacaaaatctcatgcttacgaagaggcagcagatgcaaaatgtgagttaataattcctattgcttttgctcttacatcatttcacactaataaaatacatgcaaatcctcattttataagtttctcctattaaagtactggaaaactctgcttgagaaagacactctcaaaagtttacttaagaaaagtgtaggccgggtgcagtggctcacacctgtaatcccagcactttgggaggccaaggtgggtggatcatttgaggtcaggagtttgagatcagcctggccaacatggtgaaaccctttctctactaaaaatatgaaaattagccaggcgtggtggtgggcacctg

SEQ ID NO: 381992 - DNA, 2894 bp, Homo sapiens
tgtcaagtatgcagggtgcagcttggatgtggtgctagaaggggaagcctctgggctgagcatgtaggctcgtcagtagagttcaacccgcaggagtaaattactgcagtgagaaacaaccgcacccgcggcccagcaggggttccactgcgcagccgcaaaaggcgccgaggctccaccgcgcagccacagaaggcgccgaggctccaccgcgcagccgcaaaaagagcggacgggtctgcgccgccgcaggaggagcaggcggtacctggacgggttcgtcccgggctgtttcgcgtccggcctgaggcggctggggccgcgcaggtagtgtccctgcacttcttgcccgggcgcgtgaggccagctccgctgcgcttgtctccagcttccagccctcctcccctaagccgccgccatcatgctgctgcctgtgttcaccctgaaactgcgccacaaaatcagcccccgaatggtggccatagggcgctacgacgggactcacccgtgcctggcggccgccacccaaacgggcaaggtttttattcataatcctcatacacggaaccagcatgtcagtgcatccagggtcttccagagccccctggaatctgatgtttctcttctcaacattaaccaggcagtcagctgtctgactgcaggcgtattgaaccctgagcttggctatgatgcccttttagtggggacacagactaatcttttggcttatgatgtctacaataattcggatttgttctacagagaggtagcagatggggcaaatgcaattgtgctggggacattgggagacatttcttcccctcttgcgattattggtggcaattgtgctctgcaaggtttcaatcatgaaggaagtgatctcttttggacggttactggagacaatgttaattccttggccttgtgtgactttgatggtgatggaaagaaagagcttcttgttggatctgaggattttgatatccgagtttttaaggaagatgagattgtggcagaaatgacagaaacagagatagtcacctctctttgtcccatgtatggcagtcgatttggttatgccctttccaatggcacagttggagtttatgacaaaacatcccgatactggagaattaaatcgaaaaatcatgccatgagcattcatgcttttgaccttaattctgatggagtgaatgaactgataactggttggtccaatgggaaggttgatgctcgaagtgaccgaactggggaggtcatctttaaggacaatttttcttctgcaattgccggtgtggtagagggagattaccggatggatggccacatacagttaatctgctgctcagtggatggggaaatccggggctacctgcctggcacggctgagatgaggggcaacctcatggacaccagtgcagagcaggacctgatccgagagctgagtcagaagaagcagaatctgttgctggaactccgtaactatgaggaaaatgccaaggctgaattggccagtccactgaacgaggctgatgggcatcggggcataatcccagccaataccaggctccacaccacgctctcagtcagcctggggaatgagacccaaactgctcatacagaattacgcatttccacttctaatgacaccatcatccgagcagtattgatttttgcagaaggaatttttacaggtgaaagccacgtggtacatcccagcattcacaacctctccagttccatctgcatccctattgtgcctcccaaagatgtccctgtggatctgcacttgaaggcattcgtgggttacagaagcagcacccagtttcatgtatttgaatcgacaagacagctccctcgattctccatgtatgcgctgaccagcctggaccctgccagtgagccaatcagttatgttaactttaccattgcagaacgggcacagagggttgttgtatggctcggtcagaactttctgttaccagaagacactcacattcagaatgctccatttcaagtgtgtttcacatctttacggaatggcggccacctgcatataaaaataaaacttagtggagagatcactataaatactgatgatattgatttggctggtgatatcatccagtcaatggcatcattttttgctattgaagaccttcaagtagaagcggattttcctgtctattttgaggaattacgaaaggtgctagttaaggtggatgaatatcattcagtgcatcagaagctcagtgctgatatggctgatcattctaatttgatccgaagtttgctggtcggagctgaggatgctcgtctgatgagggacatgaaaacaatgaagagtcgttatatggaactctatgaccttaatagagacttgctaaatggatataaaattcgctgtaacaatcacacagagctgttgggaaacctcaaagcagtaaatcaagcaattcaaagagcaggtcgtctgcgggttggaaaaccaaagaaccaggtgatcactgcttgtcgggatgcaattcgaagcaataacatcaacacactgttcaaaatcatgcgagtggggacagcttcttcctaggtgaggaaaatacaggtcatgaagttcctggcaaagattttctgttaaaaacctatgctggtttgctttggatcacaccctggtgaaccccgggtgctaagaatgaaaataaccttggtgagttgtacaaattaaagacaaagaactacatgtgaagatagacttgctttctatttttaaatcagtagtagtactgttgctgaataatactaggtttttatggaataggatgaatgcttttgaagtattagggcttcagagtccaattttgcttatttatggtatataaatacatatttttttcttg

SEQ ID NO: 381993 - DNA, 2961 bp, Homo sapiens
tgtcaagtatgcagggtgcagcttggatgtggtgctagaaggggaagcctctgggctgagcatgtaggctcgtcagtagagttcaacccgcaggagtaaattactgcagtgagaaacaaccgcacccgcggcccagcaggggttccactgcgcagccgcaaaaggcgccgaggctccaccgcgcagccacagaaggcgccgaggctccaccgcgcagccgcaaaaagagcggacgggtctgcgccgccgcaggaggagcaggcggtacctggacgggttcgtcccgggctgtttcgcgtccggcctgaggcggctggggccgcgcaggtagtgtccctgcacttcttgcccgggcgcgtgaggccagctccgctgcgcttgtctccagcttccagccctcctcccctaagccgccgccatcatgctgctgcctgtgttcaccctgaaactgcgccacaaaatcagcccccgaatggtggccatagggcgctacgacgggactcacccgtgcctggcggccgccacccaaacgggcaaggtttttattcataatcctcatacacggaaccagcatgtcagtgcatccagggtcttccagagccccctggaatctgatgtttctcttctcaacattaaccaggcagtcagctgtctgactgcaggcgtattgaaccctgagcttggctatgatgcccttttagtggggacacagactaatcttttggcttatgatgtctacaataattcggatttgttctacagagaggtagcagatggggcaaatgcaattgtgctggggacattgggagacatttcttcccctcttgcgattattggtggcaattgtgctctgcaaggtttcaatcatgaaggaagtgatctcttttggacggttactggagacaatgttaattccttggccttgtgtgactttgatggtgatggaaagaaagagcttcttgttggatctgaggattttgatatccgagtttttaaggaagatgagattgtggcagaaatgacagaaacagagatagtcacctctctttgtcccatgtatggcagtcgatttggttatgccctttccaatggcacagttggagtttatgacaaaacatcccgatactggagaattaaatcgaaaaatcatgccatgagcattcatgcttttgaccttaattctgatggagtgaatgaactgataactggttggtccaatgggaaggttgatgctcgaagtgaccgaactggggaggtcatctttaaggacaatttttcttctgcaattgccggtgtggtagagggagattaccggatggatggccacatacagttaatctgctgctcagtggatggggaaatccggggctacctgcctggcacggctgagatgaggggcaacctcatggacaccagtgcagagcaggacctgatccgagagctgagtcagaagaagcagaatctgttgctggaactccgtaactatgaggaaaatgccaaggctgaattggccagtccactgaacgaggctgatgggcatcggggcataatcccagccaataccaggctccacaccacgctctcagtcagcctggggaatgagacccaaactgctcatacagaattacgcatttccacttctaatgacaccatcatccgagcagtattgatttttgcagaaggaatttttacaggtgaaagccacgtggtacatcccagcattcacaacctctccagttccatctgcatccctattgtgcctcccaaagatgtccctgtggatctgcacttgaaggcattcgtgggttacagaagcagcacccagtttcatgtatttgaatcgacaagacagctccctcgattctccatgtatgcgctgaccagcctggaccctgccagtgagccaatcagttatgttaactttaccattgcagaacgggcacagagggttgttgtatggctcggtcagaactttctgttaccagaagacactcacattcagaatgctccatttcaagtgtgtttcacatctttacggaatggcggccacctgcatataaaaataaaacttagtggagagatcactataaatactgatgatattgatttggctggtgatatcatccagtcaatggcatcattttttgctattgaagaccttcaagtagaagcggattttcctgtctattttgaggaattacgaaaggtgctagttaaggtggatgaatatcattcagtgcatcagaagctcagtgctgatatggctgatcattctaatttgatccgaagtttgctggtcggagctgaggatgctcgtctgatgagggacatgaaaacaatgaagagtcgttatatggaactctatgaccttaatagagacttgctaaatggatataaaattcgctgtaacaatcacacagagctgttgggaaacctcaaagcagtaaatcaagcaattcaaagagcaggtcgtctgcgggttggaaaaccaaagaaccaggtgatcactgcttgtcgggatgcaattcgaagcaataacatcaacacactgttcaaaatcatgcgagtggggacagcttcttcctaggtgaggaaaatacaggtcatgaagttcctggcaaagattttctgttaaaaacctatgctggtttgctttggatcacaccctggtgaaccccgggtgctaagaatgaaaataaccttggtgagttgtacaaattaaagacaaagaactacatgtgaagatagacttgctttctatttttaaatcagtagtagtactgttgctgaataatactaggtttttatggaataggatgaatgcttttgaagtattagggcttcagagtccaattttgcttatttatggtatataaatacatatttttttcttgaaattgcaattgagtttgtacttttcaaatagattatctactttttcattaaaatgtaaagatgtta

SEQ ID NO: 381994 - DNA, 3561 bp, Homo sapiens
tgtcaagtatgcagggtgcagcttggatgtggtgctagaaggggaagcctctgggctgagcatgtaggctcgtcagtagagttcaacccgcaggagtaaattactgcagtgagaaacaaccgcacccgcggcccagcaggggttccactgcgcagccgcaaaaggcgccgaggctccaccgcgcagccacagaaggcgccgaggctccaccgcgcagccgcaaaaagagcggacgggtctgcgccgccgcaggaggagcaggcggtacctggacgggttcgtcccgggctgtttcgcgtccggcctgaggcggctggggccgcgcaggtagtgtccctgcacttcttgcccgggcgcgtgaggccagctccgctgcgcttgtctccagcttccagccctcctcccctaagccgccgccatcatgctgctgcctgtgttcaccctgaaactgcgccacaaaatcagcccccgaatggtggccatagggcgctacgacgggactcacccgtgcctggcggccgccacccaaacgggcaaggtttttattcataatcctcatacacggaaccagcatgtcagtgcatccagggtcttccagagccccctggaatctgatgtttctcttctcaacattaaccaggcagtcagctgtctgactgcaggcgtattgaaccctgagcttggctatgatgcccttttagtggggacacagactaatcttttggcttatgatgtctacaataattcggatttgttctacagagaggtagcagatggggcaaatgcaattgtgctggggacattgggagacatttcttcccctcttgcgattattggtggcaattgtgctctgcaaggtttcaatcatgaaggaagtgatctcttttggacggttactggagacaatgttaattccttggccttgtgtgactttgatggtgatggaaagaaagagcttcttgttggatctgaggattttgatatccgagtttttaaggaagatgagattgtggcagaaatgacagaaacagaggtaagaagctccacctcgaactatggtaaccttgagcaagatagatcagtactgtcagatgaaacatcaagtgagagtgctggggcatctccaaacccaggtggttttaggataaaagcttggggagggggtcagacagagctgtatgttatggtaagaaaagcaataaaaatcctaattaagatatattttgaaaagactgattaaatagagaaaaattattgcatatagttgaatacataaaggcatttcttttaatgagttaatacatgcaaataataataatggcaatcatttattatgtacctattgtatgccaggtagtgctctaagtactttatatgaagtaacatattgaatccttacaacaaccctaataggaagataaattattattatttctatagatgaggaaaatggtgttctggttttttgtttgtttgtttgtttgttttgaggcagagttttactccatcacccaggctggagtgcggtggtgcgatctcggcttactgcaagctccacctcccaagttcaagtgattcgcatgcctcagcctcctgagtagctgggactacaggcacgcaccaccacgcctggatagtcacctctctttgtcccatgtatggcagtcgatttggttatgccctttccaatggcacagttggagtttatgacaaaacatcccgatactggagaattaaatcgaaaaatcatgccatgagcattcatgcttttgaccttaattctgatggagtgaatgaactgataactggttggtccaatgggaaggttgatgctcgaagtgaccgaactggggaggtcatctttaaggacaatttttcttctgcaattgccggtgtggtagagggagattaccggatggatggccacatacagttaatctgctgctcagtggatggggaaatccggggctacctgcctggcacggctgagatgaggggcaacctcatggacaccagtgcagagcaggacctgatccgagagctgagtcagaagaagcagaatctgttgctggaactccgtaactatgaggaaaatgccaaggctgaattggccagtccactgaacgaggctgatgggcatcggggcataatcccagccaataccaggctccacaccacgctctcagtcagcctggggaatgagacccaaactgctcatacagaattacgcatttccacttctaatgacaccatcatccgagcagtattgatttttgcagaaggaatttttacaggtgaaagccacgtggtacatcccagcattcacaacctctccagttccatctgcatccctattgtgcctcccaaagatgtccctgtggatctgcacttgaaggcattcgtgggttacagaagcagcacccagtttcatgtatttgaatcgacaagacagctccctcgattctccatgtatgcgctgaccagcctggaccctgccagtgagccaatcagttatgttaactttaccattgcagaacgggcacagagggttgttgtatggctcggtcagaactttctgttaccagaagacactcacattcagaatgctccatttcaagtgtgtttcacatctttacggaatggcggccacctgcatataaaaataaaacttagtggagagatcactataaatactgatgatattgatttggctggtgatatcatccagtcaatggcatcattttttgctattgaagaccttcaagtagaagcggattttcctgtctattttgaggaattacgaaaggtgctagttaaggtggatgaatatcattcagtgcatcagaagctcagtgctgatatggctgatcattctaatttgatccgaagtttgctggtcggagctgaggatgctcgtctgatgagggacatgaaaacaatgaagagtcgttatatggaactctatgaccttaatagagacttgctaaatggatataaaattcgctgtaacaatcacacagagctgttgggaaacctcaaagcagtaaatcaagcaattcaaagagcaggtcgtctgcgggttggaaaaccaaagaaccaggtgatcactgcttgtcgggatgcaattcgaagcaataacatcaacacactgttcaaaatcatgcgagtggggacagcttcttcctaggtgaggaaaatacaggtcatgaagttcctggcaaagattttctgttaaaaacctatgctggtttgctttggatcacaccctggtgaaccccgggtgctaagaatgaaaataaccttggtgagttgtacaaattaaagacaaagaactacatgtgaagatagacttgctttctatttttaaatcagtagtagtactgttgctgaataatactaggtttttatggaataggatgaatgcttttgaagtattagggcttcagagtccaattttgcttatttatggtatataaatacatatttttttcttgaaattgcaattgagtttgtacttttcaaatagattatctactttttcattaaaatgtaaagatgtta

SEQ ID NO: 381995 - DNA, 3177 bp, Homo sapiens
tgtcaagtatgcagggtgcagcttggatgtggtgctagaaggggaagcctctgggctgagcatgtaggctcgtcagtagagttcaacccgcaggagtaaattactgcagtgagaaacaaccgcacccgcggcccagcaggggttccactgcgcagccgcaaaaggcgccgaggctccaccgcgcagccacagaaggcgccgaggctccaccgcgcagccgcaaaaagagcggacgggtctgcgccgccgcaggaggagcaggcggtacctggacgggttcgtcccgggctgtttcgcgtccggcctgaggcggctggggccgcgcaggtagtgtccctgcacttcttgcccgggcgcgtgaggccagctccgctgcgcttgtctccagcttccagccctcctcccctaagccgccgccatcatgctgctgcctgtgttcaccctgaaactgcgccacaaaatcagcccccgaatggtggccatagggcgctacgacgggactcacccgtgcctggcggccgccacccaaacgggcaaggtttttattcataatcctcatacacggaaccagcatgtcagtgcatccagggtcttccagagccccctggaatctgatgtttctcttctcaacattaaccaggcagtcagctgtctgactgcaggcgtattgaaccctgagcttggctatgatgcccttttagtggggacacagactaatcttttggcttatgatgtctacaataattcggatttgttctacagagaggtagcagatggggcaaatgcaattgtgctggggacattgggagacatttcttcccctcttgcgattattggtggcaattgtgctctgcaaggtttcaatcatgaaggaagtgatctcttttggacggttactggagacaatgttaattccttggccttgtgtgactttgatggtgatggaaagaaagagcttcttgttggatctgaggattttgatatccgagtttttaaggaagatgagattgtggcagaaatgacagaaacagagatagtcacctctctttgtcccatgtatggcagtcgatttggttatgccctttccaatggcacagttggagtttatgacaaaacatcccgatactggagaattaaatcgaaaaatcatgccatgagcattcatgcttttgaccttaattctgatggagtgaatgaactgataactggttggtccaatgggaaggttgatgctcgaagtgaccgaactggggaggtcatctttaaggacaatttttcttctgcaattgccggtgtggtagagggagattaccggatggatggccacatacagttaatctgctgctcagtggatggggaaagtaaattgggatgagaaaaatccttaaaaagtcacgttttccatttgattgggtcaaaatatcaggaaatttcacctgaagtatttgtaccgagatcctgtagttctaataaattcaccaaagttggggagaacttaggtttttgtttttaagagcaggtaattgatgacctaaaagtatacctggttatacttgcggttttttccttctgttcagtccggggctacctgcctggcacggctgagatgaggggcaacctcatggacaccagtgcagagcaggacctgatccgagagctgagtcagaagaagcagaatctgttgctggaactccgtaactatgaggaaaatgccaaggctgaattggccagtccactgaacgaggctgatgggcatcggggcataatcccagccaataccaggctccacaccacgctctcagtcagcctggggaatgagacccaaactgctcatacagaattacgcatttccacttctaatgacaccatcatccgagcagtattgatttttgcagaaggaatttttacaggtgaaagccacgtggtacatcccagcattcacaacctctccagttccatctgcatccctattgtgcctcccaaagatgtccctgtggatctgcacttgaaggcattcgtgggttacagaagcagcacccagtttcatgtatttgaatcgacaagacagctccctcgattctccatgtatgcgctgaccagcctggaccctgccagtgagccaatcagttatgttaactttaccattgcagaacgggcacagagggttgttgtatggctcggtcagaactttctgttaccagaagacactcacattcagaatgctccatttcaagtgtgtttcacatctttacggaatggcggccacctgcatataaaaataaaacttagtggagagatcactataaatactgatgatattgatttggctggtgatatcatccagtcaatggcatcattttttgctattgaagaccttcaagtagaagcggattttcctgtctattttgaggaattacgaaaggtgctagttaaggtggatgaatatcattcagtgcatcagaagctcagtgctgatatggctgatcattctaatttgatccgaagtttgctggtcggagctgaggatgctcgtctgatgagggacatgaaaacaatgaagagtcgttatatggaactctatgaccttaatagagacttgctaaatggatataaaattcgctgtaacaatcacacagagctgttgggaaacctcaaagcagtaaatcaagcaattcaaagagcaggtcgtctgcgggttggaaaaccaaagaaccaggtgatcactgcttgtcgggatgcaattcgaagcaataacatcaacacactgttcaaaatcatgcgagtggggacagcttcttcctaggtgaggaaaatacaggtcatgaagttcctggcaaagattttctgttaaaaacctatgctggtttgctttggatcacaccctggtgaaccccgggtgctaagaatgaaaataaccttggtgagttgtacaaattaaagacaaagaactacatgtgaagatagacttgctttctatttttaaatcagtagtagtactgttgctgaataatactaggtttttatggaataggatgaatgcttttgaagtattagggcttcagagtccaattttgcttatttatggtatataaatacatatttttttcttgaaattgcaattgagtttgtacttttcaaatagattatctactttttcattaaaatgtaaagatgtta

SEQ ID NO: 381996 - DNA, 2160 bp, Homo sapiens
tgtcaagtatgcagggtgcagcttggatgtggtgctagaaggggaagcctctgggctgagcatgtaggctcgtcagtagagttcaacccgcaggagtaaattactgcagtgagaaacaaccgcacccgcggcccagcaggggttccactgcgcagccgcaaaaggcgccgaggctccaccgcgcagccacagaaggcgccgaggctccaccgcgcagccgcaaaaagagcggacgggtctgcgccgccgcaggaggagcaggcggtacctggacgggttcgtcccgggctgtttcgcgtccggcctgaggcggctggggccgcgcaggtagtgtccctgcacttcttgcccgggcgcgtgaggccagctccgctgcgcttgtctccagcttccagccctcctcccctaagccgccgccatcatgctgctgcctgtgttcaccctgaaactgcgccacaaaatcagcccccgaatggtggccatagggcgctacgacgggactcacccgtgcctggcggccgccacccaaacgggcaaggtttttattcataatcctcatacacggaaccagcatgtcagtgcatccagggtcttccagagccccctggaatctgatgtttctcttctcaacattaaccaggcagtcagctgtctgactgcaggcgtattgaaccctgagcttggctatgatgcccttttagtggggacacagactaatcttttggcttatgatgtctacaataattcggatttgttctacagagaggtagcagatggggcaaatgcaattgtgctggggacattgggagacatttcttcccctcttgcgattattggtggcaattgtgctctgcaaggtttcaatcatgaaggaagtgatctcttttggacggttactggagacaatgttaattccttggccttgtgtgactttgatggtgatggaaagaaagagcttcttgttggatctgaggattttgatatccgagtttttaaggaagatgagattgtggcagaaatgacagaaacagagatagtcacctctctttgtcccatgtatggcagtcgatttggttatgccctttccaatggcacagttggagtttatgacaaaacatcccgatactggagaattaaatcgaaaaatcatgccatgagcattcatgcttttgaccttaattctgatggagtgaatgaactgataactggttggtccaatgggaaggttgatgctcgaagtgaccgaactggggaggtcatctttaaggacaatttttcttctgcaattgccggtgtggtagagggagattaccggatggatggccacatacagttaatctgctgctcagtggatggggaaatccggggctacctgcctggcacggctgagatgaggggcaacctcatggacaccagtgcagagcaggacctgatccgagagctgagtcagaagaagcagaatctgttgctggaactccgtaactatgaggaaaatgccaaggctgaattggccagtccactgaacgaggctgatgggcatcggggcataatcccagccaataccaggctccacaccacgctctcagtcagcctggggaatgagacccaaactgctcatacagaattacgcatttccacttctaatgacaccatcatccgagcagtattgatttttgcagaaggaatttttacaggtgaaagccacgtggtacatcccagcattcacaacctctccagttccatctgcatccctattgtgcctcccaaagatgtccctgtggatctgcacttgaaggcattcgtgggttacagaagcagcacccagtttcatgtatttgaatcgacaagacagctccctcgattctccatgtatgcgctgaccagcctggaccctgccagtgagccaatcagttatgttaactttaccattgcagaacgggcacagagggtgagtatctcgcttttctctttcaatgcttttacacagtagaatcctttagatgttatttcatagaaagggaaaattacattaatgtgttatattggtagcagtaaatatgatatgaaagaattctctaacttgggggtggcttgtaacctgtaataaaaatattgctaaaataccttctctcactttgaaaaagcatctgagcaatcctc

SEQ ID NO: 381997 - DNA, 815 bp, Homo sapiens
gtgtcttttcatttgtctgggttcaagaagtttgtgaggcctttttcattcctgagtgttcatggtctccaggtggatgaatatcattcagtgcatcagaagctcagtgctgatatggctgatcattctaatttgatccgaagtttgctggtcggagctgaggatgctcgtctgatgagggacatgaaaacaatgaagagtcgttatatggaactctatgaccttaatagagacttgctaaatggatataaaattcgctgtaacaatcacacagagctgttgggaaacctcaaagcagtaaatcaagcaattcaaagagcaggtcgtctgcgggttggaaaaccaaagaaccaggtgatcactgcttgtcgggatgcaattcgaagcaataacatcaacacactgttcaaaatcatgcgagtggggacagcttcttcctaggtgaggaaaatacaggtcatgaagttcctggcaaagattttctgttaaaaacctatgctggtttgctttggatcacaccctggtgaaccccgggtgctaagaatgaaaataaccttggtgagttgtacaaattaaagacaaagaactacatgtgaagatagacttgctttctatttttaaatcagtagtagtactgttgctgaataatactaggtttttatggaataggatgaatgcttttgaagtattagggcttcagagtccaattttgcttatttatggtatataaatacatatttttttcttgaaattgcaattgagtttgtacttttcaaatagattatctactttttcattaaaatgtaaagatgtta

SEQ ID NO: 381998 - DNA, 513 bp, Homo sapiens
gtttccacaattttttttctcgcggcttctttttatacctttctctcgactcttcttttcaaacatgttcctttaatatctttattctcaaggcctaaatacttcgccttacttgagctccaatttcttcatcctaaacttatcctctcaattttcagacttacttcccctcacctttctcataacccttttttaagggacctcgctcctcccaatccacatgtccatgcctccagccctcgcagacctttccttgaatgtctcagccttaagaaactccttcaggagaatttcagaactttcttcaaactcttcttgaatttgaacttggtaatccatgtccagataagtagggttgatccaatcatacaaaatctcatgatcttgtgggatgtgagggctccgaggtatggggggttcaaagtagttgggaggccgagtcaatgatggaccatgaaaccagccacttatagacaaacgtgacttttcttcagacagcacttcagacacctg

SEQ ID NO: 381999 - DNA, 593 bp, Homo sapiens
agtttcttgtgagctgttggctggaggcctcctttgcttccttgacacatggacctcttcatggggcatctcacacaaggtagcttgcttcataaaaggagagcaagtaggagggcaagagacagcactagtaaaacagaagtcatagtctttggtgatgtaataacacaagagacatcccttcacttttgtcacattcttctcattagaagcaagttgctaagtccagccagaactcaagggaaggagattaaacaggactgggaatatgaagaggtgggtattattgggagtcctgtcagaagctgcctgctacagggtctttagctttccttagattttcaaagaggtttgtgatccaagaagaatagagttttgaatctagattttatactaaacgatcactttagattttcaggagtgtgtgcctagtttgtgattaagttattctgcttcctttcttataattgagtttaacttattttcttcttcatattacctccattagttattggaactcaaaggtttaagtggaaaactaaatttaacatttataaatagccaaatttcagacaccaatgatggaataagga

SEQ ID NO: 382000 - DNA, 316 bp, Homo sapiens
ggataatttggtaaggaggaactgccagaaattttagagatgtgagtgcagcaactccggaaggagcttggatgtcattctcttatgttatcattaatgtgaaaattcagaagctgaaatagaacagcaccttccctccaagggtcccacgaatgccccagaggtctctgaccaccatatcacacaggagatggcctgactgacatgtcacagtgacccgtatggagtggcctcagggaatcaactctgttaacccggcagcttgggaaggacaaacaggctgacatatggctgagaagaaaaagtcagacagctc

SEQ ID NO: 382001 - DNA, 191 bp, Homo sapiens
tttttctttcaaatgtatacatatatttgaaatcttaggcatagggaaaaacttttatgtcatcttcagagctacagccatattttttagctagaaccaactcttaaatctctcccgacagaaccttaaggaaggggacaaagtgatctccaatggaaatgtgaaaggcataaaaaggaaaagttagatat

SEQ ID NO: 382002 - DNA, 431 bp, Homo sapiens
aacgaccaaccaaccaaacaaaaatcaagagggtgcagggagatggacattatcccacaccaaagcaggaggctacaatggtctagacctttgtggtggcaatctggaactgtaaaaacttaaatatgtactctttgaccaaattattccaattaataaatatcatgcataaatgcaaagataatgtccaaagttgttcactttagcattatttacatagtagcaagtacctggaagcatctttaaatacatctatcaatgggagattaagtaaatgaattgtgccttatgcatttcataatggcctgcaaatgccaaagattgaagtagatgctgggtgtgatagctcatacctgtaatcccagcagttcgggaggctgaggctggaggactgcttgaagccagaagtttgagatcagcctgggcaacat

SEQ ID NO: 382003 - DNA, 810 bp, Homo sapiens
caaagtgttgtgattgcaggcatgagtcatgctgcctggcaacaagtttaattcttatatggttttaaaatcgatgcttatctaaagagcctttgaaacatgacattttggtatttgttgtgactttactactggccttttgtagcaggtactgggtatctgcccctaccccaaccccgaactctgttagagtatctcgttcacatgtcagacagtgacttttggcccttggaggaagcagaaacctctctcctccatcacgttctgcccatccccttccaggatcctcgtgtttttcctgcttgcctgtgtgcatgcttccccgaatcccagggtgagcacatgggtagcagggtgcgagcactccagcctcagtgtgtgagcagaagggaggagacaccccttcatattgtcttatgcccgatttctgcctccaaagaaagaagaagtaaaaactaaaaggcagaaatgaaatccgcaggcagacagcccggcgcctcaccctaggcctggtagttaaagatctacccctgacctaatcggttatgttatctgtagattacagacattgaagagaaaagcactgtgaaaatccctgtcctgttctgttctgttctaattgccagtgcatgcagcacctagtcacgtactccctgtttgctcaatcaatcacgaccctctcatgcggacccccttagagttgtgagcccttaagagggacaggaattgctcactcggggagttcggtttttaagatgtgagtcttgccgatgctcctggctgaataaagcccttccttctttaacgtga

SEQ ID NO: 382004 - DNA, 853 bp, Homo sapiens
tcagttcaccaagagcagcactgagatgggtggatccaggtgcaccttgaaaagttaattgcacaaacctttgctttgaccccaaatacgcttgctagtgcccttccctgcagcttcccagacaatcagcagggtccatgggggcagggcctgggcacagcaatgccctgcttcctgtctgcatccataagaggcccctccacaccgaggctgctttaggttagccaaccaggtgcaggggaggccccatgcaggtgccattataccaacagtgagcaagaaatcagaaaaaagaggactgccttatgttgagaactgaccagagattgtgctgggccagtgtcactaggagggagaaacagatgatgcaggtcgggatgaggcccctcccagggcttggacactgtccactccctgctgccttagctgccgttgcatagtgtcccctcctgtgcctgggagcttctagcccaggtgtggtgttctcacccacccctgcagacttacagaacttgtaaatagacagcaccttgagatttcatcactttatgcagatttcccacttgggtcgttggggacagggtcttggcctaacagccgtcctctgacatccacaggctcccaccacaccacgattgcagtcatcggggaacttcttttggtgtcaggaatgattggcttaaattaacatttgtttgcaagatcaattattttttagcatatagtttctctccaaagaagcaactaggtctttaaagatgtcccagtgcttctgttagatttttgactcttacctgcataatattccaaagcactcagatcaaaataagacttttcccagcaagtagactca

SEQ ID NO: 382005 - DNA, 365 bp, Homo sapiens
ttattttcctacctaaaggattatttttagagaatgtgccaagtgattatatctctcatttttgtagatggttacagtcatcctcattttacagatttcctggaggctaaatcaggagcagcattaccatttctgattccttagtctagtgttacatattctgtcttgcctggaaattttaataattacagctcagcactttgtggttgagaagagggctgaagattcattcacttgatggtgaggatgtctaggaacctagtcctttcactttgaatgtgttagtgtactcaggtaagaaacaccactaacagtttagtggtgttcactgaactattcaaggaatccagtcacaagaagagcag

SEQ ID NO: 382006 - DNA, 347 bp, Homo sapiens
gagcactgcagtattcactacatgaagtatattttgcactgtggacacaaattagaaaaattgcaagtagtggtatattgtaattggcatgcactatatgagcagagtcaatgtgtctccttgtagaatattctctgatgatactcactattatcccctctctgctaagctttgttctgtgtctgaagggcataaagcatggaaactacatttttcagactccattaccagaaggatatggttggatttcagcaatgagtgggctttgcataaaatttggaagacgaaagagaagaaaaacctggctgctgcaggttggaacactggcaacaatagatacggagttt

SEQ ID NO: 382007 - DNA, 777 bp, Homo sapiens
ggtcttaaactcctggtttcaagtgatcctcctgccttagaccctcaaagtgctgggattacaggcctgtgccagcacacctggccccccgattcttcaaaagctttcagagaaagcattgtagaagacatgactttgtgactgtatgtttcatctcatcctacatcactaggaaggctcattcttaagaagtcatgccccatggaaaaggggatgaagacaaatcagaaaagggcaaagggaagtcacagcaaaaaaagggacagtataatcctggaaccttattaaagtcacacaactgctgcttcaattagagcaattcgtttggcaaacaccgcttgaaccctttcaattgtatgttggctcacctgtaatgtctggagcagtctatagactaggttttctagagtttctgaagcatcttccaattacaacggcaatctgacacatttctgaattgcagtctgaatccagtgttcatgtgaaccttttgtgtagtccacatcagcaggcacaaaagttgtttatatataagttgctatgatttctccagaagtttacataagtcgtctagtttcagcttgcaaggtttaatctatccatcttacaaaagactaatatccagaatctacaagaaacttaaacaaatttacaagaaaaaaacaaacaactccatcaaaaagtgtgcaaagcacaggaacagacacttctcaaaataagacatttatgtgaccaacaaacatatgaaaaaaagcccatcatcactggtcattagag

SEQ ID NO: 382008 - DNA, 461 bp, Homo sapiens
aggcattgcccaagggatggctgggtcctgagtacaggggacccgggggtacaagtagggtgagagtggggcccaagccacccctcaaagacttgggctttgtctcggcctcttgggcttggatagagaacagtgcccagtgtgactcccccaaatatctgacctcttcgtcctgctctgcctgaatggatgtgtgaccttgagcaaatcactgccccttcctgagactcagttttctcacctataaaatgagaacaataaaccccaccctgcccacctcccagggctgctgccaggtcagaggtgaagaagggctttgcacctggtgaagtaactaacccaaggtctggctttcattctacactgtcgactgcatctgcagccaaagtctggggactctgcaggtgggacttggtccagaggggactggcaaagatgctttcagagctcccctcccaccc

SEQ ID NO: 382009 - DNA, 134 bp, Homo sapiens
ttcttttagcaattcgtttctgtctccttaaaaaaaaagaagaagaccaggaaaggtggcttatgcctgtatcctagcactttgggaggccgaggcaggaggattgcttgaggccaggagttagagaccatcct

SEQ ID NO: 382010 - DNA, 1019 bp, Homo sapiens
gatggggtcagacaggagggaggcaaggaacagagccaagggcagaggtgggacagtgggctgggaggtggcgaggaggccctttattgaggggccagcttagatcccccagccccaaggtcctctgtcctccccctcccccaaaagctttgtcccagccccctacccactgggacctctgtttgtagtcagagtttgtttggctacttcctttgcaacccccacccccaacctttttctgcatggtagatgaaaaattgaaagtacctctgattggtccctttccacaaccaatgaggctggtcatgggccaagtcttcatttgcataggagtataactttgtaacttcacttcagccttttcccaatcaatcagagatttgcatagggtgtaactttgaaacttgcttcagcctctgataggtcccctccctcaaccaatcagactgattgtgggcactacttcatttacaagggtgtacatcaagtaaccaatgggaaacctctagaggatatttaacccccaaaaaattcggtaaccaggctcttgaaccacttgctcaagccactcccaccctgtgaagtgtaccttcattttcaataaatctctgcttttgttgcctcattcaaaaaaaaaacaaaaaaaagaacacaccgaaaaaaagaaaaagaaaacacacccgaacaaagacagaagggagggagcggccaaagaaaacacacaagagaggggcagaaagaggggtgcggccgcgacaccacagagattgtgagtaagaaactaacggggaccgccacccatctgagaggcgtcaagcggcacgatagttcacgcacgcagaagaaagccaagaccagcgacgatgagaaatacagtagaacaaggacaggggagctagaacagaaagagggggaaccagaagggagagaaacatctgtgcagaagcaggagcgcgaacaacactaatgcgtggtggaggagaaagaagagggcggcgacactacgtcgtacgagaaga

SEQ ID NO: 382011 - DNA, 211 bp, Homo sapiens
accaggtcagggcaaagagtggggggtgcacgttcaagaatcttgagggctgttggagaagatctgaggacagtgccacagaaccatccttttctgattcagtcccccgaagcactttgctcatgtgggatgagtggacctttcaggctggaaagtggggagctgggcctgggtgacatggcaagaacctgtctctacaaaaaatacaaaa

SEQ ID NO: 382012 - DNA, 374 bp, Homo sapiens
tgtggttgtgctccaataaaagtttatttatggacatagaaatttaggtctcatatcaggctttgaagaaaattaaagaaaggaatatttttgtccttttatgaaacagtaaattttgattgaattataaatggatctactgacaactcattttaaaatttatttccaataagcaagacattttagaaactctgatttagctttcttttatttgtattttatgttttttctggttcatgttttgccccctatattgattatagctaatagcctaatattaatatattttattgaggattaggttaatattaattgagtggcccaaatgatggggtgtctgtgctgagtgtttctgataaggcagtcaagtatag

SEQ ID NO: 382013 - DNA, 350 bp, Homo sapiens
ataggagaaaaaccgccctatggtgggaggtgagacatgtttgcagtaatgctgctttgttattctttactccactgagatgtttgggtggagagaaacataaatctggcctacatgcacgtccaggcatagtaccttcccttgaacttaattatgatatagattcttttgctcacatgttttttgttgaccttctccttattatcaccctgctctcctactacattcctttttgctgaaataatgaaaataataatcaataaaaactgagggaactcagaggccggtgccggtgcaggtccttggtgtgctgagtgccggtctcctgggcccactattgtttctctata

SEQ ID NO: 382014 - DNA, 1720 bp, Homo sapiens
  misc_feature (1714)..(1716): n is a, c, g, or t
  misc_feature (1718)..(1720): n is a, c, g, or t
atgctgggggaggggctggcggcctcgacggcagctgcggaactaggccgagggacaaaggctaagtttttccatggtttggactggatatcggtggaactctggtcaagctggtatattttgaacccaaagacatcactgctgaagaagaagaggaagaagtggaaagtcttaaaagcattcggaagtacctgacctccaatgtggcttatgggtctacaggcattcgggacgtgcacctcgagctgaaggacctgactctgtgtggacgcaaaggcaatctgcactttatacgctttcccactcatgacatgcctgcttttattcaaatgggcagagataaaaacttctcgagtctccacactgtcttttgtgccactggaggtggagcgtacaaatttgagcaggattttctcacaataggtgatcttcagctttgcaaactggatgaactagattgcttgatcaaaggaattttatacattgactcagtcggattcaatggacggtcacagtgctattactttgaaaaccctgctgattctgaaaagtgtcagaagttaccatttgatttgaaaaatccgtatcctctgcttctggtgaacattggctcaggggttagcatcttagcagtatattccaaagataattacaaacgggtcacaggtactagtcttggaggaggaactttttttggtctctgctgtcttcttactggctgtaccacttttgaagaagctcttgaaatggcatctcgtggagatagcaccaaagtggataaactagtacgagatatttatggaggggactatgagaggtttggactgccaggctgggctgtggcttcaagctttggaaacatgatgagcaaggagaagcgagaggctgtcagtaaagaggacctggccagagcgactttgatcaccatcaccaacaacattggctcaatagcaagaatgtgtgcccttaatgaaaacattaaccaggtggtatttgttggaaatttcttgagaattaatacgatcgccatgcggcttttggcatatgctttggattattggtccaaggggcagttgaaagcacttttttcggaacacgagggttattttggagctgttggagcactccttgagctgttgaagatcccgtgatcattacctggggaggggttcctgaaaccttccacaatgggatctgtggactttcatttttttaagagacttactcaatttcatgactgtactacctgaaacaaagtgagaaaggacaggtgtatttttctaagtcatcaagataaatccttaagaattcagtctaaattagcaaccaggaaggaaaaatatattaaaaacaacaaaaaagtggcacatgtccaggcagtgtgaggatttgctgtatataagttgcctgctttgtatttttgaaatctctgcatcactcattggaagtgcttctgaagagagctgctctgtgttcagttgactggttttgtgtcctgtttgaacttgctgaatgtaaggcaggctactatgcgttataatctaatcacaatttgtcaatatggtcttggcaatcatctgtgcattactctggtttgcattaagcctgtgtgtgaacttactgtaaaacatgttttatttcaaggttctgcaaattaattgggcaggttaattgtgtacctgaaacttaacaagcagtttttggaagggcaaannnannn

SEQ ID NO: 382015 - DNA, 1046 bp, Homo sapiens
  misc_feature (1040)..(1042): n is a, c, g, or t
  misc_feature (1044)..(1046): n is a, c, g, or t
acaacttcacctgtttcattgcactttgcatccgacctcgccttcattccttagttgtctggaaatgctccaggcctctgctgcttctcacctcattccccagaaacagtcaggttctgtctcttaccagaggtaactgagctgctgctggcctcatagctcctgtcgccctcactgcgggtttggttttcctcttatcacagtggtctgaagtgcttggatagtctaggacatccagccccctccccagacagggactccttagggcgtctctgctcccaggctggccttggcccttctggggtgctcaggaaatgggtatgctgtgtgtgggcagtggttggctttaacactagtcatcatgtgtaaggtgatttgaataagtctaaggaaaattgcacttatttttggtgtattttctttcagggttattttggagctgttggagcactccttgagctgttgaagatcccgtgatcattacctggggaggggttcctgaaaccttccacaatgggatctgtggactttcatttttttaagagacttactcaatttcatgactgtactacctgaaacaaagtgagaaaggacaggtgtatttttctaagtcatcaagataaatccttaagaattcagtctaaattagcaaccaggaaggaaaaatatattaaaaacaacaaaaaagtggcacatgtccaggcagtgtgaggatttgctgtatataagttgcctgctttgtatttttgaaatctctgcatcactcattggaagtgcttctgaagagagctgctctgtgttcagttgactggttttgtgtcctgtttgaacttgctgaatgtaaggcaggctactatgcgttataatctaatcacaatttgtcaatatggtcttggcaatcatctgtgcattactctggtttgcattaagcctgtgtgtgaacttactgtaaaacatgttttatttcaaggttctgcaaattaattgggcaggttaattgtgtacctgaaacttaacaagcagtttttggaagggcaaannnannn

SEQ ID NO: 382016 - DNA, 443 bp, Homo sapiens
tttttcccgcgcgcggacactgtccccgcacggtggtccctcgttggtgcgtggcctgacatccggctggaggcctcgggtgctccgaaagcggtaccttcgggggcccccccgcacccattggtatgcacttcccgcttgttggagtggagggcttttccccaggacctgtcctcccttttcttagctccttgggcattctcttcctgagggtcacatgattttatcctcgagaaggcttcttttgactcatttccacctcctttcctcccaaatcctttgaatccccaatgtttgttttccgtgggtttttgcatctctcctccttcttagtgtgggttgtctcttcatgaagaaccagcggaactcaaaactgctgttcaagaaacctcttcaagacttttgacttagaacctgctatattatcaagcttacctactgtt

SEQ ID NO: 382017 - DNA, 2401 bp, Homo sapiens
  misc_feature (2395)..(2397): n is a, c, g, or t
  misc_feature (2399)..(2401): n is a, c, g, or t
atgctgggggaggggctggcggcctcgacggcagctgcggaactaggccgagggacaaaggctaaggtcagccgcggttcaagccctttcgtctgccgacgaccagcggccagacgctgcgggagcactgctgggctggaggagggctcgagctgcgaggacggcacggagcagcggggtgggactcggggtcgccccaggagagttccgcggcccgggggggcagaggcatgcacaagtggggggcggaaggagggggtggatgaggaggctcgggcccttccacccacgcgtccattgggcggcgccgccatcactctcttctgggctacaccgccttctcttcctccgcggaacccggatcccctcctccaccaccctctccccgccccgtcacgatagcctctcattggacggaggcacggtcaatcctcctcgagttagggagccgactggacgcgaggcctttgggccgtccccagcctcgtcggattggcttcctgcgcgttggcgcaacggaagaggcggccggccgagggcgcgcctctgctctggctggactgccgcggaggaggcgagaaggaatccgacgctggggggcttgctcgggcggcagcgactgctgctgcggatgggagcgggccggctcggcgcgcccatggagcgccacggcagggcttccgccacctccgtctcgtcggctggggagcaggcggccggggaccccgaagggcggcggcaggagccactgcggcgccgggcgagcagcgcgtcggtgcccgcggtcggggcctcggctgagggcacgaggcgggatcgactgggctcttacagcggccccacctcggtctcccgccagcgcgtcgaaagcctgaggaaaaagcggccgctttttccatggtttggactggatatcggtggaactctggtcaagctggtatattttgaacccaaagacatcactgctgaagaagaagaggaagaagtggaaagtcttaaaagcattcggaagtacctgacctccaatgtggcttatgggtctacaggcattcgggacgtgcacctcgagctgaaggacctgactctgtgtggacgcaaagataggtgatcttcagctttgcaaactggatgaactagattgcttgatcaaaggaattttatacattgactcagtcggattcaatggacggtcacagtgctattactttgaaaaccctgctgattctgaaaagtgtcagaagttaccatttgatttgaaaaatccgtatcctctgcttctggtgaacattggctcaggggttagcatcttagcagtatattccaaagataattacaaacgggtcacaggtactagtcttggaggaggaactttttttggtctctgctgtcttcttactggctgtaccacttttgaagaagctcttgaaatggcatctcgtggagatagcaccaaagtggataaactagtacgagatatttatggaggggactatgagaggtttggactgccaggctgggctgtggcttcaagctttggaaacatgatgagcaaggagaagcgagaggctgtcagtaaagaggacctggccagagcgactttgatcaccatcaccaacaacattggctcaatagcaagaatgtgtgcccttaatgaaaacattaaccaggtggtatttgttggaaatttcttgagaattaatacgatcgccatgcggcttttggcatatgctttggattattggtccaaggggcagttgaaagcacttttttcggaacacgagggttattttggagctgttggagcactccttgagctgttgaagatcccgtgatcattacctggggaggggttcctgaaaccttccacaatgggatctgtggactttcatttttttaagagacttactcaatttcatgactgtactacctgaaacaaagtgagaaaggacaggtgtatttttctaagtcatcaagataaatccttaagaattcagtctaaattagcaaccaggaaggaaaaatatattaaaaacaacaaaaaagtggcacatgtccaggcagtgtgaggatttgctgtatataagttgcctgctttgtatttttgaaatctctgcatcactcattggaagtgcttctgaagagagctgctctgtgttcagttgactggttttgtgtcctgtttgaacttgctgaatgtaaggcaggctactatgcgttataatctaatcacaatttgtcaatatggtcttggcaatcatctgtgcattactctggtttgcattaagcctgtgtgtgaacttactgtaaaacatgttttatttcaaggttctgcaaattaattgggcaggttaattgtgtacctgaaacttaacaagcagtttttggaagggcaaannnannn

SEQ ID NO: 382018 - DNA, 3171 bp, Homo sapiens
  misc_feature (3165)..(3167): n is a, c, g, or t
  misc_feature (3169)..(3171): n is a, c, g, or t
atgctgggggaggggctggcggcctcgacggcagctgcggaactaggccgagggacaaaggctaaggtcagccgcggttcaagccctttcgtctgccgacgaccagcggccagacgctgcgggagcactgctgggctggaggagggctcgagctgcgaggacggcacggagcagcggggtgggactcggggtcgccccaggagagttccgcggcccgggggggcagaggcatgcacaagtggggggcggaaggagggggtggatgaggaggctcgggcccttccacccacgcgtccattgggcggcgccgccatcactctcttctgggctacaccgccttctcttcctccgcggaacccggatcccctcctccaccaccctctccccgccccgtcacgatagcctctcattggacggaggcacggtcaatcctcctcgagttagggagccgactggacgcgaggcctttgggccgtccccagcctcgtcggattggcttcctgcgcgttggcgcaacggaagaggcggccggccgagggcgcgcctctgctctggctggactgccgcggaggaggcgagaaggaatccgacgctggggggcttgctcgggcggcagcgactgctgctgcggatgggagcgggccggctcggcgcgcccatggagcgccacggcagggcttccgccacctccgtctcgtcggctggggagcaggcggccggggaccccgaagggcggcggcaggagccactgcggcgccgggcgagcagcgcgtcggtgcccgcggtcggggcctcggctgagggcacgaggcgggatcgactgggctcttacagcggccccacctcggtctcccgccagcgcgtcgaaagcctgaggaaaaagcggccgctttttccatggtttggactggatatcggtggaactctggtcaagctggtatattttgaacccaaagacatcactgctgaagaagaagaggaagaagtggaaagtcttaaaagcattcggaagtacctgacctccaatgtggcttatgggtctacaggcattcgggacgtgcacctcgagctgaaggacctgactctgtgtggacgcaaaggcaatctgcactttatacgctttcccactcatgacatgcctgcttttattcaaatgggcagagataaaaacttctcgagtctccacactgtcttttgtgccactggaggtggagcgtacaaatttgagcaggattttctcacagtatgcattttttagcttatatacaatttatggtaatttgattgttaaaaataatgccagtagcaagtggtgaaataatttccatctctaatggaacttgaattttcttgagtcaaatgaagattaaaggtacgctagtgataggagttggccatctagaggtggttgtctagttcagatgtatggacgacaatcagagccactaaaagggtagcattttattgctcctttagtatgaaaaattagggcatctgctatacgttgaggaagaaactacctaaaaggaacatcattagatcatgaacaatgagattgaaatataattaaaatcatttcatgtcataaaattgttttcagtcttgtctaccacataatttctcttgtctccctcagttgtttgctggcatgttcactaactgaaaaaaataaggaactctggtcaaaagtggtgttttcaggctcagggctggtctgagatgggtgactgcagagccctcctctcccagaatgctttctgatgtgttctgtgctgcacacttaactggagtctcgccaccatgtctggcccctggggaatgctgccaggcgctctatcttgctttcattgagtgaacactggagaacattataggtgatcttcagctttgcaaactggatgaactagattgcttgatcaaaggaattttatacattgactcagtcggattcaatggacggtcacagtgctattactttgaaaaccctgctgattctgaaaagtgtcagaagttaccatttgatttgaaaaatccgtatcctctgcttctggtgaacattggctcaggggttagcatcttagcagtatattccaaagataattacaaacgggtcacaggtactagtcttggaggaggaactttttttggtctctgctgtcttcttactggctgtaccacttttgaagaagctcttgaaatggcatctcgtggagatagcaccaaagtggataaactagtacgagatatttatggaggggactatgagaggtttggactgccaggctgggctgtggcttcaagctttggaaacatgatgagcaaggagaagcgagaggctgtcagtaaagaggacctggccagagcgactttgatcaccatcaccaacaacattggctcaatagcaagaatgtgtgcccttaatgaaaacattaaccaggtggtatttgttggaaatttcttgagaattaatacgatcgccatgcggcttttggcatatgctttggattattggtccaaggggcagttgaaagcacttttttcggaacacgagggttattttggagctgttggagcactccttgagctgttgaagatcccgtgatcattacctggggaggggttcctgaaaccttccacaatgggatctgtggactttcatttttttaagagacttactcaatttcatgactgtactacctgaaacaaagtgagaaaggacaggtgtatttttctaagtcatcaagataaatccttaagaattcagtctaaattagcaaccaggaaggaaaaatatattaaaaacaacaaaaaagtggcacatgtccaggcagtgtgaggatttgctgtatataagttgcctgctttgtatttttgaaatctctgcatcactcattggaagtgcttctgaagagagctgctctgtgttcagttgactggttttgtgtcctgtttgaacttgctgaatgtaaggcaggctactatgcgttataatctaatcacaatttgtcaatatggtcttggcaatcatctgtgcattactctggtttgcattaagcctgtgtgtgaacttactgtaaaacatgttttatttcaaggttctgcaaattaattgggcaggttaattgtgtacctgaaacttaacaagcagtttttggaagggcaaannnannn

SEQ ID NO: 382019 - DNA, 1689 bp, Homo sapiens
  misc_feature (1683)..(1685): n is a, c, g, or t
  misc_feature (1687)..(1689): n is a, c, g, or t
atgctgggggaggggctggcggcctcgacggcagctgcggaactaggccgagggacaaaggctaaggtcagccgcggttcaagccctttcgtctgccgacgaccagcggccagacgctgcgggagcactgctgggctggaggagggctcgagctgcgaggacggcacggagcagcgggtttttccatggtttggactggatatcggtggaactctggtcaagctggtatattttgaacccaaagacatcactgctgaagaagaagaggaagaagtggaaagtcttaaaagcattcggaagtacctgacctccaatgtggcttatgggtctacaggcattcgggacgtgcacctcgagctgaaggacctgactctgtgtggacgcaaagataggtgatcttcagctttgcaaactggatgaactagattgcttgatcaaaggaattttatacattgactcagtcggattcaatggacggtcacagtgctattactttgaaaaccctgctgattctgaaaagtgtcagaagttaccatttgatttgaaaaatccgtatcctctgcttctggtgaacattggctcaggggttagcatcttagcagtatattccaaagataattacaaacgggtcacaggtactagtcttggaggaggaactttttttggtctctgctgtcttcttactggctgtaccacttttgaagaagctcttgaaatggcatctcgtggagatagcaccaaagtggataaactagtacgagatatttatggaggggactatgagaggtttggactgccaggctgggctgtggcttcaagctttggaaacatgatgagcaaggagaagcgagaggctgtcagtaaagaggacctggccagagcgactttgatcaccatcaccaacaacattggctcaatagcaagaatgtgtgcccttaatgaaaacattaaccaggtggtatttgttggaaatttcttgagaattaatacgatcgccatgcggcttttggcatatgctttggattattggtccaaggggcagttgaaagcacttttttcggaacacgagggttattttggagctgttggagcactccttgagctgttgaagatcccgtgatcattacctggggaggggttcctgaaaccttccacaatgggatctgtggactttcatttttttaagagacttactcaatttcatgactgtactacctgaaacaaagtgagaaaggacaggtgtatttttctaagtcatcaagataaatccttaagaattcagtctaaattagcaaccaggaaggaaaaatatattaaaaacaacaaaaaagtggcacatgtccaggcagtgtgaggatttgctgtatataagttgcctgctttgtatttttgaaatctctgcatcactcattggaagtgcttctgaagagagctgctctgtgttcagttgactggttttgtgtcctgtttgaacttgctgaatgtaaggcaggctactatgcgttataatctaatcacaatttgtcaatatggtcttggcaatcatctgtgcattactctggtttgcattaagcctgtgtgtgaacttactgtaaaacatgttttatttcaaggttctgcaaattaattgggcaggttaattgtgtacctgaaacttaacaagcagtttttggaagggcaaannnannn

SEQ ID NO: 382020 - DNA, 1679 bp, Homo sapiens
  misc_feature (1673)..(1675): n is a, c, g, or t
  misc_feature (1677)..(1679): n is a, c, g, or t
agatgggatctcttatgttgcccaggctggtcttgaattcctcctggtctcaagcgatcttcccacttcggcctcccaaagtgctgggatatagacgggagccattgtgcccgacctggcagtcgtctactaagagctttggtaactcattagcctcgtggctctgagtttttccatggtttggactggatatcggtggaactctggtcaagctggtatattttgaacccaaagacatcactgctgaagaagaagaggaagaagtggaaagtcttaaaagcattcggaagtacctgacctccaatgtggcttatgggtctacaggcattcgggacgtgcacctcgagctgaaggacctgactctgtgtggacgcaaagataggtgatcttcagctttgcaaactggatgaactagattgcttgatcaaaggaattttatacattgactcagtcggattcaatggacggtcacagtgctattactttgaaaaccctgctgattctgaaaagtgtcagaagttaccatttgatttgaaaaatccgtatcctctgcttctggtgaacattggctcaggggttagcatcttagcagtatattccaaagataattacaaacgggtcacaggtactagtcttggaggaggaactttttttggtctctgctgtcttcttactggctgtaccacttttgaagaagctcttgaaatggcatctcgtggagatagcaccaaagtggataaactagtacgagatatttatggaggggactatgagaggtttggactgccaggctgggctgtggcttcaagctttggaaacatgatgagcaaggagaagcgagaggctgtcagtaaagaggacctggccagagcgactttgatcaccatcaccaacaacattggctcaatagcaagaatgtgtgcccttaatgaaaacattaaccaggtggtatttgttggaaatttcttgagaattaatacgatcgccatgcggcttttggcatatgctttggattattggtccaaggggcagttgaaagcacttttttcggaacacgagggttattttggagctgttggagcactccttgagctgttgaagatcccgtgatcattacctggggaggggttcctgaaaccttccacaatgggatctgtggactttcatttttttaagagacttactcaatttcatgactgtactacctgaaacaaagtgagaaaggacaggtgtatttttctaagtcatcaagataaatccttaagaattcagtctaaattagcaaccaggaaggaaaaatatattaaaaacaacaaaaaagtggcacatgtccaggcagtgtgaggatttgctgtatataagttgcctgctttgtatttttgaaatctctgcatcactcattggaagtgcttctgaagagagctgctctgtgttcagttgactggttttgtgtcctgtttgaacttgctgaatgtaaggcaggctactatgcgttataatctaatcacaatttgtcaatatggtcttggcaatcatctgtgcattactctggtttgcattaagcctgtgtgtgaacttactgtaaaacatgttttatttcaaggttctgcaaattaattgggcaggttaattgtgtacctgaaacttaacaagcagtttttggaagggcaaannnannn

SEQ ID NO: 382021 - DNA, 1891 bp, Homo sapiens
  misc_feature (1790)..(1790): n is a, c, g, or t
  misc_feature (1801)..(1801): n is a, c, g, or t
  misc_feature (1806)..(1806): n is a, c, g, or t
  misc_feature (1814)..(1814): n is a, c, g, or t
atgctgggggaggggctggcggcctcgacggcagctgcggaactaggccgagggacaaaggctaaggtcagccgcggttcaagccctttcgtctgccgacgaccagcggccagacgctgcgggagcactgctgggctggaggagggctcgagctgcgaggacggcacggagcagcggggtgggactcggggtcgccccaggagagttccgcggcccgggggggcagaggcatgcacaagtggggggcggaaggagggggtggatgaggaggctcgggcccttccacccacgcgtccattgggcggcgccgccatcactctcttctgggctacaccgccttctcttcctccgcggaacccggatcccctcctccaccaccctctccccgccccgtcacgatagcctctcattggacggaggcacggtcaatcctcctcgagttagggagccgactggacgcgaggcctttgggccgtccccagcctcgtcggattggcttcctgcgcgttggcgcaacggaagaggcggccggccgagggcgcgcctctgctctggctggactgccgcggaggaggcgagaaggaatccgacgctggggggcttgctcgggcggcagcgactgctgctgcggatgggagcgggccggctcggcgcgcccatggagcgccacggcagggcttccgccacctccgtctcgtcggctggggagcaggcggccggggaccccgaagggcggcggcaggagccactgcggcgccgggcgagcagcgcgtcggtgcccgcggtcggggcctcggctgagggcacgaggcgggatcgactgggctcttacagcggccccacctcggtctcccgccagcgcgtcgaaagcctgaggaaaaagcggccgctttttccatggtttggactggatatcggtggaactctggtcaagctggtatattttgaacccaaagacatcactgctgaagaagaagaggaagaagtggaaagtcttaaaagcattcggaagtacctgacctccaatgtggcttatgggtctacaggcattcgggacgtgcacctcgagctgaaggacctgactctgtgtggacgcaaagataggtgatcttcagctttgcaaactggatgaactagattgcttgatcaaaggaattttatacattgactcagtcggattcaatggacggtcacagtgctattactttgaaaaccctgctgattctgaaaagtgtcagaagttaccatttgatttgaaaaatccgtatcctctgcttctggtgaacattggctcaggggttagcatcttagcagtatattccaaagataattacaaacgggtcacaggtactagtcttggaggaggaactttttttggtctctgctgtcttcttactggctgtaccacttttgaagaagctcttgaaatggcatctcgtggagatagcaccaaagtggataaactagtacgagatatttatggaggggactatgagaggtttggactgccaggctgggctgtggcttcaagctttggaaacatgatgagcaaggagaagcgagaggctgtcagtaaagaggacctggccagagcgactttgatcaccatcaccaacaacattggctcaatagcaagaatgtgtgcccttaatgaaaacattaaccaggtggtatttgttggaaatttcttgagaattaatacgatcgccatgcggcttttggcatatgctttggattattggtccaaggggcagttgaaagcacttttttcggaacacgaggttttgggncgtgggccccnggcgngaaaccgncaacggggggggcccagaccccccaggcggggccttttagaacccccctggcccgaccgagagggtgttctccacca

SEQ ID NO: 382022 - DNA, 2264 bp, Homo sapiens
atgctgggggaggggctggcggcctcgacggcagctgcggaactaggccgagggacaaaggctaaggtcagccgcggttcaagccctttcgtctgccgacgaccagcggccagacgctgcgggagcactgctgggctggaggagggctcgagctgcgaggacggcacggagcagcggggtgggactcggggtcgccccaggagagttccgcggcccgggggggcagaggcatgcacaagtggggggcggaaggagggggtggatgaggaggctcgggcccttccacccacgcgtccattgggcggcgccgccatcactctcttctgggctacaccgccttctcttcctccgcggaacccggatcccctcctccaccaccctctccccgccccgtcacgatagcctctcattggacggaggcacggtcaatcctcctcgagttagggagccgactggacgcgaggcctttgggccgtccccagcctcgtcggattggcttcctgcgcgttggcgcaacggaagaggcggccggccgagggcgcgcctctgctctggctggactgccgcggaggaggcgagaaggaatccgacgctggggggcttgctcgggcggcagcgactgctgctgcggatgggagcgggccggctcggcgcgcccatggagcgccacggcagggcttccgccacctccgtctcgtcggctggggagcaggcggccggggaccccgaagggcggcggcaggagccactgcggcgccgggcgagcagcgcgtcggtgcccgcggtcggggcctcggctgagggcacgaggcgggatcgactgggctcttacagcggccccacctcggtctcccgccagcgcgtcgaaagcctgaggaaaaagcggccgctttttccatggtttggactggatatcggtggaactctggtcaagctggtatattttgaacccaaagacatcactgctgaagaagaagaggaagaagtggaaagtcttaaaagcattcggaagtacctgacctccaatgtggcttatgggtctacaggcattcgggacgtgcacctcgagctgaaggacctgactctgtgtggacgcaaaggcaatctgcactttatacgctttcccactcatgacatgcctgcttttattcaaatgggcagagataaaaacttctcgagtctccacactgtcttttgtgccactggaggtggagcgtacaaatttgagcaggattttctcacagtatgcattttttagcttatatacaatttatggtaatttgattgttaaaaataatgccagtagcaagtggtgaaataatttccatctctaatggaacttgaattttcttgagtcaaatgaagattaaaggtacgctagtgataggagttggccatctagaggtggttgtctagttcagatgtatggacgacaatcagagccactaaaagggtagcattttattgctcctttagtatgaaaaattagggcatctgctatacgttgaggaagaaactacctaaaaggaacatcattagatcatgaacaatgagattgaaatataattaaaatcatttcatgtcataaaattgttttcagtcttgtctaccacataatttctcttgtctccctcagttgtttgctggcatgttcactaactgaaaaaaataaggaactctggtcaaaagtggtgttttcaggctcagggctggtctgagatgggtgactgcagagccctcctctcccagaatgctttctgatgtgttctgtgctgcacacttaactggagtctcgccaccatgtctggcccctggggaatgctgccaggcgctctatcttgctttcattgagtgaacactggagaacattataggtgatcttcagctttgcaaactggatgaactagattgcttgatcaaaggaattttatacattgactcagtcggattcaatggacggtcacagtgctattactttgaaaaccctgctgattctgaaaagtgtcagaagttaccatttgatttgaaaaatccgtatcctctgcttctggtgaacattggctcaggggttagcatcttagcagtatattccaaagataattacaaacgggtcacaggtactagtcttggaggaggaactttttttggtctctgctgtcttcttactggctgtaccacttttgaataaaagcaggcatgtcatgagtgggtccgcgtataaagtgcagattgccttagagtccacacagagttagatcctctct

SEQ ID NO: 382023 - DNA, 1643 bp, Homo sapiens
atgctgggggaggggctggcggcctcgacggcagctgcggaactaggccgagggacaaaggctaaggtcagccgcggttcaagccctttcgtctgccgacgaccagcggccagacgctgcgggagcactgctgggctggaggagggctcgagctgcgaggacggcacggagcagcggggtgggactcggggtcgccccaggagagttccgcggcccgggggggcagaggcatgcacaagtggggggcggaaggagggggtggatgaggaggctcgggcccttccacccacgcgtccattgggcggcgccgccatcactctcttctgggctacaccgccttctcttcctccgcggaacccggatcccctcctccaccaccctctccccgccccgtcacgatagcctctcattggacggaggcacggtcaatcctcctcgagttagggagccgactggacgcgaggcctttgggccgtccccagcctcgtcggattggcttcctgcgcgttggcgcaacggaagaggcggccggccgagggcgcgcctctgctctggctggactgccgcggaggaggcgagaaggaatccgacgctggggggcttgctcgggcggcagcgactgctgctgcggatgggagcgggccggctcggcgcgcccatggagcgccacggcagggcttccgccacctccgtctcgtcggctggggagcaggcggccggggaccccgaagggcggcggcaggagccactgcggcgccgggcgagcagcgcgtcggtgcccgcggtcggggcctcggctgagggcacgaggcgggatcgactgggctcttacagcggccccacctcggtctcccgccagcgcgtcgaaagcctgaggaaaaagcggccgctttttccatggtttggactggatatcggtggaactctggtcaagctggtatattttgaacccaaagacatcactgctgaagaagaagaggaagaagtggaaagtcttaaaagcattcggaagtacctgacctccaatgtggcttatgggtctacaggcattcgggacgtgcacctcgagctgaaggacctgactctgtgtggacgcaaaggcaatctgcactttatacgctttcccactcatgacatgcctgcttttattcaaatgggcagagataaaaacttctcgagtctccacactgtcttttgtgccactggaggtggagcgtacaaatttgagcaggattttctcacaataggtgatcttcagctttgcaaactggatgaactagattgcttgatcaaaggaattttatacattgactcagtcggattcaatggacggtcacagtgctattactttgaaaaccctgctgattctgaaaagtgtcagaagttaccatttgatttgaaaaatccgtatcctctgcttctggtgaacattggctcaggggttagcatcttagcagtatattccaaagataattacaaacgggtcacaggtactagttttggggggaggaacttttttggggtctggtgggtttttactgggtgggccacattttgaagaaaaacctttaaagggcacctcgtggagaagggacccaagcggattaacttttctcccgatatattttggggggggccttatc

SEQ ID NO: 382024 - DNA, 950 bp, Homo sapiens
atgctgggggaggggctggcggcctcgacggcagctgcggaactaggccgagggacaaaggctaaggtcagccgcggttcaagccctttcgtctgccgacgaccagcggccagacgctgcgggagcactgctgggctggaggagggctcgagctgcgaggacggcacggagcagcggggtgggactcggggtcgccccaggagagttccgcggcccgggggggcagaggcatgcacaagtggggggcggaaggagggggtggatgaggaggctcgggcccttccacccacgcgtccattgggcggcgccgccatcactctcttctgggctacaccgccttctcttcctccgcggaacccggatcccctcctccaccaccctctccccgccccgtcacgatagcctctcattggacggaggcacggtcaatcctcctcgagttagggagccgactggacgcgaggcctttgggccgtccccagcctcgtcggattggcttcctgcgcgttggcgcaacggaagaggcggccggccgagggcgcgcctctgctctggctggactgccgcggaggaggcgagaaggaatccgacgctggggggcttgctcgggcggcagcgactgctgctgcggatgggagcgggccggctcggcgcgcccatggagcgccacggcagggcttccgccacctccgtctcgtcggctggggagcaggcggccggggaccccgaagggcggcggcaggagccactgcggcgccgggcgagcagcgcgtcggtgcccgcggtcggggcctcggctgagggcacgaggcgggatcgactgggctcttacagcggccccacctcggtctcccgccagcgcgtcgaaagcctgaggaaaaagcggccgcgtaagtgttccgtggggcgccctcccggcccgccctgcccccccttccggcccaccctgt

SEQ ID NO: 382025 - DNA, 1035 bp, Homo sapiens
  misc_feature (1029)..(1031): n is a, c, g, or t
  misc_feature (1033)..(1035): n is a, c, g, or t
gtgctcgcttcggcagcacatatactaaaatggaacgatacagagaagattagcatggcccctgcgcaagggatgacacgcaaattcgtgaagcgttccatattttgttctgttgggctttgttgctgttggtttagcaatgggattttttttcccccatcacagctttggaaacatgatgagcaaggagaagcgagaggctgtcagtaaagaggacctggccagagcgactttgatcaccatcaccaacaacattggctcaatagcaagaatgtgtgcccttaatgaaaacattaaccaggtggtatttgttggaaatttcttgagaattaatacgatcgccatgcggcttttggcatatgctttggattattggtccaaggggcagttgaaagcacttttttcggaacacgagggttattttggagctgttggagcactccttgagctgttgaagatcccgtgatcattacctggggaggggttcctgaaaccttccacaatgggatctgtggactttcatttttttaagagacttactcaatttcatgactgtactacctgaaacaaagtgagaaaggacaggtgtatttttctaagtcatcaagataaatccttaagaattcagtctaaattagcaaccaggaaggaaaaatatattaaaaacaacaaaaaagtggcacatgtccaggcagtgtgaggatttgctgtatataagttgcctgctttgtatttttgaaatctctgcatcactcattggaagtgcttctgaagagagctgctctgtgttcagttgactggttttgtgtcctgtttgaacttgctgaatgtaaggcaggctactatgcgttataatctaatcacaatttgtcaatatggtcttggcaatcatctgtgcattactctggtttgcattaagcctgtgtgtgaacttactgtaaaacatgttttatttcaaggttctgcaaattaattgggcaggttaattgtgtacctgaaacttaacaagcagtttttggaagggcaaannnannn

SEQ ID NO: 382026 - DNA, 2544 bp, Homo sapiens
  misc_feature (2538)..(2540): n is a, c, g, or t
  misc_feature (2542)..(2544): n is a, c, g, or t
atgctgggggaggggctggcggcctcgacggcagctgcggaactaggccgagggacaaaggctaaggtcagccgcggttcaagccctttcgtctgccgacgaccagcggccagacgctgcgggagcactgctgggctggaggagggctcgagctgcgaggacggcacggagcagcggggtgggactcggggtcgccccaggagagttccgcggcccgggggggcagaggcatgcacaagtggggggcggaaggagggggtggatgaggaggctcgggcccttccacccacgcgtccattgggcggcgccgccatcactctcttctgggctacaccgccttctcttcctccgcggaacccggatcccctcctccaccaccctctccccgccccgtcacgatagcctctcattggacggaggcacggtcaatcctcctcgagttagggagccgactggacgcgaggcctttgggccgtccccagcctcgtcggattggcttcctgcgcgttggcgcaacggaagaggcggccggccgagggcgcgcctctgctctggctggactgccgcggaggaggcgagaaggaatccgacgctggggggcttgctcgggcggcagcgactgctgctgcggatgggagcgggccggctcggcgcgcccatggagcgccacggcagggcttccgccacctccgtctcgtcggctggggagcaggcggccggggaccccgaagggcggcggcaggagccactgcggcgccgggcgagcagcgcgtcggtgcccgcggtcggggcctcggctgagggcacgaggcgggatcgactgggctcttacagcggccccacctcggtctcccgccagcgcgtcgaaagcctgaggaaaaagcggccgctttttccatggtttggactggatatcggtggaactctggtcaagctggtatattttgaacccaaagacatcactgctgaagaagaagaggaagaagtggaaagtcttaaaagcattcggaagtacctgacctccaatgtggcttatgggtctacaggcattcgggacgtgcacctcgagctgaaggacctgactctgtgtggacgcaaaggcaatctgcactttatacgctttcccactcatgacatgcctgcttttattcaaatgggcagagataaaaacttctcgagtctccacactgtcttttgtgccactggaggtggagcgtacaaatttgagcaggattttctcacaataggtgatcttcagctttgcaaactggatgaactagattgcttgatcaaaggaattttatacattgactcagtcggattcaatggacggtcacagtgctattactttgaaaaccctgctgattctgaaaagtgtcagaagttaccatttgatttgaaaaatccgtatcctctgcttctggtgaacattggctcaggggttagcatcttagcagtatattccaaagataattacaaacgggtcacaggtactagtcttggaggaggaactttttttggtctctgctgtcttcttactggctgtaccacttttgaagaagctcttgaaatggcatctcgtggagatagcaccaaagtggataaactagtacgagatatttatggaggggactatgagaggtttggactgccaggctgggctgtggcttcaagctttggaaacatgatgagcaaggagaagcgagaggctgtcagtaaagaggacctggccagagcgactttgatcaccatcaccaacaacattggctcaatagcaagaatgtgtgcccttaatgaaaacattaaccaggtggtatttgttggaaatttcttgagaattaatacgatcgccatgcggcttttggcatatgctttggattattggtccaaggggcagttgaaagcacttttttcggaacacgagggttattttggagctgttggagcactccttgagctgttgaagatcccgtgatcattacctggggaggggttcctgaaaccttccacaatgggatctgtggactttcatttttttaagagacttactcaatttcatgactgtactacctgaaacaaagtgagaaaggacaggtgtatttttctaagtcatcaagataaatccttaagaattcagtctaaattagcaaccaggaaggaaaaatatattaaaaacaacaaaaaagtggcacatgtccaggcagtgtgaggatttgctgtatataagttgcctgctttgtatttttgaaatctctgcatcactcattggaagtgcttctgaagagagctgctctgtgttcagttgactggttttgtgtcctgtttgaacttgctgaatgtaaggcaggctactatgcgttataatctaatcacaatttgtcaatatggtcttggcaatcatctgtgcattactctggtttgcattaagcctgtgtgtgaacttactgtaaaacatgttttatttcaaggttctgcaaattaattgggcaggttaattgtgtacctgaaacttaacaagcagtttttggaagggcaaannnannn

SEQ ID NO: 382027 - DNA, 1777 bp, Homo sapiens
  misc_feature (1771)..(1773): n is a, c, g, or t
  misc_feature (1775)..(1777): n is a, c, g, or t
tttttcccgcgcgcggacactgtccccgcacggtggtccctcgttggtgcgtggcctgacatccggctggaggcctcgggtgctccgaaagcggtaccttcgggggcccccccgcacccattgtttttccatggtttggactggatatcggtggaactctggtcaagctggtatattttgaacccaaagacatcactgctgaagaagaagaggaagaagtggaaagtcttaaaagcattcggaagtacctgacctccaatgtggcttatgggtctacaggcattcgggacgtgcacctcgagctgaaggacctgactctgtgtggacgcaaaggcaatctgcactttatacgctttcccactcatgacatgcctgcttttattcaaatgggcagagataaaaacttctcgagtctccacactgtcttttgtgccactggaggtggagcgtacaaatttgagcaggattttctcacaataggtgatcttcagctttgcaaactggatgaactagattgcttgatcaaaggaattttatacattgactcagtcggattcaatggacggtcacagtgctattactttgaaaaccctgctgattctgaaaagtgtcagaagttaccatttgatttgaaaaatccgtatcctctgcttctggtgaacattggctcaggggttagcatcttagcagtatattccaaagataattacaaacgggtcacaggtactagtcttggaggaggaactttttttggtctctgctgtcttcttactggctgtaccacttttgaagaagctcttgaaatggcatctcgtggagatagcaccaaagtggataaactagtacgagatatttatggaggggactatgagaggtttggactgccaggctgggctgtggcttcaagctttggaaacatgatgagcaaggagaagcgagaggctgtcagtaaagaggacctggccagagcgactttgatcaccatcaccaacaacattggctcaatagcaagaatgtgtgcccttaatgaaaacattaaccaggtggtatttgttggaaatttcttgagaattaatacgatcgccatgcggcttttggcatatgctttggattattggtccaaggggcagttgaaagcacttttttcggaacacgagggttattttggagctgttggagcactccttgagctgttgaagatcccgtgatcattacctggggaggggttcctgaaaccttccacaatgggatctgtggactttcatttttttaagagacttactcaatttcatgactgtactacctgaaacaaagtgagaaaggacaggtgtatttttctaagtcatcaagataaatccttaagaattcagtctaaattagcaaccaggaaggaaaaatatattaaaaacaacaaaaaagtggcacatgtccaggcagtgtgaggatttgctgtatataagttgcctgctttgtatttttgaaatctctgcatcactcattggaagtgcttctgaagagagctgctctgtgttcagttgactggttttgtgtcctgtttgaacttgctgaatgtaaggcaggctactatgcgttataatctaatcacaatttgtcaatatggtcttggcaatcatctgtgcattactctggtttgcattaagcctgtgtgtgaacttactgtaaaacatgttttatttcaaggttctgcaaattaattgggcaggttaattgtgtacctgaaacttaacaagcagtttttggaagggcaaannnannn

SEQ ID NO: 382028 - DNA, 1634 bp, Homo sapiens
  misc_feature (1628)..(1630): n is a, c, g, or t
  misc_feature (1632)..(1634): n is a, c, g, or t
tttttcccgcgcgcggacactgtccccgcacggtggtccctcgttggtgcgtggcctgacatccggctggaggcctcgggtgctccgaaagcggtaccttcgggggcccccccgcacccattgtttttccatggtttggactggatatcggtggaactctggtcaagctggtatattttgaacccaaagacatcactgctgaagaagaagaggaagaagtggaaagtcttaaaagcattcggaagtacctgacctccaatgtggcttatgggtctacaggcattcgggacgtgcacctcgagctgaaggacctgactctgtgtggacgcaaagataggtgatcttcagctttgcaaactggatgaactagattgcttgatcaaaggaattttatacattgactcagtcggattcaatggacggtcacagtgctattactttgaaaaccctgctgattctgaaaagtgtcagaagttaccatttgatttgaaaaatccgtatcctctgcttctggtgaacattggctcaggggttagcatcttagcagtatattccaaagataattacaaacgggtcacaggtactagtcttggaggaggaactttttttggtctctgctgtcttcttactggctgtaccacttttgaagaagctcttgaaatggcatctcgtggagatagcaccaaagtggataaactagtacgagatatttatggaggggactatgagaggtttggactgccaggctgggctgtggcttcaagctttggaaacatgatgagcaaggagaagcgagaggctgtcagtaaagaggacctggccagagcgactttgatcaccatcaccaacaacattggctcaatagcaagaatgtgtgcccttaatgaaaacattaaccaggtggtatttgttggaaatttcttgagaattaatacgatcgccatgcggcttttggcatatgctttggattattggtccaaggggcagttgaaagcacttttttcggaacacgagggttattttggagctgttggagcactccttgagctgttgaagatcccgtgatcattacctggggaggggttcctgaaaccttccacaatgggatctgtggactttcatttttttaagagacttactcaatttcatgactgtactacctgaaacaaagtgagaaaggacaggtgtatttttctaagtcatcaagataaatccttaagaattcagtctaaattagcaaccaggaaggaaaaatatattaaaaacaacaaaaaagtggcacatgtccaggcagtgtgaggatttgctgtatataagttgcctgctttgtatttttgaaatctctgcatcactcattggaagtgcttctgaagagagctgctctgtgttcagttgactggttttgtgtcctgtttgaacttgctgaatgtaaggcaggctactatgcgttataatctaatcacaatttgtcaatatggtcttggcaatcatctgtgcattactctggtttgcattaagcctgtgtgtgaacttactgtaaaacatgttttatttcaaggttctgcaaattaattgggcaggttaattgtgtacctgaaacttaacaagcagtttttggaagggcaaannnannn

SEQ ID NO: 382029 - DNA, 2411 bp, Homo sapiens
atgctgggggaggggctggcggcctcgacggcagctgcggaactaggccgagggacaaaggctaaggtcagccgcggttcaagccctttcgtctgccgacgaccagcggccagacgctgcgggagcactgctgggctggaggagggctcgagctgcgaggacggcacggagcagcggggtgggactcggggtcgccccaggagagttccgcggcccgggggggcagaggcatgcacaagtggggggcggaaggagggggtggatgaggaggctcgggcccttccacccacgcgtccattgggcggcgccgccatcactctcttctgggctacaccgccttctcttcctccgcggaacccggatcccctcctccaccaccctctccccgccccgtcacgatagcctctcattggacggaggcacggtcaatcctcctcgagttagggagccgactggacgcgaggcctttgggccgtccccagcctcgtcggattggcttcctgcgcgttggcgcaacggaagaggcggccggccgagggcgcgcctctgctctggctggactgccgcggaggaggcgagaaggaatccgacgctggggggcttgctcgggcggcagcgactgctgctgcggatgggagcgggccggctcggcgcgcccatggagcgccacggcagggcttccgccacctccgtctcgtcggctggggagcaggcggccggggaccccgaagggcggcggcaggagccactgcggcgccgggcgagcagcgcgtcggtgcccgcggtcggggcctcggctgagggcacgaggcgggatcgactgggctcttacagcggccccacctcggtctcccgccagcgcgtcgaaagcctgaggaaaaagcggccgctttttccatggtttggactggatatcggtggaactctggtcaagctggtatattttgaacccaaagacatcactgctgaagaagaagaggaagaagtggaaagtcttaaaagcattcggaagtacctgacctccaatgtggcttatgggtctacaggcattcgggacgtgcacctcgagctgaaggacctgactctgtgtggacgcaaaggcaatctgcactttatacgctttcccactcatgacatgcctgcttttattcaaatgggcagagataaaaacttctcgagtctccacactgtcttttgtgccactggaggtggagcgtacaaatttgagcaggattttctcacagtatgcattttttagcttatatacaatttatggtaatttgattgttaaaaataatgccagtagcaagtggtgaaataatttccatctctaatggaacttgaattttcttgagtcaaatgaagattaaaggtacgctagtgataggagttggccatctagaggtggttgtctagttcagatgtatggacgacaatcagagccactaaaagggtagcattttattgctcctttagtatgaaaaattagggcatctgctatacgttgaggaagaaactacctaaaaggaacatcattagatcatgaacaatgagattgaaatataattaaaatcatttcatgtcataaaattgttttcagtcttgtctaccacataatttctcttgtctccctcagttgtttgctggcatgttcactaactgaaaaaaataaggaactctggtcaaaagtggtgttttcaggctcagggctggtctgagatgggtgactgcagagccctcctctcccagaatgctttctgatgtgttctgtgctgcacacttaactggagtctcgccaccatgtctggcccctggggaatgctgccaggcgctctatcttgctttcattgagtgaacactggagaacattataggtgatcttcagctttgcaaactggatgaactagattgcttgatcaaaggaattttatacattgactcagtcggattcaatggacggtcacagtgctattactttgaaaaccctgctgattctgaaaagtgtcagaagttaccatttgatttgaaaaatccgtatcctctgcttctggtgaacattggctcaggggttagcatcttagcagtatattccaaagataattacaaacgggtcacaggtactagtcttggaggaggaactttttttggtctctgctgtcttcttactggctgtaccacttttgaagaagctcttgaaatggcatctcgtggagatagcaccaaagtggataaactagtacgagatatttatggaggggactatgagaggtttggactgccaggctgggctgtggcttcaagctttggaaacatgatgagcaaggagaagcgagaggctgagggcacgaggcgggatcgactgggctcttacagcggccccacctcggtctcccgccagcgcgtcgaaagcc

SEQ ID NO: 382030 - DNA, 1577 bp, Homo sapiens
atgctgggggaggggctggcggcctcgacggcagctgcggaactaggccgagggacaaaggctaaggtcagccgcggttcaagccctttcgtctgccgacgaccagcggccagacgctgcgggagcactgctgggctggaggagggctcgagctgcgaggacggcacggagcagcggggtgggactcggggtcgccccaggagagttccgcggcccgggggggcagaggcatgcacaagtggggggcggaaggagggggtggatgaggaggctcgggcccttccacccacgcgtccattgggcggcgccgccatcactctcttctgggctacaccgccttctcttcctccgcggaacccggatcccctcctccaccaccctctccccgccccgtcacgatagcctctcattggacggaggcacggtcaatcctcctcgagttagggagccgactggacgcgaggcctttgggccgtccccagcctcgtcggattggcttcctgcgcgttggcgcaacggaagaggcggccggccgagggcgcgcctctgctctggctggactgccgcggaggaggcgagaaggaatccgacgctggggggcttgctcgggcggcagcgactgctgctgcggatgggagcgggccggctcggcgcgcccatggagcgccacggcagggcttccgccacctccgtctcgtcggctggggagcaggcggccggggaccccgaagggcggcggcaggagccactgcggcgccgggcgagcagcgcgtcggtgcccgcggtcggggcctcggctgagggcacgaggcgggatcgactgggctcttacagcggccccacctcggtctcccgccagcgcgtcgaaagcctgaggaaaaagcggccgctttttccatggtttggactggatatcggtggaactctggtcaagctggtatattttgaacccaaagacatcactgctgaagaagaagaggaagaagtggaaagtcttaaaagcattcggaagtacctgacctccaatgtggcttatgggtctacaggcattcgggacgtgcacctcgagctgaaggacctgactctgtgtggacgcaaagataggtgatcttcagctttgcaaactggatgaactagattgcttgatcaaaggaattttatacattgactcagtcggattcaatggacggtcacagtgctattactttgaaaaccctgctgattctgaaaagtgtcagaagttaccatttgatttgaaaaatccgtatcctctgcttctggtgaacattggctcaggggttagcatcttagcagtatattccaaagataattacaaacgggtcacaggtactagtcttggaggaggaactttttttggtctctgctgtcttcttactggctgtaccacttttgaagaagctcttgaaatggcatctcgtggagatagcaccaaagtggataaactagtacgagatatttatggaggggactatgagaggtttggactgccaggctgggctgtggcttcaagccgagatcgcgccactgcactccaacgtgggcgacagagtgagact

SEQ ID NO: 382031 - DNA, 770 bp, Homo sapiens
cacagtcgtccttagtttatgcctttagagtccccatcaatcacccttcccactctgaactgtagagaggtacacagcacagtgagttgacttgatcaacatctggtcgagtgtctgggaaatggcagatctaggccttgagccctggtagagctacctcgcttcattcccagcaccccagtaccttactgcctccacctcacccccgtgctccctccttggctgagcgtgagaacagtggcaaaaaaaacaacataaatctaagtctctacatcctcattagatcctagagtcagctgatggtgcccaaattatcatcacaacaatataacgtaacataacataacacaaccaccacgaccaccatttacagttcatgtgaaataggagtgaaccggaaccacaagctgacttggccaagaaccagctttagcattaggatgtcagagagctcagctgccacctgtgagactgaggggaggcagtggagggttctgatggtgagacccaggtatgtgtgtctcagtggaacctccagaaagctcaaggaattcatggcactcggagacatgtagttgggtggtttgcccattgtttagttattgtgcatgtaaatccttttcttgcagaggtggaaatcagcttctaaggagatggagtcaaagtcaagcaacagaggccagaggggaggaaaatcttgcagacggtttgggaacaggggatcttgcttgaaattttttggggcaaactgattaactggcagcaagcaa

SEQ ID NO: 382032 - DNA, 503 bp, Homo sapiens
cacagtcgtccttagtttatgcctttagagtccccatcaatcacccttcccactctgaactgtagagaggtacacagcacagtgagttgacttgatcaacatctggtcgagtgtctgggaaatggcagatctaggccttgagccctggtagagctacctcgcttcattcccagcaccccagtaccttactgcctccacctcacccccgtgctccctccttggctgagcgtgagaacagtggcaaaaaaaacaacataaatctaagtctctacatcctcattagatcctagagtcagctgatggtgcccaaattatcatcacaacaatataacgtaacataacataacacaaccaccacgaccctactactatctcgcacctgaaacaagctaacatgactaacacccttaattccatccaccctcctctccctaggaggcctgccccgctaaccggctttttgccaaatgggccattatcgagaattcacaaaaacaatagcc

SEQ ID NO: 382033 - DNA, 2012 bp, Homo sapiens
cctgtgccttcgtcctttcctcctttgtcctcagctttcccgcctcctcctttcagagcccaccttcggcattttcctgccctacagccctgacggcgggacccggaggctggagaaggccaaggtctcgctaaacgactgcctggcgtgcagcggctgcatcacctccgcagagaccgtgcttatcacccagcagagccacgaggagctgaagaaggttctagatgctaacaagatggcggcacccagtcagcagaggctggttgtagtttcggtctcaccacagtctagagcatcgctggctgcacggtttcagctgaatcctacagatactgccaggaaattaacctcattctttaaaaaaataggggtgcacttcgtcttcgacaccgccttctcaaggcacttcagcctcctggagagccagcgagagtttgtgcggcgattccgaggacaggccgactgcagacaggcgctgcccctgctggcctctgcctgcccaggctggatctgctatgccgagaagactcacggcagcttcatcctcccccacatcagcaccgcccggtccccgcagcaggtcatgggctccctggtcaaggacttcttcgcccagcagcagcacttgacccctgacaagatctaccacgtcacagtgatgccctgctatgacaaaaagctggaagcctccagacccgactttttcaaccaggagcaccagacacgggatgtggactgtgtcctcacaacaggagaagttttcaggttgctggaggaagagggcgtctccctccccgacctggaaccagcccctctggacagcctgtgcagcggtgcctctgcagaggagcccaccagccatcggggagggggctcggggggctacctggagcacgtgttccggcacgcggcccgagagctctttggaatccatgtggctgaggttacctacaaacccctgaggaacaaagacttccaggaggtgacactggagaaggagggccaggtgctgctgcacttcgcaatggcgtacggcttccgcaacatccagaacctggtgcagaggctcaaacgagggcgctgcccctaccactacgtggaggtcatggcctgcccctcaggctgcctgaacggcgggggccagctccaggccccagacaggcccagcagagagctcctccagcacgtggagagactgtacggcatggtccgggctgaggcgcccgaggacgcgcctggggttcaggagctgtacacacactggctgcagggcacggactcggagtgtgcaggtcgcttgctgcatacgcagtaccacgccgtggagaaggccagcactggcctgggcatccggtggtaggggctgcaggaccaggactcccaggaggccgtgtccatgtgtgacagcagaaccacatgccccaagaccccagggcttcccccaaaattctgagtgagctgcagggtgtgctgggacccgagtaggagctaggactagccaggacccgcagccgcctcgtcacctccagttgggtgcctctgggttcccactggctctgcccaggtggggtggggtggcccaggcagcagaaggttccctgaggtcccagagcctgttccgttggccctgggccgaggcccacaggtgctgcccttgctgctgctggtcgggcacccaagtgcgtgaggggcttcagcctgtcccggggttgcctgaggcagagcaagacgggttctcacccctgacttctggaggcttcccttgaagctctgtgcaaaaggtgggagacagagctggacctgcaggggtggtcccgccacaaccctgcgtgtggaccctggcaggggggggtgccaggcccctggaaagcaggggttaccgttacgaggctgtggtccggggcaagccaagtacgaagcagcagccatcgcgggctgcatcatcccccagccaggtccccaccaggcctgtctcccagcgtttgtctaataaacgcacccctcctaaaaca

SEQ ID NO: 382034 - DNA, 2014 bp, Homo sapiens
ggcggcagtgcggccgtcatggcgtcgcccttcagcggggcgctgcagctgacggacctggatgacttcatcgggccgtctcaggagtgcatcaagcctgtcaaagtggaaaaaagggcgggaagtggcgtggccaagattcgcattgaagatgacgggagctacttccaaattaaccaagacggcgggacccggaggctggagaaggccaaggtctcgctaaacgactgcctggcgtgcagcggctgcatcacctccgcagagaccgtgcttatcacccagcagagccacgaggagctgaagaaggttctagatgctaacaagatggcggcacccagtcagcagaggctggttgtagtttcggtctcaccacagtctagagcatcgctggctgcacggtttcagctgaatcctacagatactgccaggaaattaacctcattctttaaaaaaataggggtgcacttcgtcttcgacaccgccttctcaaggcacttcagcctcctggagagccagcgagagtttgtgcggcgattccgaggacaggccgactgcagacaggcgctgcccctgctggcctctgcctgcccaggctggatctgctatgccgagaagactcacggcagcttcatcctcccccacatcagcaccgcccggtccccgcagcaggtcatgggctccctggtcaaggacttcttcgcccagcagcagcacttgacccctgacaagatctaccacgtcacagtgatgccctgctatgacaaaaagctggaagcctccagacccgactttttcaaccaggagcaccagacacgggatgtggactgtgtcctcacaacaggagaagttttcaggttgctggaggaagaggggggctcggggggctacctggagcacgtgttccggcacgcggcccgagagctctttggaatccatgtggctgaggttacctacaaacccctgaggaacaaagacttccaggaggtgacactggagaaggagggccaggtgctgctgcacttcgcaatggcgtacggcttccgcaacatccagaacctggtgcagaggctcaaacgagggcgctgcccctaccactacgtggaggtcatggcctgcccctcaggctgcctgaacggcgggggccagctccaggccccagacaggcccagcagagagctcctccagcacgtggagagactgtacggcatggtccgggctgaggcgcccgaggacgcgcctggggttcaggagctgtacacacactggctgcagggcacggactcggagtgtgcaggtcgcttgctgcatacgcagtaccacgccgtggagaaggccagcactggcctgggcatccggtggtaggggctgcaggaccaggactcccaggaggccgtgtccatgtgtgacagcagaaccacatgccccaagaccccagggcttcccccaaaattctgagtgagctgcagggtgtgctgggacccgagtaggagctaggactagccaggacccgcagccgcctcgtcacctccagttgggtgcctctgggttcccactggctctgcccaggtggggtggggtggcccaggcagcagaaggttccctgaggtcccagagcctgttccgttggccctgggccgaggcccacaggtgctgcccttgctgctgctggtcgggcacccaagtgcgtgaggggcttcagcctgtcccggggttgcctgaggcagagcaagacgggttctcacccctgacttctggaggcttcccttgaagctctgtgcaaaaggtgggagacagagctggacctgcaggggtggtcccgccacaaccctgcgtgtggaccctggcaggggggggtgccaggcccctggaaagcaggggttaccgttacgaggctgtggtccggggcaagccaagtacgaagcagcagccatcgcgggctgcatcatcccccagccaggtccccaccaggcctgtctcccagcgtttgtctaataaacgcacccctcctaaaaca

SEQ ID NO: 382035 - DNA, 1968 bp, Homo sapiens
ggcggcagtgcggccgtcatggcgtcgcccttcagcggggcgctgcagctgacggacctggatgacttcatcgggccgtctcaggagtgcatcaagcctgtcaaagtggaaaaaagggcgggaagtggcgtggccaagattcgcattgaagatgacgggagctacttccaaattaaccaagacggcgggacccggaggctggagaaggccaaggtctcgctaaacgactgcctggcgtgcagcggctgcatcacctccgcagagaccgtgcttatcacccagcagagccacgaggagctgaagaaggttctagatgctaacaaggggtgcacttcgtcttcgacaccgccttctcaaggcacttcagcctcctggagagccagcgagagtttgtgcggcgattccgaggacaggccgactgcagacaggcgctgcccctgctggcctctgcctgcccaggctggatctgctatgccgagaagactcacggcagcttcatcctcccccacatcagcaccgcccggtccccgcagcaggtcatgggctccctggtcaaggacttcttcgcccagcagcagcacttgacccctgacaagatctaccacgtcacagtgatgccctgctatgacaaaaagctggaagcctccagacccgactttttcaaccaggagcaccagacacgggatgtggactgtgtcctcacaacaggagaagttttcaggttgctggaggaagagggcgtctccctccccgacctggaaccagcccctctggacagcctgtgcagcggtgcctctgcagaggagcccaccagccatcggggagggggctcggggggctacctggagcacgtgttccggcacgcggcccgagagctctttggaatccatgtggctgaggttacctacaaacccctgaggaacaaagacttccaggaggtgacactggagaaggagggccaggtgctgctgcacttcgcaatggcgtacggcttccgcaacatccagaacctggtgcagaggctcaaacgagggcgctgcccctaccactacgtggaggtcatggcctgcccctcaggctgcctgaacggcgggggccagctccaggccccagacaggcccagcagagagctcctccagcacgtggagagactgtacggcatggtccgggctgaggcgcccgaggacgcgcctggggttcaggagctgtacacacactggctgcagggcacggactcggagtgtgcaggtcgcttgctgcatacgcagtaccacgccgtggagaaggccagcactggcctgggcatccggtggtaggggctgcaggaccaggactcccaggaggccgtgtccatgtgtgacagcagaaccacatgccccaagaccccagggcttcccccaaaattctgagtgagctgcagggtgtgctgggacccgagtaggagctaggactagccaggacccgcagccgcctcgtcacctccagttgggtgcctctgggttcccactggctctgcccaggtggggtggggtggcccaggcagcagaaggttccctgaggtcccagagcctgttccgttggccctgggccgaggcccacaggtgctgcccttgctgctgctggtcgggcacccaagtgcgtgaggggcttcagcctgtcccggggttgcctgaggcagagcaagacgggttctcacccctgacttctggaggcttcccttgaagctctgtgcaaaaggtgggagacagagctggacctgcaggggtggtcccgccacaaccctgcgtgtggaccctggcaggggggggtgccaggcccctggaaagcaggggttaccgttacgaggctgtggtccggggcaagccaagtacgaagcagcagccatcgcgggctgcatcatcccccagccaggtccccaccaggcctgtctcccagcgtttgtctaataaacgcacccctcctaaaaca

SEQ ID NO: 382036 - DNA, 2097 bp, Homo sapiens
ggcggcagtgcggccgtcatggcgtcgcccttcagcggggcgctgcagctgacggacctggatgacttcatcgggccgtctcaggagtgcatcaagcctgtcaaagtggaaaaaagggcgggaagtggcgtggccaagattcgcattgaagatgacgggagctacttccaaattaaccaagacggcgggacccggaggctggagaaggccaaggtctcgctaaacgactgcctggcgtgcagcggctgcatcacctccgcagagaccgtgcttatcacccagcagagccacgaggagctgaagaaggttctagatgctaacaagatggcggcacccagtcagcagaggctggttgtagtttcggtctcaccacagtctagagcatcgctggctgcacggtttcagctgaatcctacagatactgccaggaaattaacctcattctttaaaaaaataggggtgcacttcgtcttcgacaccgccttctcaaggcacttcagcctcctggagagccagcgagagtttgtgcggcgattccgaggacaggccgactgcagacaggcgctgcccctgctggcctctgcctgcccaggctggatctgctatgccgagaagactcacggcagcttcatcctcccccacatcagcaccgcccggtccccgcagcaggtcatgggctccctggtcaaggacttcttcgcccagcagcagcacttgacccctgacaagatctaccacgtcacagtgatgccctgctatgacaaaaagctggaagcctccagacccgactttttcaaccaggagcaccagacacgggatgtggactgtgtcctcacaacaggagaagttttcaggttgctggaggaagagggcgtctccctccccgacctggaaccagcccctctggacagcctgtgcagcggtgcctctgcagaggagcccaccagccatcggggagggggctcggggggctacctggagcacgtgttccggcacgcggcccgagagctctttggaatccatgtggctgaggttacctacaaacccctgaggaacaaagacttccaggaggtgacactggagaaggagggccaggtgctgctgcacttcgcaatggcgtacggcttccgcaacatccagaacctggtgcagaggctcaaacgagggcgctgcccctaccactacgtggaggtcatggcctgcccctcaggctgcctgaacggcgggggccagctccaggccccagacaggcccagcagagagctcctccagcacgtggagagactgtacggcatggtccgggctgaggcgcccgaggacgcgcctggggttcaggagctgtacacacactggctgcagggcacggactcggagtgtgcaggtcgcttgctgcatacgcagtaccacgccgtggagaaggccagcactggcctgggcatccggtggtaggggctgcaggaccaggactcccaggaggccgtgtccatgtgtgacagcagaaccacatgccccaagaccccagggcttcccccaaaattctgagtgagctgcagggtgtgctgggacccgagtaggagctaggactagccaggacccgcagccgcctcgtcacctccagttgggtgcctctgggttcccactggctctgcccaggtggggtggggtggcccaggcagcagaaggttccctgaggtcccagagcctgttccgttggccctgggccgaggcccacaggtgctgcccttgctgctgctggtcgggcacccaagtgcgtgaggggcttcagcctgtcccggggttgcctgaggcagagcaagacgggttctcacccctgacttctggaggcttcccttgaagctctgtgcaaaaggtgggagacagagctggacctgcaggggtggtcccgccacaaccctgcgtgtggaccctggcaggggggggtgccaggcccctggaaagcaggggttaccgttacgaggctgtggtccggggcaagccaagtacgaagcagcagccatcgcgggctgcatcatcccccagccaggcccacagccgtaaccggtgtaacaccattcgtctctttttcttttctttgtt

SEQ ID NO: 382037 - DNA, 572 bp, Homo sapiens
ggcggcagtgcggccgtcatggcgtcgcccttcagcggggcgctgcagctgacggacctggatgacttcatcgggccgtctcaggagtgcatcaagcctgtcaaagtggaaaaaagggcgggaagtggcgtggccaagattcgcattgaagatgacgggagctacttccaaattaaccaagtaaggcacaggaggctgctccaccatctctcctgcccggctgatccgaaacacttttctctgcttcctcccgtcacagagcggtgaccccgagacactccaggtctcaccagtcttttcccactggtcgaattcacctgccatctgggaggctgggggtcagggtgcctggggcaggtgaatgagcagcacccaggccaaacagcttgatctgctcagcagaggggctatttgcagagatggtggatcctgtctgcgtctgcctgttccccctagttctaaccatgtaagattttctaattcagacccctcgttcttttgtttgtttgtttgtttgtttgtttgatacagagttgcactctagcctgggtgacagagcgagactccatctc

SEQ ID NO: 382038 - DNA, 381 bp, Homo sapiens
ccaagtgcgtgaggggcttcagcctgtcccggggttgcctgaggcagagcaagacgggttctcacccctgacttctggaggcttcccttgaagctctgtgcaaaaggtgggagacagagctggacctgcaggggtggtcccgccacaaccctgcgtgtggaccctggcaggggggggtgccaggcccctggaaagcaggggttaccgttacgaggctgtggtccggggcaagccaagtacgaagcagcagccatcgcgggctgcatcatcccccagccaggtccccaccaggcctgtctcccagcgtttgtctaataaacgcacccctcctaaaacacgcctacgaaaacagctcctctcctggcacatctgccaacactg

SEQ ID NO: 382039 - DNA, 2101 bp, Homo sapiens
ggcggcagtgcggccgtcatggcgtcgcccttcagcggggcgctgcagctgacggacctggatgacttcatcgggccgtctcaggagtgcatcaagcctgtcaaagtggaaaaaagggcgggaagtggcgtggccaagattcgcattgaagatgacgggagctacttccaaattaaccaagacggcgggacccggaggctggagaaggccaaggtctcgctaaacgactgcctggcgtgcagcggctgcatcacctccgcagagaccgtgcttatcacccagcagagccacgaggagctgaagaaggttctagatgctaacaagatggcggcacccagtcagcagaggctggttgtagtttcggtctcaccacagtctagagcatcgctggctgcacggtttcagctgaatcctacagatactgccaggaaattaacctcattctttaaaaaaataggggtgcacttcgtcttcgacaccgccttctcaaggcacttcagcctcctggagagccagcgagagtttgtgcggcgattccgaggacaggccgactgcagacaggcgctgcccctgctggcctctgcctgcccaggctggatctgctatgccgagaagactcacggcagcttcatcctcccccacatcagcaccgcccggtccccgcagcaggtcatgggctccctggtcaaggacttcttcgcccagcagcagcacttgacccctgacaagatctaccacgtcacagtgatgccctgctatgacaaaaagctggaagcctccagacccgactttttcaaccaggagcaccagacacgggatgtggactgtgtcctcacaacaggagaagttttcaggttgctggaggaagagggcgtctccctccccgacctggaaccagcccctctggacagcctgtgcagcggtgcctctgcagaggagcccaccagccatcggggagggggctcggggggctacctggagcacgtgttccggcacgcggcccgagagctctttggaatccatgtggctgaggttacctacaaacccctgaggaacaaagacttccaggaggtgacactggagaaggagggccaggtgctgctgcacttcgcaatggcgtacggcttccgcaacatccagaacctggtgcagaggctcaaacgagggcgctgcccctaccactacgtggaggtcatggcctgcccctcaggctgcctgaacggcgggggccagctccaggccccagacaggcccagcagagagctcctccagcacgtggagagactgtacggcatggtccgggctgaggcgcccgaggacgcgcctggggttcaggagctgtacacacactggctgcagggcacggactcggagtgtgcaggtcgcttgctgcatacgcagtaccacgccgtggagaaggccagcactggcctgggcatccggtggtaggggctgcaggaccaggactcccaggaggccgtgtccatgtgtgacagcagaaccacatgccccaagaccccagggcttcccccaaaattctgagtgagctgcagggtgtgctgggacccgagtaggagctaggactagccaggacccgcagccgcctcgtcacctccagttgggtgcctctgggttcccactggctctgcccaggtggggtggggtggcccaggcagcagaaggttccctgaggtcccagagcctgttccgttggccctgggccgaggcccacaggtgctgcccttgctgctgctggtcgggcacccaagtgcgtgaggggcttcagcctgtcccggggttgcctgaggcagagcaagacgggttctcacccctgacttctggaggcttcccttgaagctctgtgcaaaaggtgggagacagagctggacctgcaggggtggtcccgccacaaccctgcgtgtggaccctggcaggggggggtgccaggcccctggaaagcaggggttaccgttacgaggctgtggtccggggcaagccaagtacgaagcagcagccatcgcgggctgcatcatcccccagccaggtccccaccaggcctgtctcccagcgtttgtctaataaacgcacccctcctaaaaca

SEQ ID NO: 382040 - DNA, 1774 bp, Homo sapiens
taggctgtggaagacgggtaggctgtggaagacgggtaggctgtggaagacgggtaggctgtggaagacgggtaggcgtggaagacgggttggaaatgttggcacaaatggccttttctggagaagaggctgccctcccgtgggagccacgcgcagtcacctcaggtccctaggcggtgtcgcctgcacgccgagctccgcgtggtggtggggagaacaggaatgagcactctttaatgtcatcatgatctcctgtatgagcgggcccgcccccagaatgtcgtgctgctgcctgtgggtgcgggggccgccgtgcgcccccgccagccccgtgtgccccctgtcacctcaggctggatctgctatgccgagaagactcacggcagcttcatcctcccccacatcagcaccgcccggtccccgcagcaggtcatgggctccctggtcaaggacttcttcgcccagcagcagcacttgacccctgacaagatctaccacgtcacagtgatgccctgctatgacaaaaagctggaagcctccagacccgactttttcaaccaggagcaccagacacgggatgtggactgtgtcctcacaacaggagaagttttcaggttgctggaggaagaggggggctcggggggctacctggagcacgtgttccggcacgcggcccgagagctctttggaatccatgtggctgaggttacctacaaacccctgaggaacaaagacttccaggaggtgacactggagaaggagggccaggtgctgctgcacttcgcaatggcgtacggcttccgcaacatccagaacctggtgcagaggctcaaacgagggcgctgcccctaccactacgtggaggtcatggcctgcccctcaggctgcctgaacggcgggggccagctccaggccccagacaggcccagcagagagctcctccagcacgtggagagactgtacggcatggtccgggctgaggcgcccgaggacgcgcctggggttcaggagctgtacacacactggctgcagggcacggactcggagtgtgcaggtcgcttgctgcatacgcagtaccacgccgtggagaaggccagcactggcctgggcatccggtggtaggggctgcaggaccaggactcccaggaggccgtgtccatgtgtgacagcagaaccacatgccccaagaccccagggcttcccccaaaattctgagtgagctgcagggtgtgctgggacccgagtaggagctaggactagccaggacccgcagccgcctcgtcacctccagttgggtgcctctgggttcccactggctctgcccaggtggggtggggtggcccaggcagcagaaggttccctgaggtcccagagcctgttccgttggccctgggccgaggcccacaggtgctgcccttgctgctgctggtcgggcacccaagtgcgtgaggggcttcagcctgtcccggggttgcctgaggcagagcaagacgggttctcacccctgacttctggaggcttcccttgaagctctgtgcaaaaggtgggagacagagctggacctgcaggggtggtcccgccacaaccctgcgtgtggaccctggcaggggggggtgccaggcccctggaaagcaggggttaccgttacgaggctgtggtccggggcaagccaagtacgaagcagcagccatcgcgggctgcatcatcccccagccaggtccccaccaggcctgtctcccagcgtttgtctaataaacgcacccctcctaaaaca

SEQ ID NO: 382041 - DNA, 1667 bp, Homo sapiens
ggcggcagtgcggccgtcatggcgtcgcccttcagcggggcgctgcagctgacggacctggatgacttcatcgggccgtctcaggagtgcatcaagcctgtcaaagtggaaaaaagggcgggaagtggcgtggccaagattcgcattgaagatgacgggagctacttccaaattaaccaagacggcgggacccggaggctggagaaggccaaggtctcgctaaacgactgcctggcgtgcagcggctgcatcacctccgcagagaccgtgcttatcacccagcagagccacgaggagctgaagaaggttctagatgctaacaagatggcggcacccagtcagcagaggctggttgtagtttcggtctcaccacagtctagagcatcgctggctgcacggtttcagctgaatcctacagatactgccaggaaattaacctcattctttaaaaaaataggggtgcacttcgtcttcgacaccgccttctcaaggcacttcagcctcctggagagccagcgagagtttgtgcggcgattccgaggacaggccgactgcagacaggcgctgcccctgctggcctctgcctgcccaggctggatctgctatgccgagaagactcacggcagcttcatcctcccccacatcagcaccgcccggtcccgtgctgctgcacttcgcaatggcgtacggcttccgcaacatccagaacctggtgcagaggctcaaacgagggcgctgcccctaccactacgtggaggtcatggcctgcccctcaggctgcctgaacggcgggggccagctccaggccccagacaggcccagcagagagctcctccagcacgtggagagactgtacggcatggtccgggctgaggcgcccgaggacgcgcctggggttcaggagctgtacacacactggctgcagggcacggactcggagtgtgcaggtcgcttgctgcatacgcagtaccacgccgtggagaaggccagcactggcctgggcatccggtggtaggggctgcaggaccaggactcccaggaggccgtgtccatgtgtgacagcagaaccacatgccccaagaccccagggcttcccccaaaattctgagtgagctgcagggtgtgctgggacccgagtaggagctaggactagccaggacccgcagccgcctcgtcacctccagttgggtgcctctgggttcccactggctctgcccaggtggggtggggtggcccaggcagcagaaggttccctgaggtcccagagcctgttccgttggccctgggccgaggcccacaggtgctgcccttgctgctgctggtcgggcacccaagtgcgtgaggggcttcagcctgtcccggggttgcctgaggcagagcaagacgggttctcacccctgacttctggaggcttcccttgaagctctgtgcaaaaggtgggagacagagctggacctgcaggggtggtcccgccacaaccctgcgtgtggaccctggcaggggggggtgccaggcccctggaaagcaggggttaccgttacgaggctgtggtccggggcaagccaagtacgaagcagcagccatcgcgggctgcatcatcccccagccaggtccccaccaggcctgtctcccagcgtttgtctaataaacgcacccctcctaaaaca

SEQ ID NO: 382042 - DNA, 815 bp, Homo sapiens
ggcggcagtgcggccgtcatggcgtcgcccttcagcggggcgctgcagctgacggacctggatgacttcatcgggccgtctcaggagtgcatcaagcctgtcaaagtggaaaaaagggcgggaagtggcgtggccaagattcgcattgaagatgacgggagctacttccaaattaaccaagacggcgggacccggaggctggagaaggccaaggtctcgctaaacgactgcctggcgtgcagcggctgcatcacctccgcagagaccgtgcttatcacccagcagagccacgaggagctgaagaaggttctagatgctaacaagatggcggcacccagtcagcagaggctggttgtagtttcggtctcaccacagtctagagcatcgctggctgcacggtttcagctgaatcctacagatactgccaggaaattaacctcattctttaaaaaaataggggtgcacttcgtcttcgacaccgccttctcaaggcacttcagcctgtcccggggttgcctgaggcagagcaagacgggttctcacccctgacttctggaggcttcccttgaagctctgtgcaaaaggtgggagacagagctggacctgcaggggtggtcccgccacaaccctgcgtgtggaccctggcaggggggggtgccaggcccctggaaagcaggggttaccgttacgaggctgtggtccggggcaagccaagtacgaagcagcagccatcgcgggctgcatcatcccccagccaggtccccaccaggcctgtctcccagcgtttgtctaataaacgcacccctcctaaaaca

SEQ ID NO: 382043 - DNA, 2106 bp, Homo sapiens
  misc_feature (895)..(896): n is a, c, g, or t
  misc_feature (900)..(901): n is a, c, g, or t
  misc_feature (904)..(905): n is a, c, g, or t
  misc_feature (907)..(907): n is a, c, g, or t
  misc_feature (2006)..(2006): n is a, c, g, or t
ctcagacatgcagctcctgtccacacttaatatatgcatgcattggatcacccagccctggtctttctgcctccatggataactgcatgaccctgagagaaaacctccttagatttagcatcctaggttcctcacacgcctcaccctgaatcctggccctcccgcagccccagcgccatttgtcccatcagtgacaagattcatattctgatgtagactctgttgccagagccagtgttgagccagtccgcctcttccccgggaagtgcctgcccttccctcctgttagggttggctctcgagcttgtgtgccagttcctgggttggccgtgagagttctacagacaaggaggaagtgctctcggtgtatttcctgtggtgggttcacacgcagctagacacagctaacttgagtcttggagctcctagagggaagcttctggaaaggaaggctcttcaggacctcttaggagccagagaagaggacgttgtcacagataaagagccaggctcaccagctcctgacgcatgcatcatgaccatgagacacaactggacaccagacctcagccctttgtgggtcctgctcctgtgtgcccacgtcgtcactctcctggtcagagccacacctgtctcgcagaccaccacagctgccactgcctcagttagaagcacaaaggacccctgcccctcccagcccccagtgttcccagcagctaagcagtgtccagcattggaagtgacctggccagaggtggaagtgccactgaatggaacgctgagcttatcctgtgtggcctgcagccgcttccccaacttcagcatcctctactggctgggcaatggttccttcattgagcacctcccaggccgactgtgggaggggagcaccagnngggnncgnngnagccaggctgggctgagggcaaccttgccccccacccaagaagccctgccctccagccacagcagtccacagcagcagggttaagactcagcacagggccagcagcagcacaaccttgaccagagcttgggtcctacctgtctacctggagtgaacagtccctgactgcctgtaggctgcgtggatgcgcaacacaccccctccttctctgctttgggtcccttctctcaccaaattcaaactccattcccacctacctagaaaatcacagcctccttataatgcctcctcctcctgccattctctctccacctatccattagccttcctaacgtcctactcctcacactgctctactgctcagaaaccaccaagactgttgatgccttagccttgcactccagggccctacctgcatttcccacatgactttctggaagcctcccaactattcttgcttttcccagacagctcccactcccatgtctctgctcatttagtcccgtcttcctcaccgccccagcaggggaacgctcaagcctggttgaaatgctgcctcttcagtgaagtcatcctctttcagctctggccgcattctgcagacttcctatcttcgtgctgtatgtttttttttttcccccttcactctaatggactgttccagggaagggatgggggcagcagctgcttcggatccacactgtatctgtgtcatccccacatgggtcctcataaaggattattcaatggaggcatcctgacatctgttcatttaggcttcagttccactcccaggaactttgcctgtcccacgagggagtatgggagagagggactgccacacagaagctgaagacaacacctgcttcaggggaacacaggcgcttgaaaaagaaaagagagaacagcccataatgctccccgggagcagaggccactaatggagagtgggaagagcctggaaagatgtggcctcaggaaaagggatgagagaaaggaggtggtatggaagactcagcaggaacaaggggcttgctcaccaccttctccctggagagggcagaagaggtcacacgcagagactgctactacatcttantcacctgccaaggcttggtggccaacacccagaggaacaaattaaggaccgggaattaattcccaggggctccctggtgcccaaaggacaagagcttcca

SEQ ID NO: 382044 - DNA, 616 bp, Homo sapiens
tcaccctccccctcctcggccagtcagtgatccagggccctagtgctcaggctagatcagcaggtgggattccaagggagggcagggatgggaggccctgcacagtgaccccaggcctcaccctggactccaggggatagcaggtcttcagatgtggggggcacactcagcacagggccagcagcagcacaaccttgaccagagcttgggtcctacctgtctacctggagtgaacagtccctgactgcctgtaggctgcgtggatgcgcaacacaccccctccttctctgctttgggtcccttctctcaccaaattcaaactccattcccacctacctagaaaatcacagcctccttataatgcctcctcctcctgccattctctctccacctatccattagccttcctaacgtcctactcctcacactgctctactgctcagaaaccaccaagactgttgatgccttagccttgcactccagggccctacctgcatttcccacatgactttctggaagcctcccaactattcttgcttttcccagacagctcccactcccgacatcctcacgaggatctctgcattatgtagtctagtctaggagcaatatatgc

SEQ ID NO: 382045 - DNA, 2694 bp, Homo sapiens
ctcagacatgcagctcctgtccacacttaatatatgcatgcattggatcacccagccctggtctttctgcctccatggataactgcatgaccctgagagaaaacctccttagatttagcatcctaggttcctcacacgcctcaccctgaatcctggccctcccgcagccccagcgccatttgtcccatcagtgacaagattcatattctgatgtagactctgttgccagagccagtgttgagccagtccgcctcttccccgggaagtgcctgcccttccctcctgttagggttggctctcgagcttgtgtgccagttcctgggttggccgtgagagttctacagacaaggaggaagtgctctcggtgtatttcctgtggtgggttcacacgcagctagacacagctaacttgagtcttggagctcctagagggaagcttctggaaaggaaggctcttcaggacctcttaggagccaggtaggagtctgggactactagtgaacctagacctgtggctctggccagaggggctaggatgagagacagagggtgtgatggtgggtgctgggagatgtagccgaccttggggctggtggctgggggagtgggtagcctgggaaaggccaggatgtggacggactggtatggcattgagcctgaagtggtccaacttggggttccccagtgcctaggaaagttgtccccttgaatgtcagtgtgaaggtgaaggaggaagcagatgcctgttcatatggaaacaaagacctggctgtgaagaggggaggcggacaccaaagtcctgacacttgggcgggacagaattgatctgtgagagactcatctagttcataccctaggtgaccctgggggtggcatgggggtagattagagatcccagtctggtatcctctggagagtaggagtcccaggagctgaaggtttctggccactgaactttggctaaagcagaggtgtcacagctgctcaagattccctggttaaaaagtgaaagtgaaatagagggtcggggcagtgctttcccagaaggattgctcggcatcctgcccttcccagaagcagctctggtgctgaagagagcactgcctccctgtgtgactgggtgagtccatattctctctttgggtctcaattttgccttccctaatgaaggggtaagattggactaggtaagcatcttacaaccatttgtggtcatgagagctggggtggggaaggattgtcacttgacccccccagctctgtttctaagtgctgaaagagctccaggctatgctacgggaggagaagccagctactgaggaaaagccagctactgagaaaaagcgggagtggtttaccattctcctcccccacctttcaccagagaagaggacgttgtcacagataaagagccaggctcaccagctcctgacgcatgcatcatgaccatgagacacaactggacaccagacctcagccctttgtgggtcctgctcctgtgtgcccacgtcgtcactctcctggtcagagccacacctgtctcgcagaccaccacagctgccactgcctcagttagaagcacaaaggacccctgcccctcccagcccccagtgttcccagcagctaagcagtgtccagcattggaagtgacctggccagaggtggaagtgccactgaatggaacgctgagcttatcctgtgtggcctgcagccgcttccccaacttcagcatcctctactggctgggcaatggttccttcattgagcacctcccaggccgactgtgggaggggagcaccagccgggaacgtgggagcacaggtacgcagctgtgcaaggccttggtgctggagcagctgacccctgccctgcacagcaccaacttctcctgtgtgctcgtggaccctgaacaggttgtccagcgtcacgtcgtcctggcccagctctgggctgggctgagggcaaccttgccccccacccaagaagccctgccctccagccacagcagtccacagcagcagggttaagactcagcacagggccagcagcagcacaaccttgaccagagcttgggtcctacctgtctacctggagtgaacagtccctgactgcctgtaggctgcgtggatgcgcaacacaccccctccttctctgctttgggtcccttctctcaccaaattcaaactccattcccacctacctagaaaatcacagcctccttataatgcctcctcctcctgccattctctctccacctatccattagccttcctaacgtcctactcctcacactgctctactgctcagaaaccaccaagactgttgatgccttagccttgcactccagggccctacctgcatttcccacatgactttctggaagcctcccaactattcttgcttttcccagacagctcccactcccatgtctctgctcatttagtcccgtcttcctcaccgccccagcaggggaacgctcaagcctggttgaaatgctgcctcttcagtgaagtcatcctctttcagctctggccgcattctgcagacttcctatcttcgtgctgtatgtttttttttttcccccttcactctaatggactgttccagggaagggatgggggcagcagctgcttcggatccacactgtatctgtgtcatccccacatgggtcctcataaaggattattcaatgga

SEQ ID NO: 382046 - DNA, 2422 bp, Homo sapiens
ctcagacatgcagctcctgtccacacttaatatatgcatgcattggatcacccagccctggtctttctgcctccatggataactgcatgaccctgagagaaaacctccttagatttagcatcctaggttcctcacacgcctcaccctgaatcctggccctcccgcagccccagcgccatttgtcccatcagtgacaagattcatattctgatgtagactctgttgccagagccagtgttgagccagtccgcctcttccccgggaagtgcctgcccttccctcctgttagggttggctctcgagcttgtgtgccagttcctgggttggccgtgagagttctacagacaaggaggaagtgctctcggtgtatttcctgtggtgggttcacacgcagctagacacagctaacttgagtcttggagctcctagagggaagcttctggaaaggaaggctcttcaggacctcttaggagccaggtaggagtctgggactactagtgaacctagacctgtggctctggccagaggggctaggatgagagacagagggtgtgatggtgggtgctgggagatgtagccgaccttggggctggtggctgggggagtgggtagcctgggaaaggccaggatgtggacggactggtatggcattgagcctgaagtggtccaacttggggttccccagtgcctaggaaagttgtccccttgaatgtcagtgtgaaggtgaaggaggaagcagatgcctgttcatatggaaacaaagacctggctgtgaagaggggaggcggacaccaaagtcctgacacttgggcgggacagaattgatctgtgagagactcatctagttcataccctaggtgaccctgggggtggcatgggggtagattagagatcccagtctggtatcctctggagagtaggagtcccaggagctgaaggtttctggccactgaactttggctaaagcagaggtgtcacagctgctcaagattccctggttaaaaagtgaaagtgaaatagagggtcggggcagtgctttcccagaaggattgctcggcatcctgcccttcccagaagcagctctggtgctgaagagagcactgcctccctgtgtgactgggtgagtccatattctctctttgggtctcaattttgccttccctaatgaaggggtaagattggactaggtaagcatcttacaaccatttgtggtcatgagagctggggtggggaaggattgtcacttgacccccccagctctgtttctaagtgctgaaagagctccaggctatgctacgggaggagaagccagctactgaggaaaagccagctactgagaaaaagcgggagtggtttaccattctcctcccccacctttcaccagagaagaggacgttgtcacagataaagagccaggctcaccagctcctgacgcatgcatcatgaccatgagacacaactggacaccagacctcagccctttgtgggtcctgctcctgtgtgcccacgtcgtcactctcctggtcagagccacacctgtctcgcagaccaccacagctgccactgcctcagttagaagcacaaaggacccctgcccctcccagcccccagtgttcccagcagctaagcagtgtccagcattggaagtgacctggccagaggtggaagtgccactgagctgggctgagggcaaccttgccccccacccaagaagccctgccctccagccacagcagtccacagcagcagggttaagactcagcacagggccagcagcagcacaaccttgaccagagcttgggtcctacctgtctacctggagtgaacagtccctgactgcctgtaggctgcgtggatgcgcaacacaccccctccttctctgctttgggtcccttctctcaccaaattcaaactccattcccacctacctagaaaatcacagcctccttataatgcctcctcctcctgccattctctctccacctatccattagccttcctaacgtcctactcctcacactgctctactgctcagaaaccaccaagactgttgatgccttagccttgcactccagggccctacctgcatttcccacatgactttctggaagcctcccaactattcttgcttttcccagacagctcccactcccatgtctctgctcatttagtcccgtcttcctcaccgccccagcaggggaacgctcaagcctggttgaaatgctgcctcttcagtgaagtcatcctctttcagctctggccgcattctgcagacttcctatcttcgtgctgtatgtttttttttttcccccttcactctaatggactgttccagggaagggatgggggcagcagctgcttcggatccacactgtatctgtgtcatccccacatgggtcctcataaaggattattcaatgga

SEQ ID NO: 382047 - DNA, 2212 bp, Homo sapiens
ctcagacatgcagctcctgtccacacttaatatatgcatgcattggatcacccagccctggtctttctgcctccatggataactgcatgaccctgagagaaaacctccttagatttagcatcctaggttcctcacacgcctcaccctgaatcctggccctcccgcagccccagcgccatttgtcccatcagtgacaagattcatattctgatgtagactctgttgccagagccagtgttgagccagtccgcctcttccccgggaagtgcctgcccttccctcctgttagggttggctctcgagcttgtgtgccagttcctgggttggccgtgagagttctacagacaaggaggaagtgctctcggtgtatttcctgtggtgggttcacacgcagctagacacagctaacttgagtcttggagctcctagagggaagcttctggaaaggaaggctcttcaggacctcttaggagccaggtaggagtctgggactactagtgaacctagacctgtggctctggccagaggggctaggatgagagacagagggtgtgatggtgggtgctgggagatgtagccgaccttggggctggtggctgggggagtgggtagcctgggaaaggccaggatgtggacggactggtatggcattgagcctgaagtggtccaacttggggttccccagtgcctaggaaagttgtccccttgaatgtcagtgtgaaggtgaaggaggaagcagatgcctgttcatatggaaacaaagacctggctgtgaagaggggaggcggacaccaaagtcctgacacttgggcgggacagaattgatctgtgagagactcatctagttcataccctaggtgaccctgggggtggcatgggggtagattagagatcccagtctggtatcctctggagagtaggagtcccaggagctgaaggtttctggccactgaactttggctaaagcagaggtgtcacagctgctcaagattccctggttaaaaagtgaaagtgaaatagagggtcggggcagtgctttcccagaaggattgctcggcatcctgcccttcccagaagcagctctggtgctgaagagagcactgcctccctgtgtgactgggtgagtccatattctctctttgggtctcaattttgccttccctaatgaaggggtaagattggactaggtaagcatcttacaaccatttgtggtcatgagagctggggtggggaaggattgtcacttgacccccccagctctgtttctaagtgctgaaagagctccaggctatgctacgggaggagaagccagctactgaggaaaagccagctactgagaaaaagcgggagtggtttaccattctcctcccccacctttcaccagagaagaggacgttgtcacagataaagagccaggctcaccagctcctgacgcatgcatcatgaccatgagacacaactggacaccagacctcagccctttgtgggtcctgctcctgtgtgcccacgtcgtcactctcctggtcagagccacacctgtctcgcagaccaccacagggccagcagcagcacaaccttgaccagagcttgggtcctacctgtctacctggagtgaacagtccctgactgcctgtaggctgcgtggatgcgcaacacaccccctccttctctgctttgggtcccttctctcaccaaattcaaactccattcccacctacctagaaaatcacagcctccttataatgcctcctcctcctgccattctctctccacctatccattagccttcctaacgtcctactcctcacactgctctactgctcagaaaccaccaagactgttgatgccttagccttgcactccagggccctacctgcatttcccacatgactttctggaagcctcccaactattcttgcttttcccagacagctcccactcccatgtctctgctcatttagtcccgtcttcctcaccgccccagcaggggaacgctcaagcctggttgaaatgctgcctcttcagtgaagtcatcctctttcagctctggccgcattctgcagacttcctatcttcgtgctgtatgtttttttttttcccccttcactctaatggactgttccagggaagggatgggggcagcagctgcttcggatccacactgtatctgtgtcatccccacatgggtcctcataaaggattattcaatgga

SEQ ID NO: 382048 - DNA, 2237 bp, Homo sapiens
  misc_feature (1951)..(1952): n is a, c, g, or t
  misc_feature (1956)..(1956): n is a, c, g, or t
ctcagacatgcagctcctgtccacacttaatatatgcatgcattggatcacccagccctggtctttctgcctccatggataactgcatgaccctgagagaaaacctccttagatttagcatcctaggttcctcacacgcctcaccctgaatcctggccctcccgcagccccagcgccatttgtcccatcagtgacaagattcatattctgatgtagactctgttgccagagccagtgttgagccagtccgcctcttccccgggaagtgcctgcccttccctcctgttagggttggctctcgagcttgtgtgccagttcctgggttggccgtgagagttctacagacaaggaggaagtgctctcggtgtatttcctgtggtgggttcacacgcagctagacacagctaacttgagtcttggagctcctagagggaagcttctggaaaggaaggctcttcaggacctcttaggagccaggtaggagtctgggactactagtgaacctagacctgtggctctggccagaggggctaggatgagagacagagggtgtgatggtgggtgctgggagatgtagccgaccttggggctggtggctgggggagtgggtagcctgggaaaggccaggatgtggacggactggtatggcattgagcctgaagtggtccaacttggggttccccagtgcctaggaaagttgtccccttgaatgtcagtgtgaaggtgaaggaggaagcagatgcctgttcatatggaaacaaagacctggctgtgaagaggggaggcggacaccaaagtcctgacacttgggcgggacagaattgatctgtgagagactcatctagttcataccctaggtgaccctgggggtggcatgggggtagattagagatcccagtctggtatcctctggagagtaggagtcccaggagctgaaggtttctggccactgaactttggctaaagcagaggtgtcacagctgctcaagattccctggttaaaaagtgaaagtgaaatagagggtcggggcagtgctttcccagaaggattgctcggcatcctgcccttcccagaagcagctctggtgctgaagagagcactgcctccctgtgtgactgggtgagtccatattctctctttgggtctcaattttgccttccctaatgaaggggtaagattggactaggtaagcatcttacaaccatttgtggtcatgagagctggggtggggaaggattgtcacttgacccccccagctctgtttctaagtgctgaaagagctccaggctatgctacgggaggagaagccagctactgaggaaaagccagctactgagaaaaagcgggagtggtttaccattctcctcccccacctttcaccagagaagaggacgttgtcacagataaagagccaggctcaccagctcctgacgcatgcatcatgaccatgagacacaactggacaccagacctcagccctttgtgggtcctgctcctgtgtgcccacgtcgtcactctcctggtcagagccacacctgtctcgcagaccaccacagctgccactgcctcagttagaagcacaaaggacccctgcccctcccagcccccagtgttcccagcagctaagcagtgtccagcattggaagtgacctggccagaggtggaagtgccactgaatggaacgctgagcttatcctgtgtggcctgcagccgcttccccaacttcagcatcctctactggctgggcaatggttccttcattgagcacctcccaggccgactgtgggaggggagcaccagccgggaacgtgggagcacaggtacgcagctgtgcaaggccttggtgctggagcagctgacccctgccctgcacagcaccaacttctcctgtgtgctcgtggaccctgaacaggttgtccagcgtcacgtcgtcctggcccagctctggcnngggntgagggcaaccttgccccccgcagccaaagaaatgccacttggccccctcccaaggacacgaggcacgggattaacacacagaagagccaaaatggcacaaaaggaacacaacagggggggggggaattattaaaaaagacggggaaaaacccttccgcaaaatggggccaaaaccccaaaaggggggggggacccacacagaaaggggaccaaaagggagcaccaaagatggcaaaaccaaaaaaaagccccgtttgtgggagaaacccccaaaggggaa

SEQ ID NO: 382049 - DNA, 830 bp, Homo sapiens
tcaccctccccctcctcggccagtcagtgatccagggccctagtgctcaggctagatcagcaggtgggattccaagggagggcagggatgggaggccctgcacagtgaccccaggcctcaccctggactccaggggatagcaggtcttcagatgtggggggcacactcagcacagggccagcagcagcacaaccttgaccagagcttgggtcctacctgtctacctggagtgaacagtccctgactgcctgtaggctgcgtggatgcgcaacacaccccctccttctctgctttgggtcccttctctcaccaaattcaaactccattcccacctacctagaaaatcacagcctccttataatgcctcctcctcctgccattctctctccacctatccattagccttcctaacgtcctactcctcacactgctctactgctcagaaaccaccaagactgttgatgccttagccttgcactccagggccctacctgcatttcccacatgactttctggaagcctcccaactattcttgcttttcccagacagctcccactcccatgtctctgctcatttagtcccgtcttcctcaccgccccagcaggggaacgctcaagcctggttgaaatgctgcctcttcagtgaagtcatcctctttcagctctggccgcattctgcagacttcctatcttcgtgctgtatgtttttttttttcccccttcactctaatggactgttccagggaagggatgggggcagcagctgcttcggatccacactgtatctgtgtcatccccacatgggtcctcataaaggattattcaatgga

SEQ ID NO: 382050 - DNA, 2455 bp, Homo sapiens
ctcagacatgcagctcctgtccacacttaatatatgcatgcattggatcacccagccctggtctttctgcctccatggataactgcatgaccctgagagaaaacctccttagatttagcatcctaggttcctcacacgcctcaccctgaatcctggccctcccgcagccccagcgccatttgtcccatcagtgacaagattcatattctgatgtagactctgttgccagagccagtgttgagccagtccgcctcttccccgggaagtgcctgcccttccctcctgttagggttggctctcgagcttgtgtgccagttcctgggttggccgtgagagttctacagacaaggaggaagtgctctcggtgtatttcctgtggtgggttcacacgcagctagacacagctaacttgagtcttggagctcctagagggaagcttctggaaaggaaggctcttcaggacctcttaggagccaggtaggagtctgggactactagtgaacctagacctgtggctctggccagaggggctaggatgagagacagagggtgtgatggtgggtgctgggagatgtagccgaccttggggctggtggctgggggagtgggtagcctgggaaaggccaggatgtggacggactggtatggcattgagcctgaagtggtccaacttggggttccccagtgcctaggaaagttgtccccttgaatgtcagtgtgaaggtgaaggaggaagcagatgcctgttcatatggaaacaaagacctggctgtgaagaggggaggcggacaccaaagtcctgacacttgggcgggacagaattgatctgtgagagactcatctagttcataccctaggtgaccctgggggtggcatgggggtagattagagatcccagtctggtatcctctggagagtaggagtcccaggagctgaaggtttctggccactgaactttggatgtctctgctcatttagtcccgtcttcctcaccgccccagcaggggaacgctcaagcctggttgaaatgctgcctcttcagtgaagtcatcctctttcagctctggccgcattctgcagacttcctatcttcgtgctgtatgtttttttttttcccccttcactctaatggactgttccagggaagggatgggggcagcagctgcttcggatccacactgtatctgtgtcatccccacatgggtcctcataaaggattattcaatggaggcatcctgacatctgttcatttaggcttcagttccactcccaggaactttgcctgtcccacgagggagtatgggagagagggactgccacacagaagctgaagacaacacctgcttcaggggaacacaggcgcttgaaaaagaaaagagagaacagcccataatgctccccgggagcagaggccactaatggagagtgggaagagcctggaaagatgtggcctcaggaaaagggatgagagaaaggaggtggtatggaagactcagcaggaacaaggtaggcttcaaagagcctatattcctctttttcccacaccgatcaagtcaactcagtactcacgggagaaaaatagactttatttacaagtaataacatttagaaaagatccatccccggcccttaaaaaccttcccatcactccaaatcccaccccagtgcaagtctggggaaggtagggtgtgagctgctgctgaaggctgtcccccaaccccactcctgagacacagggcccatccgtcctgggaaagagcatcctctggcaggtgctcccaccaggtcagacccagtcctggacttcaagagtgagggcccctgctgggcccagccaccaggacagcaggaaccagggcctactcctcttatggtcccttctagatccagaggctaagaggaagactggccaggcccaaggacccagccatcaaaaccagcctcaaatctggttgtgatggagaagtgactttgctttaagaaaaaaggaggcaaggtagggagagcgcccacactgtccatgctccaggccccctgggccagctccgagaaggcgccagtgaaggaccagggaccaggccagggtgcgggcaggcatcactgtctctaggggtttggctactgttggcctgggagctgagagaaggcactgagagggacagtaggcggaggaccaggtgacggcagcatcggggacacaggtggggccactcactggtactggccctttagtgctttgcctgaaagagacacagtcacatggccagatgagaacttgcgatactagcctgcacccactggctgggaagatctcttcctgctcccacgcccctgtctggatcccctcccttgtgagccccagggttatcagttgctggctgtgcctgagcagctctgggtgctctccatgagaatggggccatctgtcttctctccttggagaggagctaccagg

SEQ ID NO: 382051 - DNA, 1202 bp, Homo sapiens
ctcagacatgcagctcctgtccacacttaatatatgcatgcattggatcacccagccctggtctttctgcctccatggataactgcatgaccctgagagaaaacctccttagatttagcatcctaggttcctcacacgcctcaccctgaatcctggccctcccgcagccccagcgccatttgtcccatcagtgacaagattcatattctgatgtagactctgttgccagagccagtgttgagccagtccgcctcttccccgggaagtgcctgcccttccctcctgttagggttggctctcgagcttgtgtgccagttcctgggttggccgtgagagttctacagacaaggaggaagtgctctcggtgtatttcctgtggtgggttcacacgcagctagacacagctaacttgagtcttggagctcctagagggaagcttctggaaaggaaggctcttcaggacctcttaggagccaggtaggagtctgggactactagtgaacctagacctgtggctctggccagaggggctaggatgagagacagagggtgtgatggtgggtgctgggagatgtagccgaccttggggctggtggctgggggagtgggtagcctgggaaaggccaggatgtggacggactggtatggcattgagcctgaagtggtccaacttggggttccccagtgcctaggaaagttgtccccttgaatgtcagtgtgaaggtgaaggaggaagcagatgcctgttcatatggaaacaaagacctggctgtgaagaggggaggcggacaccaaagtcctgacacttgggcgggacagaattgatctgtgagagactcatctagttcataccctaggtgaccctgggggtggcatgggggtagattagagatcccagtctggtatcctctggagagtaggagtcccaggagctgaaggtttctggccactgaactttggctaaagcagaggtgtcacagctggctcaagcctggttgaaatgctgcctcttcagtgaagtcatcctctttcagctctggccgcattctgcagacttcctatcttcgtgctgtatgtttttttttttcccccttcactctaatggactgttccagggaagggatgggggcagcagctgcttcggatccacactgtatctgtgtcatccccacatgggtcctcataaaggattattcaatgga

SEQ ID NO: 382052 - DNA, 1787 bp, Homo sapiens
ctcagacatgcagctcctgtccacacttaatatatgcatgcattggatcacccagccctggtctttctgcctccatggataactgcatgaccctgagagaaaacctccttagatttagcatcctaggttcctcacacgcctcaccctgaatcctggccctcccgcagccccagcgccatttgtcccatcagtgacaagattcatattctgatgtagactctgttgccagagccagtgttgagccagtccgcctcttccccgggaagtgcctgcccttccctcctgttagggttggctctcgagcttgtgtgccagttcctgggttggccgtgagagttctacagacaaggaggaagtgctctcggtgtatttcctgtggtgggttcacacgcagctagacacagctaacttgagtcttggagctcctagagggaagcttctggaaaggaaggctcttcaggacctcttaggagccagagaagaggacgttgtcacagataaagagccaggctcaccagctcctgacgcatgcatcatgaccatgagacacaactggacaccagacctcagccctttgtgggtcctgctcctgtgtgcccacgtcgtcactctcctggtcagagccacacctgtctcgcagaccaccacagctgccactgcctcagttagaagcacaaaggacccctgcccctcccagcccccagtgttcccagcagctaagcagtgtccagcattggaagtgacctggccagaggtggaagtgccactgaatggaacgctgagcttatcctgtgtggcctgcagccgcttccccaacttcagcatcctctactggctgggcaatggttccttcattgagcacctcccaggccgactgtgggaggggagcaccagccgggaacgtgggagcacaggtacgcagctgtgcaaggccttggtgctggagcagctgacccctgccctgcacagcaccaacttctcctgtgtgctcgtggaccctgaacaggttgtccagcgtcacgtcgtcctggcccagctctgggctgggctgagggcaaccttgccccccacccaagaagccctgccctccagccacagcagtccacagcagcagggttaagactcagcacagggccagcagcagcacaaccttgaccagagcttgggtcctacctgtctacctggagtgaacagtccctgactgcctgtaggctgcgtggatgcgcaacacaccccctccttctctgctttgggtcccttctctcaccaaattcaaactccattcccacctacctagaaaatcacagcctccttataatgcctcctcctcctgccattctctctccacctatccattagccttcctaacgtcctactcctcacactgctctactgctcagaaaccaccaagactgttgatgccttagccttgcactccagggccctacctgcatttcccacatgactttctggaagcctcccaactattcttgcttttcccagacagctcccactcccatgtctctgctcatttagtcccgtcttcctcaccgccccagcaggggaacgctcaagcctggttgaaatgctgcctcttcagtgaagtcatcctctttcagctctggccgcattctgcagacttcctatcttcgtgctgtatgtttttttttttcccccttcactctaatggactgttccagggaagggatgggggcagcagctgcttcggatccacactgtatctgtgtcatccccacatgggtcctcataaaggattattcaatgga

SEQ ID NO: 382053 - DNA, 4151 bp, Homo sapiens
ctcagacatgcagctcctgtccacacttaatatatgcatgcattggatcacccagccctggtctttctgcctccatggataactgcatgaccctgagagaaaacctccttagatttagcatcctaggttcctcacacgcctcaccctgaatcctggccctcccgcagccccagcgccatttgtcccatcagtgacaagattcatattctgatgtagactctgttgccagagccagtgttgagccagtccgcctcttccccgggaagtgcctgcccttccctcctgttagggttggctctcgagcttgtgtgccagttcctgggttggccgtgagagttctacagacaaggaggaagtgctctcggtgtatttcctgtggtgggttcacacgcagctagacacagctaacttgagtcttggagctcctagagggaagcttctggaaaggaaggctcttcaggacctcttaggagccaggtaggagtctgggactactagtgaacctagacctgtggctctggccagaggggctaggatgagagacagagggtgtgatggtgggtgctgggagatgtagccgaccttggggctggtggctgggggagtgggtagcctgggaaaggccaggatgtggacggactggtatggcattgagcctgaagtggtccaacttggggttccccagtgcctaggaaagttgtccccttgaatgtcagtgtgaaggtgaaggaggaagcagatgcctgttcatatggaaacaaagacctggctgtgaagaggggaggcggacaccaaagtcctgacacttgggcgggacagaattgatctgtgagagactcatctagttcataccctaggtgaccctgggggtggcatgggggtagattagagatcccagtctggtatcctctggagagtaggagtcccaggagctgaaggtttctggccactgaactttggctaaagcagaggtgtcacagctgctcaagattccctggttaaaaagtgaaagtgaaatagagggtcggggcagtgctttcccagaaggattgctcggcatcctgcccttcccagaagcagctctggtgctgaagagagcactgcctccctgtgtgactgggtgagtccatattctctctttgggtctcaattttgccttccctaatgaaggggtaagattggactaggtaagcatcttacaaccatttgtggtcatgagagctggggtggggaaggattgtcacttgacccccccagctctgtttctaagtgctgaaagagctccaggctatgctacgggaggagaagccagctactgaggaaaagccagctactgagaaaaagcgggagtggtttaccattctcctcccccacctttcaccagagaagaggacgttgtcacagataaagagccaggctcaccagctcctgacgcatgcatcatgaccatgagacacaactggacaccagacctcagccctttgtgggtcctgctcctgtgtgcccacgtcgtcactctcctggtcagagccacacctgtctcgcagaccaccacagctgccactgcctcagttagaagcacaaaggacccctgcccctcccagcccccagtgttcccagcagctaagcagtgtccagcattggaagtgacctggccagaggtggaagtgccactgaatggaacgctgagcttatcctgtgtggcctgcagccgcttccccaacttcagcatcctctactggctgggcaatggttccttcattgagcacctcccaggccgactgtgggaggggagcaccagccgggaacgtgggagcacaggtacgcagctgtgcaaggccttggtgctggagcagctgacccctgccctgcacagcaccaacttctcctgtgtgctcgtggaccctgaacaggttgtccagcgtcacgtcgtcctggcccagctctgggtgaggagcccaaggagaggcctccaggaacaggaggagctctgcttccatatgtggggaggaaagggtgggctctgccagagcagcctgtgaactaatgcccagcattcctcaaggtcagccagacaaaaaggaacttaggtcttgggcagaggaggtgtagcctggggcaaagtgatgagatgtccctcctttccttggcctgatccttgtctgccttcacttccctaggctgggctgagggcaaccttgccccccacccaagaagccctgccctccagccacagcagtccacagcagcagggttaagactcagcacagggccagcagcagcacaaccttgaccagagcttgggtcctacctgtctacctggagtgaacagtccctgactgcctgtaggctgcgtggatgcgcaacacaccccctccttctctgctttgggtcccttctctcaccaaattcaaactccattcccacctacctagaaaatcacagcctccttataatgcctcctcctcctgccattctctctccacctatccattagccttcctaacgtcctactcctcacactgctctactgctcagaaaccaccaagactgttgatgccttagccttgcactccagggccctacctgcatttcccacatgactttctggaagcctcccaactattcttgcttttcccagacagctcccactcccatgtctctgctcatttagtcccgtcttcctcaccgccccagcaggggaacgctcaagcctggttgaaatgctgcctcttcagtgaagtcatcctctttcagctctggccgcattctgcagacttcctatcttcgtgctgtatgtttttttttttcccccttcactctaatggactgttccagggaagggatgggggcagcagctgcttcggatccacactgtatctgtgtcatccccacatgggtcctcataaaggattattcaatggaggcatcctgacatctgttcatttaggcttcagttccactcccaggaactttgcctgtcccacgagggagtatgggagagagggactgccacacagaagctgaagacaacacctgcttcaggggaacacaggcgcttgaaaaagaaaagagagaacagcccataatgctccccgggagcagaggccactaatggagagtgggaagagcctggaaagatgtggcctcaggaaaagggatgagagaaaggaggtggtatggaagactcagcaggaacaaggtaggcttcaaagagcctatattcctctttttcccacaccgatcaagtcaactcagtactcacgggagaaaaatagactttatttacaagtaataacatttagaaaagatccatccccggcccttaaaaaccttcccatcactccaaatcccaccccagtgcaagtctggggaaggtagggtgtgagctgctgctgaaggctgtcccccaaccccactcctgagacacagggcccatccgtcctgggaaagagcatcctctggcaggtgctcccaccaggtcagacccagtcctggacttcaagagtgagggcccctgctgggcccagccaccaggacagcaggaaccagggcctactcctcttatggtcccttctagatccagaggctaagaggaagactggccaggcccaaggacccagccatcaaaaccagcctcaaatctggttgtgatggagaagtgactttgctttaagaaaaaaggaggcaaggtagggagagcgcccacactgtccatgctccaggccccctgggccagctccgagaaggcgccagtgaaggaccagggaccaggccagggtgcgggcaggcatcactgtctctaggggtttggctactgttggcctgggagctgagagaaggcactgagagggacagtaggcggaggaccaggtgacggcagcatcggggacacaggtggggccactcactggtactggccctttagtgctttgcctgaaagagacacagtcacatggccagatgagaacttgcgatactagcctgcacccactggctgggaagatctcttcctgctcccacgcccctgtctggatcccctcccttgtgagccccagggttatcagttgctggctgtgcctgagcagctctgggtgctctccatgagaatggggccatctgtcttctctccttggagaggagctaccagg

SEQ ID NO: 382054 - DNA, 2018 bp, Homo sapiens
ctcagacatgcagctcctgtccacacttaatatatgcatgcattggatcacccagccctggtctttctgcctccatggataactgcatgaccctgagagaaaacctccttagatttagcatcctaggttcctcacacgcctcaccctgaatcctggccctcccgcagccccagcgccatttgtcccatcagtgacaagattcatattctgatgtagactctgttgccagagccagtgttgagccagtccgcctcttccccgggaagtgcctgcccttccctcctgttagggttggctctcgagcttgtgtgccagttcctgggttggccgtgagagttctacagacaaggaggaagtgctctcggtgtatttcctgtggtgggttcacacgcagctagacacagctaacttgagtcttggagctcctagagggaagcttctggaaaggaaggctcttcaggacctcttaggagccagagaagaggacgttgtcacagataaagagccaggctcaccagctcctgacgcatgcatcatgaccatgagacacaactggacaccagacctcagccctttgtgggtcctgctcctgtgtgcccacgtcgtcactctcctggtcagagccacacctgtctcgcagaccaccacagctgccactgcctcagttagaagcacaaaggacccctgcccctcccagcccccagtgttcccagcagctaagcagtgtccagcattggaagtgacctggccagaggtggaagtgccactgaatggaacgctgagcttatcctgtgtggcctgcagccgcttccccaacttcagcatcctctactggctgggcaatggttccttcattgagcacctcccaggccgactgtgggaggggagcaccagccgggaacgtgggagcacaggtacgcagctgtgcaaggccttggtgctggagcagctgacccctgccctgcacagcaccaacttctcctgtgtgctcgtggaccctgaacaggttgtccagcgtcacgtcgtcctggcccagctctgggtgaggagcccaaggagaggcctccaggaacaggaggagctctgcttccatatgtggggaggaaagggtgggctctgccagagcagcctgtgaactaatgcccagcattcctcaaggtcagccagacaaaaaggaacttaggtcttgggcagaggaggtgtagcctggggcaaagtgatgagatgtccctcctttccttggcctgatccttgtctgccttcacttccctaggctgggctgagggcaaccttgccccccacccaagaagccctgccctccagccacagcagtccacagcagcagggttaagactcagcacagggccagcagcagcacaaccttgaccagagcttgggtcctacctgtctacctggagtgaacagtccctgactgcctgtaggctgcgtggatgcgcaacacaccccctccttctctgctttgggtcccttctctcaccaaattcaaactccattcccacctacctagaaaatcacagcctccttataatgcctcctcctcctgccattctctctccacctatccattagccttcctaacgtcctactcctcacactgctctactgctcagaaaccaccaagactgttgatgccttagccttgcactccagggccctacctgcatttcccacatgactttctggaagcctcccaactattcttgcttttcccagacagctcccactcccatgtctctgctcatttagtcccgtcttcctcaccgccccagcaggggaacgctcaagcctggttgaaatgctgcctcttcagtgaagtcatcctctttcagctctggccgcattctgcagacttcctatcttcgtgctgtatgtttttttttttcccccttcactctaatggactgttccagggaagggatgggggcagcagctgcttcggatccacactgtatctgtgtcatccccacatgggtcctcataaaggattattcaatgga

SEQ ID NO: 382055 - DNA, 447 bp, Homo sapiens
gtatttgcatgtaacctacatacttctttctgtatatgttcagtcatctctagaatacttaaaattcctaatacaatgtcagtgctatatagtacttataatacctaatgcagtgtaaatgctctgtaaatagttgttatactgtatttttcaaattcatatttttttaatttttttctgaatatttttgatctatcattggttgaactcatgaatgcagtacagaggaccgacagtatagctgtctttatcccagtcctgcagcgtttttgattactgtgggtttgtagtaagtttgaaatcaggaagtgtgagttattcaactctgttctttttcaagattgttttggctgttaagggtcccctgcgattccatgtggatttcagaattgatttttctatttctgtagaaaacatggggatattaatagggtttgtatgtattga

SEQ ID NO: 382056 - DNA, 869 bp, Homo sapiens
  misc_feature (100)..(100): n is a, c, g, or t
  misc_feature (102)..(102): n is a, c, g, or t
gggagtgttgtgctgttggtgtgttagtttgtgtgtgtttgtctcgtgtgcgtgttgtgctgtgtctatgcttgtgtgtttgtgtttctttgttgtatananaacagttgaggtataacacgatagaacagcgatccatttcggggttcttctccgcacttgagcacttggccggactcccgagtggagtcgtgctcactcaagctattgtacttggacatcggtacagccatgctgactgcccgtcttgttcgattacatgatgtattacttttcccaacaggccagtgctagcatattggaagagtgatttaataaagctggcaaccttgacgctatgccaccagtccaaccttacttgcctcatttaccatttccattattgtggcagccctccattccgtctgtgtgtttgtccatctaaaatgcccttatttcactctgcctgtgggagtcctatgcatctctcaaaagccaactcaagttcatctttcttcttgacaccttccctgaatattccagccctgctgagcctagtccctttgtgagatttgtcaccatttcttggacaccatatgagagacttcagaggctgaagtgggaggatcgcttgaggtcaggagtttgagaccagcttggccaacatagtgaaagcctgtctccacaaaaaataagaaaattagctgggttgatgacacgtgcctgtagtcccagccactcggaaggccgaggcgggaggatcacccgagcccagggaggccgagtctagtgaacggtgattgcaccacggtacccaagcctgggtgacagagtgagaccctcatttcaaaaaaaataaaaaagaacctgtcagctactcacctggattt

SEQ ID NO: 382057 - DNA, 750 bp, Homo sapiens
cctgctagaaaagcctccccattcctgggagtactcctccgccacctggaggtctgttgcccggaccccccggagaggtcgctgacaagactagcacattgcacttggcagctgtaccagccatccggactgcctcgttgtgtcgatacagagtataccccacagccagtgctagcatattggaagagtgatttaataaagctggcaaccttgacgctatgccaccagtccaaccttacttgcctcatttaccatttccattattgtggcagccctccattccgtctgtgtgtttgtccatctaaaatgcccttatttcactctgcctgtgggagtcctatgcatctctcaaaagccaactcaagttcatctttcttcttgacaccttccctgaatattccagccctgctgagcctagtccctttgtgagatttgtcaccatttcttggacaccatatgagagacttcagaggctgaagtgggaggatcgcttgaggtcaggagtttgagaccagcttggccaacatagtgaaagcctgtctccacaaaaaataagaaaattagctgggttgatgacacgtgcctgtagtcccagccactcggaaggccgaggcgggaggatcacccgagcccagggaggccgagtctagtgaacggtgattgcaccacggtacccaagcctgggtgacagagtgagaccctcatttcaaaaaaaataaaaaagaacctgtcagctactcacctggattt

SEQ ID NO: 382058 - DNA, 547 bp, Homo sapiens
tattatccccttctcttcctggtttttgccccctcactccattctttttacccaaacaccacagaattttaacccgaacggccaggtaggatggcccacgcccgtaatcatagcaccccgggatcacctgaggtcaggagttcgagaccagcctgaccaacatggtgaaaccccatctctactaaaaatacaaaaattagctggatgtagtggtacgtgcctgtaatcccagctatctcgcgacgttttaattagaattttagaattagaggagggcttagaactctgccctcatttttcagtgaggaaactgcccaagacaggacaaatacttaccctaatgcttagcctggctccagtgaaattagctccccagccaaagctgagctggatggaactaacaaggacacacctgctgtccccagccctttcgggaggtggggagggataggaaggagaaaggttttggtgcctattgctgctgatggtgggcatcaggccaggccaggggccttcttggaggctctgggaaaggggaagggaaggc

SEQ ID NO: 382059 - DNA, 267 bp, Homo sapiens
gtcgactcaattggtatgaataacagcaagagtttagaataatactgaatacctgttattcataccaattgacatttaataactaatcaaggcaatattttcgttttcctagagatttatcctgcaataaaatacagtctattgaaagacatacatttgaaccactaccatttttgaagtttatgtaagttacaaatataacttgattacatttggaatttttataaaacttaattataaacctttttgctattcttgaaatatgat

SEQ ID NO: 382060 - DNA, 8101 bp, Homo sapiens
tgtattacactgacggttgcaaagtgacacttttaaaaattctgtcattccttctacatttactagctggcattatttcattgaagaagaactcctcctctttctttttcaatatcactcttcgtggattcttctttatattaaatatgttgtaacttattgttgttattcttttgaatgctcaaattgtccagatttgaccaatgcagtctttgttattttttaactccgcaatccaggttaaactaagctatttttaatgcccagagtaatttataatatttcccactcccaacaggaattgagaaagggactccagaagttgggggcttattcagacttcttaaaagtctaccttcttcctctgtactttcagcccaaagtgagacttttgaattgggaagagatacttctgaaactactaatcactgtcacccaattctaatcccaaccatctttattctaggcataccatactcactgccatgcttacccttcagttgggcacttttgtcctccttcctattggccttctggttcctacccaactgtccagtccataggcttcaatgacacctttttcccacacctgtggtagcgttggctgcctcctttacctactcaagtaaccgctttaccgctaatttattgctctctgttttcatctataggatcttacctagccatatggcctgctgcctctgccaatttaaaaacagcattgaggctgtctgcaagacagtcaagctgcattgcaacagtgcatgtctgacaaacaccacacattgtcgtgagtccaaattgcgcggtgataaattgttacattaagtatttgtttttaaactttttatttttaatgatgataaaattttaagctaatgacataattgctttatttttatttactcattcagagttaaactccctcaatttccgaactactcccttgctgaaagtcaggttctcagttactattacaaaatttaataatagaactgttccatatgcagaaaggaccaagacaaaggaatgggaaggctagggaataacattaacatccacacactgtatactgtgctctctgcttgatgctttgcccacagtgataatttcttcatatagtgcaatgtagtttgtaagctggttttaaatccatgagatctcaagtactctctgccttataggacagatgtagatacggttttggtctttctgtttttacagttttataagagtacaagtgatgctgttttatttgaagcctgagagcttctggttccataaccagaaattgctacctggctcttctaatggaatggagggcttttccattcttagaccatccaactctgaacttgctccgaatctcaaacctttctgttcacagaacaaacgctcaagggctttcaagagtgtttctgtagattaggcttattagcatcaacttcatgacttctaaaatgtgactgctttcatgtccagatagcttgaatacaggtatctaccagtgatatggggtggagaattaataatgcttggttacataaagtcagtgttgcttatttttcaaaactttttttttttttttttttttttaccaattatgttattcccttctccccaagaagtgggcagaaaagctttgttaacctccttttacagatgaggaaaaacaagatcagaggtgctaagtgctgtagcctagtgccaggtcttctggccccaattctgggttctccccaagcccatgtttcttcccctttctcacaatctttacttcttcctctgaccctcaccaccacccaaagtacttttaattctagaaaagaaacccagctgcacactggcacacctgaccttcatgcagtcagaagctttggatgattccccatccaaaatattagagatgaaatgaaagcaaagtaggcatctgacaaaagttgctttttcccttctgcattttaggacctcaagtaatgtttatccagaaactgctatcataccagggattcattgtgtatttaacaacataggcatacaatctggcaaatttgaaaaactcttaacatacaccccaaatccctgcccaaatttaagaactagggtggacacagtgcgtttttccatgtcgcatcttctgtgatggggctacgatacgtgggagcagagaatggggagggtggagcgcatgccagatgaggatctatcagcaatgggacggggcctccactttagcatctccaccctgctcctctcagaggaccgcctttcattgcattcagctgtgatggtagcacgaacacaggtgcaccgaggacgaggagagcaggagccttgtgctctctctgcatctgaggcaggacagcacagggtacggagcagtctgcagagaggccagctcatcagggaagcacttgtcttccaccttgggctttgactgagcactgggcaattggcctctggggatcaacgaaataatcctaaacagagttactctatgtcacactatggaatgttccaagtaggtggccgtgttttcaaaagatgtattttctccttttgttgttgccatttcataggtttaggattgggtgtgtgtttctcctctctgaatggcactcgaatgtttgctgactcctactctgtgtgactggggtgtacagctatggactgatgcatcccatcccatcatctttcatgatcaaagcagtctcttcttttttgacagctgaagaagcatcggtagggaatccagaaggagcgttcatgaaggtgttacaagcccggaagaactacacaagcactgagctgattgttgagccagaggagccctcagacagcagtggcatcaacttgtcaggctttgggagtgagcagctagacaccaatgacgagagtgattttatcagtacactaagttacatcttgccttatttctcagcggtaaacctagatgtgaaatcactgttactaccgttcattaaactgccaaccacaggaaacagcctggcaaagattcaaactgtaggccaaaaccggcagagagtgaagagagtcctcatgggcccaaggagcatccagaaaaggcacttcaaagaggtaggaaggcagagcatcaggagggaacagggtgcccaggcatctgtggagaacgctgccgaagaaaaaaggctcgggagtccagccccaagggaggtggaacagccccacacacagcaggggcctgagaagttagcgggaaacgccgtctacaccaagccttccttcacccaagagcataaggcagcagtctctgtgctgaaacccttctccaagggcgcgccttctacctccagccctgcaaaagccctaccacaggtgagagacagatggaaagacttaacccacgctatttccattttagaaagtgcaaaggctagagttacaaatacgaagacgtctaaaccaatcgtacatgccagaaaaaaataccgctttcacaaaactcgctcccacgtgacccacagaacacccaaagtcaaaaagagtccaaaggtcagaaagaaaagttatctgagtagactgatgctcgcaaacaggcttccattctctgcagcgaagagcctcataaattccccttcacaaggggctttttcatccttaggagacctgagtcctcaagaaaacccttttctggaagtatctgctccttcagaacattttatagaaaagaataatacaaaacacacaactgcaagaaatgcctttgaagaaaatgattttatggaaaacactaacatgccagaaggaaccatctctgaaaacacaaactacaatcatcctcctgaggcagattccgctgggactgcattcaacttagggccaactgttaaacaaactgagacaaaatgggaatacaacaacgtgggcactgacctgtcccccgagcccaaaagcttcaattacccattgctctcgtccccaggtgatcagtttgaaattcagctaacccagcagctacagtcccttatccccaacaacaatgtgagaaggctcattgctcatgttatccggaccttgaagatggactgctctggggcccatgtgcaagtgacctgtgccaagctcatctccaggacaggccacctgatgaagcttctcagtgggcagcaggaagtaaaggcatccaagatagaatgggatacggaccaatggaagattgagaactacattaatgagagcacagaagcccagagtgaacagaaagagaagtcgcttgagctcaaaaaagaagttccaggatatggctatactgacaaactcatcttggcattaattgttactggaatactaacgattttgattatacttttctgcctcattgtggtaaggacaataattaattcaggttttcagaatgcagtcctgtctttgtgtggattcagagctcacaaactgaaaaccaaagccactttcccacctgctgctacttgacatacttcttcagtcatttaaggctgaggtgtatgctttgttcttttactgcagtgtatatttcaggatttttaaaggatcctcgctttcagatctctgtgaattgaaaccatgtgaatcccactagactattttaagaagtcgatataatagcaaaatttctcccacccaaaactatgtcaacaattggatgtactcatcaagtcacccttactctgccactaatttatttccttggtgctgaaatgatgagagaggtataatctccaccctcacggagttgtcatcaccctggagaggaaggagagagccaaaagacatacgtattgtcttgtagacttattagatttacacagtatcgtcctccagtgtgtaaggcattgtctaaataggtccagttaaagcactacagagtagccatcttttacaaaaatttttggccacatttttaagttcactggtgagggggaacgtctcatactctagccctcctgagcctagaccctctgtgagatgtgtcaccatttcttggacaccatgtgagacattccccctcagattagagatgctcagcttgcatcaacttacctaaagcctacatctggctactctgggacaagtcctgtttacagtgcccattcctggagcttgcctctgtcttttgttcgattacatgatgtattacttttcccaacaggccagtgctagcatattggaagagtgatttaataaagctggcaaccttgacgctatgccaccagtccaaccttacttgcctcatttaccatttccattattgtggcagccctccattccagccacagcagcccctcaccaaaccccagtcacaccacccacatttctgcttttgtctgtgtgtttgtccatctaaaatgcccttatttcactctgcctgtgggagtcctatgcatctctcaaaagccaactcaagttcatctttcttcttgacaccttccctgaatattccagccctgctgagcctagtccctttgtgagatttgtcaccatttcttggacaccatatgagagacttcagaggctgaagtgggaggatcgcttgagcctgggaggtcgaggatgcagtgagctgtggtcgtaccactgcactctagcctgggcaacacagctaggccctgtcttaaaaacagccaccaccaaaaactatcttgggatttgaataggattacgttaaatttgtagattaatttgagaatttacatctgtacgacattctaggaacgtgctatctcatgtcatgtattcatttcttgttaatgtctttcagaagagctttagtgtttccatatatagatcttatacatcttttgttagataaaagatctttgtatttttgttcctaaattcttcatacatttgtattgccattgtaaatgggatctttcttccattttctaattagttattggtggtacatgggaaaagtatttgaggtttgtgtgctgatttcttgattttgtagatagccactgtattgaattctcattacttccagtaaaatcttagttgattctcttaggcttctttggctaacatttatcatttaatatgcaaataatgatagttttgtctcttcctttccaatacttctactctttccttcctttcccttttcctttttcctttcctttcctttccttttttttcccttctcagggccttgttgtcacccaggctggagagcaatggtgtgacctagctcactgtaacatcaaactcctgggctcaagggatcctcccgcctcagcttcctgagtggctgggactacaggcaggagaactgcttgagcccaggaggcgcaggttgcagggagccaagatagcaccattgcactccagcctggggaatgagccaaactgtctcaaataaaaaaaaaacaacaaaaaagaattttaactacggagaccttagatagtagtttgtccttttatgacaggaaaactgagaaggagaaagggagagtgtcttacttaccccatggtcacacaatgcactctgccttttcctattttattcaaattcaaaaataacatgttgtgctttaagctgatttcgtagctcactcactcatcagcgacagccagccatatgaagactgtgagatagagaacttggctagctgcactcacgcatttgcttgaggtgatccaacttatagaataaagtatctagaaaacgaagaaccacttcatctcccatcccccatcaaatgatgcctgtgagactaagtccgaaggggactgatataaaatgcttctgcccagcatggttgtgcagtttgttcactgcacaagggcacttggccaagggagtgagtgggactgaaaatcctgcccctgctccatgctgagccacatacaaagtccccccagtatattgtggggcccttctgggcagacatggagagcttctgaaagtcccacatgcatggaattattttcaagaccccgggtatgtggtctgtggtggtggttctccctgtgattatggactgagatactcatttagtcctaataagaccagagaagtacattgtgagatacgtgggaaacggctgcatcactcactgtcttgtgcatgtgtctccccaggggcattttcagatttctgccacggaggggatgctcttcgcgaagggagagtcaggtacattggaggattcattgctgtggccagggaaagcagaggacatgcaaaattaatatttccctttctatcttctaggatggactttcctcatttggacagccgctctggtttaaagatatgtacaaacctctcagtgccacaagaataaataatcatgcatggaagctgcacaagaagtcatctaatgaggacaagatcctcaacagggaccctggggacagcgaagccccaacggaggaggaggagagtgaagccctgccataggaggagaacacagcccacctcaggcctcctgcaaaaatacatagaataaacaacaacagttactaaataaatgaaaattgtgattccgatgaagcctgccagagaaataaagcattttttaaaagaggaaataaggtgatatctgattagggcaaacatgatgcagacaagaaatgcaccggttcagaggagggaaggtcaggccgcctggggagagtccatgaaaaagatggaacgtgccagatgctgtacctggtgctgggaaagagttgactaggccagcatccctttcctcaaagggggggctcctagactggggggagggctggacatctgaatacatcctgaggagacagtgtgggacagcatggtggcagtggaaccagccgtggttctgctcttggtcggctggaaaggagtagatgtaagggatggtttagaagaagggaagtggaagaaaagttttctgagctgacaagaggaaggaaaggccgcctagaaggacactaaaaaggcaagagaagccctaagcagagtgagcaccagactccacaggttaagggctcagtcacacaggaccatccgcatgtcagaccccaggtgcaaggccaagcatcacctatgcatctgaccaactggctgtaaattggaggtccccacaactccctcctcagg

SEQ ID NO: 382061 - DNA, 8466 bp, Homo sapiens
tccttgtagttcttccccgcgttctatcctttatcttctagagaccttggtagttcccataggaatagtgctttacggagtctaatggtgatttcttaggtaaagacaggaaacatttttttcttttttacctacaagttccatatcaaaaaatgaatgtaaacttttcatgcagttttacacattgaaaatgcaggttattttaattccattccatttttcagaattctcaatcacaatcctctgacaactgttgaagatccgtatctctttaaattgccagcattaaaatatctgtaagtactatagtactctcatgagtcaagagatgatttatgctttttaaatttttcatcaaagcttaagtattttgcatttaggctaaaatgtcataatttaaattttaactgggttattgaaaaaaagttattggcgaagaaaaaaattaagaggatgtataatggtcaagacagccagcaggggaagagaacagcattgaagaacccatatagatttggaacatgtagacacatggaggaatattatttaaccaagaaagcaaaggggaaaaggtgttcattattctaaaaataaagaaaagagtaaataagatggtgagtgcaatatgaaaatgagaagataatggtaaaaaaaaaaagtgtcagttctgctcttgagtatcattaatttgatgatgcaaatcaacttttaatttctttaataagagctccctggaattctacagcaaataaagtcttgagctggcttgtttaatagagaagccaaaattgaattgttaagtacagaattttttattggggctcatatcatgaatgtttcggctttcttcttcagagacatgggaacaacgctagtcccacttacaacacttaagaacattctcatgatgactgttgaactggaaaaactgatcttacctagccatatggcctgctgcctctgccaatttaaaaacagcattgaggctgtctgcaagacagtcaagctgcattgcaacagtgcatgtctgacaaacaccacacattgtcgtgagtccaaattgcgcggtgataaattgttacattaagtatttgtttttaaactttttatttttaatgatgataaaattttaagctaatgacataattgctttatttttatttactcattcagagttaaactccctcaatttccgaactactcccttgctgaaagtcaggttctcagttactattacaaaatttaataatagaactgttccatatgcagaaaggaccaagacaaaggaatgggaaggctagggaataacattaacatccacacactgtatactgtgctctctgcttgatgctttgcccacagtgataatttcttcatatagtgcaatgtagtttgtaagctggttttaaatccatgagatctcaagtactctctgccttataggacagatgtagatacggttttggtctttctgtttttacagttttataagagtacaagtgatgctgttttatttgaagcctgagagcttctggttccataaccagaaattgctacctggctcttctaatggaatggagggcttttccattcttagaccatccaactctgaacttgctccgaatctcaaacctttctgttcacagaacaaacgctcaagggctttcaagagtgtttctgtagattaggcttattagcatcaacttcatgacttctaaaatgtgactgctttcatgtccagatagcttgaatacaggtatctaccagtgatatggggtggagaattaataatgcttggttacataaagtcagtgttgcttatttttcaaaactttttttttttttttttttttttaccaattatgttattcccttctccccaagaagtgggcagaaaagctttgttaacctccttttacagatgaggaaaaacaagatcagaggtgctaagtgctgtagcctagtgccaggtcttctggccccaattctgggttctccccaagcccatgtttcttcccctttctcacaatctttacttcttcctctgaccctcaccaccacccaaagtacttttaattctagaaaagaaacccagctgcacactggcacacctgaccttcatgcagtcagaagctttggatgattccccatccaaaatattagagatgaaatgaaagcaaagtaggcatctgacaaaagttgctttttcccttctgcattttaggacctcaagtaatgtttatccagaaactgctatcataccagggattcattgtgtatttaacaacataggcatacaatctggcaaatttgaaaaactcttaacatacaccccaaatccctgcccaaatttaagaactagggtggacacagtgcgtttttccatgtcgcatcttctgtgatggggctacgatacgtgggagcagagaatggggagggtggagcgcatgccagatgaggatctatcagcaatgggacggggcctccactttagcatctccaccctgctcctctcagaggaccgcctttcattgcattcagctgtgatggtagcacgaacacaggtgcaccgaggacgaggagagcaggagccttgtgctctctctgcatctgaggcaggacagcacagggtacggagcagtctgcagagaggccagctcatcagggaagcacttgtcttccaccttgggctttgactgagcactgggcaattggcctctggggatcaacgaaataatcctaaacagagttactctatgtcacactatggaatgttccaagtaggtggccgtgttttcaaaagatgtattttctccttttgttgttgccatttcataggtttaggattgggtgtgtgtttctcctctctgaatggcactcgaatgtttgctgactcctactctgtgtgactggggtgtacagctatggactgatgcatcccatcccatcatctttcatgatcaaagcagtctcttcttttttgacagctgaagaagcatcggtagggaatccagaaggagcgttcatgaaggtgttacaagcccggaagaactacacaagcactgagctgattgttgagccagaggagccctcagacagcagtggcatcaacttgtcaggctttgggagtgagcagctagacaccaatgacgagagtgattttatcagtacactaagttacatcttgccttatttctcagcggtaaacctagatgtgaaatcactgttactaccgttcattaaactgccaaccacaggaaacagcctggcaaagattcaaactgtaggccaaaaccggcagagagtgaagagagtcctcatgggcccaaggagcatccagaaaaggcacttcaaagaggtaggaaggcagagcatcaggagggaacagggtgcccaggcatctgtggagaacgctgccgaagaaaaaaggctcgggagtccagccccaagggaggtggaacagccccacacacagcaggggcctgagaagttagcgggaaacgccgtctacaccaagccttccttcacccaagagcataaggcagcagtctctgtgctgaaacccttctccaagggcgcgccttctacctccagccctgcaaaagccctaccacaggtgagagacagatggaaagacttaacccacgctatttccattttagaaagtgcaaaggctagagttacaaatacgaagacgtctaaaccaatcgtacatgccagaaaaaaataccgctttcacaaaactcgctcccacgtgacccacagaacacccaaagtcaaaaagagtccaaaggtcagaaagaaaagttatctgagtagactgatgctcgcaaacaggcttccattctctgcagcgaagagcctcataaattccccttcacaaggggctttttcatccttaggagacctgagtcctcaagaaaacccttttctggaagtatctgctccttcagaacattttatagaaaagaataatacaaaacacacaactgcaagaaatgcctttgaagaaaatgattttatggaaaacactaacatgccagaaggaaccatctctgaaaacacaaactacaatcatcctcctgaggcagattccgctgggactgcattcaacttagggccaactgttaaacaaactgagacaaaatgggaatacaacaacgtgggcactgacctgtcccccgagcccaaaagcttcaattacccattgctctcgtccccaggtgatcagtttgaaattcagctaacccagcagctacagtcccttatccccaacaacaatgtgagaaggctcattgctcatgttatccggaccttgaagatggactgctctggggcccatgtgcaagtgacctgtgccaagctcatctccaggacaggccacctgatgaagcttctcagtgggcagcaggaagtaaaggcatccaagatagaatgggatacggaccaatggaagattgagaactacattaatgagagcacagaagcccagagtgaacagaaagagaagtcgcttgagctcaaaaaagaagttccaggatatggctatactgacaaactcatcttggcattaattgttactggaatactaacgattttgattatacttttctgcctcattgtggtaaggacaataattaattcaggttttcagaatgcagtcctgtctttgtgtggattcagagctcacaaactgaaaaccaaagccactttcccacctgctgctacttgacatacttcttcagtcatttaaggctgaggtgtatgctttgttcttttactgcagtgtatatttcaggatttttaaaggatcctcgctttcagatctctgtgaattgaaaccatgtgaatcccactagactattttaagaagtcgatataatagcaaaatttctcccacccaaaactatgtcaacaattggatgtactcatcaagtcacccttactctgccactaatttatttccttggtgctgaaatgatgagagaggtataatctccaccctcacggagttgtcatcaccctggagaggaaggagagagccaaaagacatacgtattgtcttgtagacttattagatttacacagtatcgtcctccagtgtgtaaggcattgtctaaataggtccagttaaagcactacagagtagccatcttttacaaaaatttttggccacatttttaagttcactggtgagggggaacgtctcatactctagccctcctgagcctagaccctctgtgagatgtgtcaccatttcttggacaccatgtgagacattccccctcagattagagatgctcagcttgcatcaacttacctaaagcctacatctggctactctgggacaagtcctgtttacagtgcccattcctggagcttgcctctgtcttttgttcgattacatgatgtattacttttcccaacaggccagtgctagcatattggaagagtgatttaataaagctggcaaccttgacgctatgccaccagtccaaccttacttgcctcatttaccatttccattattgtggcagccctccattccagccacagcagcccctcaccaaaccccagtcacaccacccacatttctgcttttgtctgtgtgtttgtccatctaaaatgcccttatttcactctgcctgtgggagtcctatgcatctctcaaaagccaactcaagttcatctttcttcttgacaccttccctgaatattccagccctgctgagcctagtccctttgtgagatttgtcaccatttcttggacaccatatgagagacttcagaggctgaagtgggaggatcgcttgagcctgggaggtcgaggatgcagtgagctgtggtcgtaccactgcactctagcctgggcaacacagctaggccctgtcttaaaaacagccaccaccaaaaactatcttgggatttgaataggattacgttaaatttgtagattaatttgagaatttacatctgtacgacattctaggaacgtgctatctcatgtcatgtattcatttcttgttaatgtctttcagaagagctttagtgtttccatatatagatcttatacatcttttgttagataaaagatctttgtatttttgttcctaaattcttcatacatttgtattgccattgtaaatgggatctttcttccattttctaattagttattggtggtacatgggaaaagtatttgaggtttgtgtgctgatttcttgattttgtagatagccactgtattgaattctcattacttccagtaaaatcttagttgattctcttaggcttctttggctaacatttatcatttaatatgcaaataatgatagttttgtctcttcctttccaatacttctactctttccttcctttcccttttcctttttcctttcctttcctttccttttttttcccttctcagggccttgttgtcacccaggctggagagcaatggtgtgacctagctcactgtaacatcaaactcctgggctcaagggatcctcccgcctcagcttcctgagtggctgggactacaggcaggagaactgcttgagcccaggaggcgcaggttgcagggagccaagatagcaccattgcactccagcctggggaatgagccaaactgtctcaaataaaaaaaaaacaacaaaaaagaattttaactacggagaccttagatagtagtttgtccttttatgacaggaaaactgagaaggagaaagggagagtgtcttacttaccccatggtcacacaatgcactctgccttttcctattttattcaaattcaaaaataacatgttgtgctttaagctgatttcgtagctcactcactcatcagcgacagccagccatatgaagactgtgagatagagaacttggctagctgcactcacgcatttgcttgaggtgatccaacttatagaataaagtatctagaaaacgaagaaccacttcatctcccatcccccatcaaatgatgcctgtgagactaagtccgaaggggactgatataaaatgcttctgcccagcatggttgtgcagtttgttcactgcacaagggcacttggccaagggagtgagtgggactgaaaatcctgcccctgctccatgctgagccacatacaaagtccccccagtatattgtggggcccttctgggcagacatggagagcttctgaaagtcccacatgcatggaattattttcaagaccccgggtatgtggtctgtggtggtggttctccctgtgattatggactgagatactcatttagtcctaataagaccagagaagtacattgtgagatacgtgggaaacggctgcatcactcactgtcttgtgcatgtgtctccccaggggcattttcagatttctgccacggaggggatgctcttcgcgaagggagagtcaggtacattggaggattcattgctgtggccagggaaagcagaggacatgcaaaattaatatttccctttctatcttctaggatggactttcctcatttggacagccgctctggtttaaagatatgtacaaacctctcagtgccacaagaataaataatcatgcatggaagctgcacaagaagtcatctaatgaggacaagatcctcaacagggaccctgggtaaatgatggggccctcacagttcccatctaaaatgaggagggggtgagaagcttaattgctcctttcaagaatgaaaaccttggcattgttattcttatcccagggacagcgaagccccaacggaggaggaggagagtgaagccctgccataggaggagaacacagcccacctcaggcctcctgcaaaaatacatagaataaacaacaacagttactaaataaatgaaaattgtgattccgatgaagcctgccagagaaataaagcattttttaaaagaggaaataaggtgatatctgattagggcaaacatgatgcagacaagaaatgcaccggttcagaggagggaaggtcaggccgcctggggagagtccatgaaaaagatggaacgtgccagatgctgtacctggtgctgggaaagagttgactaggccagcatccctttcctcaaagggggggctcctagactggggggagggctggacatctgaatacatcctgaggagacagtgtgggacagcatggtggcagtggaaccagccgtggttctgctcttggtcggctggaaaggagtagatgtaagggatggtttagaagaagggaagtggaagaaaagttttctgagctgacaagaggaaggaaaggccgcctagaaggacactaaaaaggcaagagaagccctaagcagagtgagcaccagactccacaggttaagggctcagtcacacaggaccatccgcatgtcagaccccaggtgcaaggccaagcatcacctatgcatctgaccaactggctgtaaattggaggtccccacaactccctcctcagg

SEQ ID NO: 382062 - DNA, 7788 bp, Homo sapiens
tccttgtagttcttccccgcgttctatcctttatcttctagagaccttggtagttcccataggaatagtgctttacggagtctaatggtgatttcttaggtaaagacaggaaacatttttttcttttttacctacaagttccatatcaaaaaatgaatgtaaacttttcatgcagttttacacattgaaaatgcaggttattttaattccattccatttttcagaattctcaatcacaatcctctgacaactgttgaagatccgtatctctttaaattgccagcattaaaatatctgtaagtactatagtactctcatgagtcaagagatgatttatgctttttaaatttttcatcaaagcttaagtattttgcatttaggctaaaatgtcataatttaaattttaactgggttattgaaaaaaagttattggcgaagaaaaaaattaagaggatgtataatggtcaagacagccagcaggggaagagaacagcattgaagaacccatatagatttggaacatgtagacacatggaggaatattatttaaccaagaaagcaaaggggaaaaggtgttcattattctaaaaataaagaaaagagtaaataagatggtgagtgcaatatgaaaatgagaagataatggtaaaaaaaaaaagtgtcagttctgctcttgagtatcattaatttgatgatgcaaatcaacttttaatttctttaataagagctccctggaattctacagcaaataaagtcttgagctggcttgtttaatagagaagccaaaattgaattgttaagtacagaattttttattggggctcatatcatgaatgtttcggctttcttcttcagagacatgggaacaacgctagtcccacttacaacacttaagaacattctcatgatgactgttgaactggaaaaactgatcttacctagccatatggcctgctgcctctgccaatttaaaaacagcattgaggctgtctgcaagacagtcaagctgcattgcaacagtgcatgtctgacaaacaccacacattgtcgtgagtccaaattgcgcggtgataaattgttacattaagtatttgtttttaaactttttatttttaatgatgataaaattttaagctaatgacataattgctttatttttatttactcattcagagttaaactccctcaatttccgaactactcccttgctgaaagtcaggttctcagttactattacaaaatttaataatagaactgttccatatgcagaaaggaccaagacaaaggaatgggaaggctagggaataacattaacatccacacactgtatactgtgctctctgcttgatgctttgcccacagtgataatttcttcatatagtgcaatgtagtttgtaagctggttttaaatccatgagatctcaagtactctctgccttataggacagatgtagatacggttttggtctttctgtttttacagttttataagagtacaagtgatgctgttttatttgaagcctgagagcttctggttccataaccagaaattgctacctggctcttctaatggaatggagggcttttccattcttagaccatccaactctgaacttgctccgaatctcaaacctttctgttcacagaacaaacgctcaagggctttcaagagtgtttctgtagattaggcttattagcatcaacttcatgacttctaaaatgtgactgctttcatgtccagatagcttgaatacaggtatctaccagtgatatggggtggagaattaataatgcttggttacataaagtcagtgttgcttatttttcaaaactttttttttttttttttttttttaccaattatgttattcccttctccccaagaagtgggcagaaaagctttgttaacctccttttacagatgaggaaaaacaagatcagaggtgctaagtgctgtagcctagtgccaggtcttctggccccaattctgggttctccccaagcccatgtttcttcccctttctcacaatctttacttcttcctctgaccctcaccaccacccaaagtacttttaattctagaaaagaaacccagctgcacactggcacacctgaccttcatgcagtcagaagctttggatgattccccatccaaaatattagagatgaaatgaaagcaaagtaggcatctgacaaaagttgctttttcccttctgcattttaggacctcaagtaatgtttatccagaaactgctatcataccagggattcattgtgtatttaacaacataggcatacaatctggcaaatttgaaaaactcttaacatacaccccaaatccctgcccaaatttaagaactagggtggacacagtgcgtttttccatgtcgcatcttctgtgatggggctacgatacgtgggagcagagaatggggagggtggagcgcatgccagatgaggatctatcagcaatgggacggggcctccactttagcatctccaccctgctcctctcagaggaccgcctttcattgcattcagctgtgatggtagcacgaacacaggtgcaccgaggacgaggagagcaggagccttgtgctctctctgcatctgaggcaggacagcacagggtacggagcagtctgcagagaggccagctcatcagggaagcacttgtcttccaccttgggctttgactgagcactgggcaattggcctctggggatcaacgaaataatcctaaacagagttactctatgtcacactatggaatgttccaagtaggtggccgtgttttcaaaagatgtattttctccttttgttgttgccatttcataggtttaggattgggtgtgtgtttctcctctctgaatggcactcgaatgtttgctgactcctactctgtgtgactggggtgtacagctatggactgatgcatcccatcccatcatctttcatgatcaaagcagtctcttcttttttgacagctgaagaagcatcggtagggaatccagaaggagcgttcatgaaggtgttacaagcccggaagaactacacaagcactgagctgattgttgagccagaggagccctcagacagcagtggcatcaacttgtcaggctttgggagtgagcagctagacaccaatgacgagagtgattttatcagtacactaagttacatcttgccttatttctcagcggtaaacctagatgtgaaatcactgttactaccgttcattaaactgccaaccacaggaaacagcctggcaaagattcaaactgtaggccaaaaccggcagagagtgaagagagtcctcatgggcccaaggagcatccagaaaaggcacttcaaagaggtaggaaggcagagcatcaggagggaacagggtgcccaggcatctgtggagaacgctgccgaagaaaaaaggctcgggagtccagccccaagggaggtggaacagccccacacacagcaggggcctgagaagttagcgggaaacgccgtctacaccaagccttccttcacccaagagcataaggcagcagtctctgtgctgaaacccttctccaagggcgcgccttctacctccagccctgcaaaagccctaccacaggtgagagacagatggaaagacttaacccacgctatttccattttagaaagtgcaaaggctagagttacaaatacgaagacgtctaaaccaatcgtacatgccagaaaaaaataccgctttcacaaaactcgctcccacgtgacccacagaacacccaaagtcaaaaagagtccaaaggtcagaaagaaaagttatctgagtagactgatgctcgcaaacaggcttccattctctgcagcgaagagcctcataaattccccttcacaaggggctttttcatccttaggagacctgagtcctcaagaaaacccttttctggaagtatctgctccttcagaacattttatagaaaagaataatacaaaacacacaactgcaagaaatgcctttgaagaaaatgattttatggaaaacactaacatgccagaaggaaccatctctgaaaacacaaactacaatcatcctcctgaggcagattccgctgggactgcattcaacttagggccaactgttaaacaaactgagacaaaatgggaatacaacaacgtgggcactgacctgtcccccgagcccaaaagcttcaattacccattgctctcgtccccaggtgatcagtttgaaattcagctaacccagcagctacagtcccttatccccaacaacaatgtgagaaggctcattgctcatgttatccggaccttgaagatggactgctctggggcccatgtgcaagtgacctgtgccaagctcatctccaggacaggccacctgatgaagcttctcagtgggcagcaggaagtaaaggcatccaagatagaatgggatacggaccaatggaagattgagaactacattaatgagagcacagaagcccagagtgaacagaaagagaagtcgcttgagctcaaaaaagaagttccaggatatggctatactgacaaactcatcttggcattaattgttactggaatactaacgattttgattatacttttctgcctcattgtggtaaggacaataattaattcaggttttcagaatgcagtcctgtctttgtgtggattcagagctcacaaactgaaaaccaaagccactttcccacctgctgctacttgacatacttcttcagtcatttaaggctgaggtgtatgctttgttcttttactgcagtgtatatttcaggatttttaaaggatcctcgctttcagatctctgtgaattgaaaccatgtgaatcccactagactattttaagaagtcgatataatagcaaaatttctcccacccaaaactatgtcaacaattggatgtactcatcaagtcacccttactctgccactaatttatttccttggtgctgaaatgatgagagaggtataatctccaccctcacggagttgtcatcaccctggagaggaaggagagagccaaaagacatacgtattgtcttgtagacttattagatttacacagtatcgtcctccagtgtgtaaggcattgtctaaataggtccagttaaagcactacagagtagccatcttttacaaaaatttttggccacatttttaagttcactggtgagggggaacgtctcatactctagccctcctgagcctagaccctctgtgagatgtgtcaccatttcttggacaccatgtgagacattccccctcagattagagatgctcagcttgcatcaacttacctaaagcctacatctggctactctgggacaagtcctgtttacagtgcccattcctggagcttgcctctgtcttttgttcgattacatgatgtattacttttcccaacaggccagtgctagcatattggaagagtgatttaataaagctggcaaccttgacgctatgccaccagtccaaccttacttgcctcatttaccatttccattattgtggcagccctccattccagccacagcagcccctcaccaaaccccagtcacaccacccacatttctgcttttgtctgtgtgtttgtccatctaaaatgcccttatttcactctgcctgtgggagtcctatgcatctctcaaaagccaactcaagttcatctttcttcttgacaccttccctgaatattccagccctgctgagcctagtccctttgtgagatttgtcaccatttcttggacaccatatgagagacttcagaggctgaagtgggaggatcgcttgagcctgggaggtcgaggatgcagtgagctgtggtcgtaccactgcactctagcctgggcaacacagctaggccctgtcttaaaaacagccaccaccaaaaactatcttgggatttgaataggattacgttaaatttgtagattaatttgagaatttacatctgtacgacattctaggaacgtgctatctcatgtcatgtattcatttcttgttaatgtctttcagaagagctttagtgtttccatatatagatcttatacatcttttgttagataaaagatctttgtatttttgttcctaaattcttcatacatttgtattgccattgtaaatgggatctttcttccattttctaattagttattggtggtacatgggaaaagtatttgaggtttgtgtgctgatttcttgattttgtagatagccactgtattgaattctcattacttccagtaaaatcttagttgattctcttaggcttctttggctaacatttatcatttaatatgcaaataatgatagttttgtctcttcctttccaatacttctactctttccttcctttcccttttcctttttcctttcctttcctttccttttttttcccttctcagggccttgttgtcacccaggctggagagcaatggtgtgacctagctcactgtaacatcaaactcctgggctcaagggatcctcccgcctcagcttcctgagtggctgggactacaggcaggagaactgcttgagcccaggaggcgcaggttgcagggagccaagatagcaccattgcactccagcctggggaatgagccaaactgtctcaaataaaaaaaaaacaacaaaaaagaattttaactacggagaccttagatagtagtttgtccttttatgacaggaaaactgagaaggagaaagggagagtgtcttacttaccccatggtcacacaatgcactctgccttttcctattttattcaaattcaaaaataacatgttgtgctttaagctgatttcgtagctcactcactcatcagcgacagccagccatatgaagactgtgagatagagaacttggctagctgcactcacgcatttgcttgaggtgatccaacttatagaataaagtatctagaaaacgaagaaccacttcatctcccatcccccatcaaatgatgcctgtgagactaagtccgaaggggactgatataaaatgcttctgcccagcatggttgtgcagtttgttcactgcacaagggcacttggccaagggagtgagtgggactgaaaatcctgcccctgctccatgctgagccacatacaaagtccccccagtatattgtggggcccttctgggcagacatggagagcttctgaaagtcccacatgcatggaattattttcaagaccccgggtatgtggtctgtggtggtggttctccctgtgattatggactgagatactcatttagtcctaataagaccagagaagtacattgtgagatacgtgggaaacggctgcatcactcactgtcttgtgcatgtgtctccccaggggcattttcagatttctgccacggaggggatgctcttcgcgaagggagagtcaggtacattggaggattcattgctgtggccagggaaagcagaggacatgcaaaattaatatttccctttctatcttctaggatggactttcctcatttggacagccgctctggtttaaagatatgtacaaacctctcagtgccacaagaataaataatcatgcatggaagctgcacaagaagtcatctaatgaggacaagatcctcaacagggaccctgggtaaatgatggggccctcacagttcccatctaaaatgaggagggggtgagaagcttaattgctcctttcacagcagtgcacaacctcgacattgcaagtctgatcacagactctactaggtccccacggcgcatgaagagtgcagcatgcaa

SEQ ID NO: 382063 - DNA, 6485 bp, Homo sapiens
tccttgtagttcttccccgcgttctatcctttatcttctagagaccttggtagttcccataggaatagtgctttacggagtctaatggtgatttcttaggtaaagacaggaaacatttttttcttttttacctacaagttccatatcaaaaaatgaatgtaaacttttcatgcagttttacacattgaaaatgcaggttattttaattccattccatttttcagaattctcaatcacaatcctctgacaactgttgaagatccgtatctctttaaattgccagcattaaaatatctgtaagtactatagtactctcatgagtcaagagatgatttatgctttttaaatttttcatcaaagcttaagtattttgcatttaggctaaaatgtcataatttaaattttaactgggttattgaaaaaaagttattggcgaagaaaaaaattaagaggatgtataatggtcaagacagccagcaggggaagagaacagcattgaagaacccatatagatttggaacatgtagacacatggaggaatattatttaaccaagaaagcaaaggggaaaaggtgttcattattctaaaaataaagaaaagagtaaataagatggtgagtgcaatatgaaaatgagaagataatggtaaaaaaaaaaagtgtcagttctgctcttgagtatcattaatttgatgatgcaaatcaacttttaatttctttaataagagctccctggaattctacagcaaataaagtcttgagctggcttgtttaatagagaagccaaaattgaattgttaagtacagaattttttattggggctcatatcatgaatgtttcggctttcttcttcagagacatgggaacaacgctagtcccacttacaacacttaagaacattctcatgatgactgttgaactggaaaaactgatcttacctagccatatggcctgctgcctctgccaatttaaaaacagcattgaggctgtctgcaagacagtcaagctgcattgcaacagtgcatgtctgacaaacaccacacattgtcgtgagtccaaattgcgcggtgataaattgttacattaagtatttgtttttaaactttttatttttaatgatgataaaattttaagctaatgacataattgctttatttttatttactcattcagagttaaactccctcaatttccgaactactcccttgctgaaagtcaggttctcagttactattacaaaatttaataatagaactgttccatatgcagaaaggaccaagacaaaggaatgggaaggctagggaataacattaacatccacacactgtatactgtgctctctgcttgatgctttgcccacagtgataatttcttcatatagtgcaatgtagtttgtaagctggttttaaatccatgagatctcaagtactctctgccttataggacagatgtagatacggttttggtctttctgtttttacagttttataagagtacaagtgatgctgttttatttgaagcctgagagcttctggttccataaccagaaattgctacctggctcttctaatggaatggagggcttttccattcttagaccatccaactctgaacttgctccgaatctcaaacctttctgttcacagaacaaacgctcaagggctttcaagagtgtttctgtagattaggcttattagcatcaacttcatgacttctaaaatgtgactgctttcatgtccagatagcttgaatacaggtatctaccagtgatatggggtggagaattaataatgcttggttacataaagtcagtgttgcttatttttcaaaactttttttttttttttttttttttaccaattatgttattcccttctccccaagaagtgggcagaaaagctttgttaacctccttttacagatgaggaaaaacaagatcagaggtgctaagtgctgtagcctagtgccaggtcttctggccccaattctgggttctccccaagcccatgtttcttcccctttctcacaatctttacttcttcctctgaccctcaccaccacccaaagtacttttaattctagaaaagaaacccagctgcacactggcacacctgaccttcatgcagtcagaagctttggatgattccccatccaaaatattagagatgaaatgaaagcaaagtaggcatctgacaaaagttgctttttcccttctgcattttaggacctcaagtaatgtttatccagaaactgctatcataccagggattcattgtgtatttaacaacataggcatacaatctggcaaatttgaaaaactcttaacatacaccccaaatccctgcccaaatttaagaactagggtggacacagtgcgtttttccatgtcgcatcttctgtgatggggctacgatacgtgggagcagagaatggggagggtggagcgcatgccagatgaggatctatcagcaatgggacggggcctccactttagcatctccaccctgctcctctcagaggaccgcctttcattgcattcagctgtgatggtagcacgaacacaggtgcaccgaggacgaggagagcaggagccttgtgctctctctgcatctgaggcaggacagcacagggtacggagcagtctgcagagaggccagctcatcagggaagcacttgtcttccaccttgggctttgactgagcactgggcaattggcctctggggatcaacgaaataatcctaaacagagttactctatgtcacactatggaatgttccaagtaggtggccgtgttttcaaaagatgtattttctccttttgttgttgccatttcataggtttaggattgggtgtgtgtttctcctctctgaatggcactcgaatgtttgctgactcctactctgtgtgactggggtgtacagctatggactgatgcatcccatcccatcatctttcatgatcaaagcagtctcttcttttttgacagctgaagaagcatcggtagggaatccagaaggagcgttcatgaaggtgttacaagcccggaagaactacacaagcactgagctgattgttgagccagaggagccctcagacagcagtggcatcaacttgtcaggctttgggagtgagcagctagacaccaatgacgagagtgattttatcagtacactaagttacatcttgccttatttctcagcggtaaacctagatgtgaaatcactgttactaccgttcattaaactgccaaccacaggaaacagcctggcaaagattcaaactgtaggccaaaaccggcagagagtgaagagagtcctcatgggcccaaggagcatccagaaaaggcacttcaaagaggtaggaaggcagagcatcaggagggaacagggtgcccaggcatctgtggagaacgctgccgaagaaaaaaggctcgggagtccagccccaagggaggtggaacagccccacacacagcaggggcctgagaagttagcgggaaacgccgtctacaccaagccttccttcacccaagagcataaggcagcagtctctgtgctgaaacccttctccaagggcgcgccttctacctccagccctgcaaaagccctaccacaggtgagagacagatggaaagacttaacccacgctatttccattttagaaagtgcaaaggctagagttacaaatacgaagacgtctaaaccaatcgtacatgccagaaaaaaataccgctttcacaaaactcgctcccacgtgacccacagaacacccaaagtcaaaaagagtccaaaggtcagaaagaaaagttatctgagtagactgatgctcgcaaacaggcttccattctctgcagcgaagagcctcataaattccccttcacaaggggctttttcatccttaggagacctgagtcctcaagaaaacccttttctggaagtatctgctccttcagaacattttatagaaaagaataatacaaaacacacaactgcaagaaatgcctttgaagaaaatgattttatggaaaacactaacatgccagaaggaaccatctctgaaaacacaaactacaatcatcctcctgaggcagattccgctgggactgcattcaacttagggccaactgttaaacaaactgagacaaaatgggaatacaacaacgtgggcactgacctgtcccccgagcccaaaagcttcaattacccattgctctcgtccccaggtgatcagtttgaaattcagctaacccagcagctacagtcccttatccccaacaacaatgtgagaaggctcattgctcatgttatccggaccttgaagatggactgctctggggcccatgtgcaagtgacctgtgccaagctcatctccaggacaggccacctgatgaagcttctcagtgggcagcaggaagtaaaggcatccaagatagaatgggatacggaccaatggaagattgagaactacattaatgagagcacagaagcccagagtgaacagaaagagaagtcgcttgagctcaaaaaagaagttccaggatatggctatactgacaaactcatcttggcattaattgttactggaatactaacgattttgattatacttttctgcctcattgtgatatgttgtcaccgaaggtcattacaagaagatgaagaaggattctcaaggtaaatattagtctggtgattttttttttcttctcttttgagacggagtttccctcttgttgccaggctggagtccaaactgtctcaaataaaaaaaaaacaacaaaaaagaattttaactacggagaccttagatagtagtttgtccttttatgacaggaaaactgagaaggagaaagggagagtgtcttacttaccccatggtcacacaatgcactctgccttttcctattttattcaaattcaaaaataacatgttgtgctttaagctgatttcgtagctcactcactcatcagcgacagccagccatatgaagactgtgagatagagaacttggctagctgcactcacgcatttgcttgaggtgatccaacttatagaataaagtatctagaaaacgaagaaccacttcatctcccatcccccatcaaatgatgcctgtgagactaagtccgaaggggactgatataaaatgcttctgcccagcatggttgtgcagtttgttcactgcacaagggcacttggccaagggagtgagtgggactgaaaatcctgcccctgctccatgctgagccacatacaaagtccccccagtatattgtggggcccttctgggcagacatggagagcttctgaaagtcccacatgcatggaattattttcaagaccccgggtatgtggtctgtggtggtggttctccctgtgattatggactgagatactcatttagtcctaataagaccagagaagtacattgtgagatacgtgggaaacggctgcatcactcactgtcttgtgcatgtgtctccccaggggcattttcagatttctgccacggaggggatgctcttcgcgaagggagagtcaggtacattggaggattcattgctgtggccagggaaagcagaggacatgcaaaattaatatttccctttctatcttctaggatggactttcctcatttggacagccgctctggtttaaagatatgtacaaacctctcagtgccacaagaataaataatcatgcatggaagctgcacaagaagtcatctaatgaggacaagatcctcaacagggaccctggggacagcgaagccccaacggaggaggaggagagtgaagccctgccataggaggagaacacagcccacctcaggcctcctgcaaaaatacatagaataaacaacaacagttactaaataaatgaaaattgtgattccgatgaagcctgccagagaaataaagcattttttaaaagaggaaataaggtgatatctgattagggcaaacatgatgcagacaagaaatgcaccggttcagaggagggaaggtcaggccgcctggggagagtccatgaaaaagatggaacgtgccagatgctgtacctggtgctgggaaagagttgactaggccagcatccctttcctcaaagggggggctcctagactggggggagggctggacatctgaatacatcctgaggagacagtgtgggacagcatggtggcagtggaaccagccgtggttctgctcttggtcggctggaaaggagtagatgtaagggatggtttagaagaagggaagtggaagaaaagttttctgagctgacaagaggaaggaaaggccgcctagaaggacactaaaaaggcaagagaagccctaagcagagtgagcaccagactccacaggttaagggctcagtcacacaggaccatccgcatgtcagaccccaggtgcaaggccaagcatcacctatgcatctgaccaactggctgtaaattggaggtccccacaactccctcctcagg

SEQ ID NO: 382064 - DNA, 5925 bp, Homo sapiens
  misc_feature (5900)..(5900): n is a, c, g, or t
tccttgtagttcttccccgcgttctatcctttatcttctagagaccttggtagttcccataggaatagtgctttacggagtctaatggtgatttcttaggtaaagacaggaaacatttttttcttttttacctacaagttccatatcaaaaaatgaatgtaaacttttcatgcagttttacacattgaaaatgcaggttattttaattccattccatttttcagaattctcaatcacaatcctctgacaactgttgaagatccgtatctctttaaattgccagcattaaaatatctgtaagtactatagtactctcatgagtcaagagatgatttatgctttttaaatttttcatcaaagcttaagtattttgcatttaggctaaaatgtcataatttaaattttaactgggttattgaaaaaaagttattggcgaagaaaaaaattaagaggatgtataatggtcaagacagccagcaggggaagagaacagcattgaagaacccatatagatttggaacatgtagacacatggaggaatattatttaaccaagaaagcaaaggggaaaaggtgttcattattctaaaaataaagaaaagagtaaataagatggtgagtgcaatatgaaaatgagaagataatggtaaaaaaaaaaagtgtcagttctgctcttgagtatcattaatttgatgatgcaaatcaacttttaatttctttaataagagctccctggaattctacagcaaataaagtcttgagctggcttgtttaatagagaagccaaaattgaattgttaagtacagaattttttattggggctcatatcatgaatgtttcggctttcttcttcagagacatgggaacaacgctagtcccacttacaacacttaagaacattctcatgatgactgttgaactggaaaaactgatcttacctagccatatggcctgctgcctctgccaatttaaaaacagcattgaggctgtctgcaagacagtcaagctgcattgcaacagtgcatgtctgacaaacaccacacattgtcgtgagtccaaattgcgcggtgataaattgttacattaagtatttgtttttaaactttttatttttaatgatgataaaattttaagctaatgacataattgctttatttttatttactcattcagagttaaactccctcaatttccgaactactcccttgctgaaagtcaggttctcagttactattacaaaatttaataatagaactgttccatatgcagaaaggaccaagacaaaggaatgggaaggctagggaataacattaacatccacacactgtatactgtgctctctgcttgatgctttgcccacagtgataatttcttcatatagtgcaatgtagtttgtaagctggttttaaatccatgagatctcaagtactctctgccttataggacagatgtagatacggttttggtctttctgtttttacagttttataagagtacaagtgatgctgttttatttgaagcctgagagcttctggttccataaccagaaattgctacctggctcttctaatggaatggagggcttttccattcttagaccatccaactctgaacttgctccgaatctcaaacctttctgttcacagaacaaacgctcaagggctttcaagagtgtttctgtagattaggcttattagcatcaacttcatgacttctaaaatgtgactgctttcatgtccagatagcttgaatacaggtatctaccagtgatatggggtggagaattaataatgcttggttacataaagtcagtgttgcttatttttcaaaactttttttttttttttttttttttaccaattatgttattcccttctccccaagaagtgggcagaaaagctttgttaacctccttttacagatgaggaaaaacaagatcagaggtgctaagtgctgtagcctagtgccaggtcttctggccccaattctgggttctccccaagcccatgtttcttcccctttctcacaatctttacttcttcctctgaccctcaccaccacccaaagtacttttaattctagaaaagaaacccagctgcacactggcacacctgaccttcatgcagtcagaagctttggatgattccccatccaaaatattagagatgaaatgaaagcaaagtaggcatctgacaaaagttgctttttcccttctgcattttaggacctcaagtaatgtttatccagaaactgctatcataccagggattcattgtgtatttaacaacataggcatacaatctggcaaatttgaaaaactcttaacatacaccccaaatccctgcccaaatttaagaactagggtggacacagtgcgtttttccatgtcgcatcttctgtgatggggctacgatacgtgggagcagagaatggggagggtggagcgcatgccagatgaggatctatcagcaatgggacggggcctccactttagcatctccaccctgctcctctcagaggaccgcctttcattgcattcagctgtgatggtagcacgaacacaggtgcaccgaggacgaggagagcaggagccttgtgctctctctgcatctgaggcaggacagcacagggtacggagcagtctgcagagaggccagctcatcagggaagcacttgtcttccaccttgggctttgactgagcactgggcaattggcctctggggatcaacgaaataatcctaaacagagttactctatgtcacactatggaatgttccaagtaggtggccgtgttttcaaaagatgtattttctccttttgttgttgccatttcataggtttaggattgggtgtgtgtttctcctctctgaatggcactcgaatgtttgctgactcctactctgtgtgactggggtgtacagctatggactgatgcatcccatcccatcatctttcatgatcaaagcagtctcttcttttttgacagctgaagaagcatcggtagggaatccagaaggagcgttcatgaaggtgttacaagcccggaagaactacacaagcactgagctgattgttgagccagaggagccctcagacagcagtggcatcaacttgtcaggctttgggagtgagcagctagacaccaatgacgagagtgattttatcagtacactaagttacatcttgccttatttctcagcggtaaacctagatgtgaaatcactgttactaccgttcattaaactgccaaccacaggaaacagcctggcaaagattcaaactgtaggccaaaaccggcagagagtgaagagagtcctcatgggcccaaggagcatccagaaaaggcacttcaaagaggtaggaaggcagagcatcaggagggaacagggtgcccaggcatctgtggagaacgctgccgaagaaaaaaggctcgggagtccagccccaagggaggtggaacagccccacacacagcaggggcctgagaagttagcgggaaacgccgtctacaccaagccttccttcacccaagagcataaggcagcagtctctgtgctgaaacccttctccaagggcgcgccttctacctccagccctgcaaaagccctaccacaggtgagagacagatggaaagacttaacccacgctatttccattttagaaagtgcaaaggctagagttacaaatacgaagacgtctaaaccaatcgtacatgccagaaaaaaataccgctttcacaaaactcgctcccacgtgacccacagaacacccaaagtcaaaaagagtccaaaggtcagaaagaaaagttatctgagtagactgatgctcgcaaacaggcttccattctctgcagcgaagagcctcataaattccccttcacaaggggctttttcatccttaggagacctgagtcctcaagaaaacccttttctggaagtatctgctccttcagaacattttatagaaaagaataatacaaaacacacaactgcaagaaatgcctttgaagaaaatgattttatggaaaacactaacatgccagaaggaaccatctctgaaaacacaaactacaatcatcctcctgaggcagattccgctgggactgcattcaacttagggccaactgttaaacaaactgagacaaaatgggaatacaacaacgtgggcactgacctgtcccccgagcccaaaagcttcaattacccattgctctcgtccccaggtgatcagtttgaaattcagctaacccagcagctacagtcccttatccccaacaacaatgtgagaaggctcattgctcatgttatccggaccttgaagatggactgctctggggcccatgtgcaagtgacctgtgccaagctcatctccaggacaggccacctgatgaagcttctcagtgggcagcaggaagtaaaggcatccaagatagaatgggatacggaccaatggaagattgagaactacattaatgagagcacagaagcccagagtgaacagaaagagaagtcgcttgagctcaaaaaagaagttccaggatatggctatactgacaaactcatcttggcattaattgttactggaatactaacgattttgattatacttttctgcctcattgtggtaaggacaataattaattcaggttttcagaatgcagtcctgtctttgtgtggattcagagctcacaaactgaaaaccaaagccactttcccacctgctgctacttgacatacttcttcagtcatttaaggctgaggtgtatgctttgttcttttactgcagtgtatatttcaggatttttaaaggatcctcgctttcagatctctgtgaattgaaaccatgtgaatcccactagactattttaagaagtcgatataatagcaaaatttctcccacccaaaactatgtcaacaattggatgtactcatcaagtcacccttactctgccactaatttatttccttggtgctgaaatgatgagagaggtataatctccaccctcacggagttgtcatcaccctggagaggaaggagagagccaaaagacatacgtattgtcttgtagacttattagatttacacagtatcgtcctccagtgtgtaaggcattgtctaaataggtccagttaaagcactacagagtagccatcttttacaaaaatttttggccacatttttaagttcactggtgagggggaacgtctcatactctagccctcctgagcctagaccctctgtgagatgtgtcaccatttcttggacaccatgtgagacattccccctcagattagagatgctcagcttgcatcaacttacctaaagcctacatctggctactctgggacaagtcctgtttacagtgcccattcctggagcttgcctctgtcttttgttcgattacatgatgtattacttttcccaacaggccagtgctagcatattggaagagtgatttaataaagctggcaaccttgacgctatgccaccagtccaaccttacttgcctcatttaccatttccattattgtggcagccctccattccagccacagcagcccctcaccaaaccccagtcacaccacccacatttctgcttttgtctgtgtgtttgtccatctaaaatgcccttatttcactctgcctgtgggagtcctatgcatctctcaaaagccaactcaagttcatctttcttcttgacaccttccctgaatattccagccctgctgagcctagtccctttgtgagatttgtcaccatttcttggacaccatatgagagacttcagaggctgaagtgggaggatcgcttgagcctgggaggtcgaggatgcagtgagctgtggtcgtaccactgcactctagcctgggcaattgagcaagactgcgtctccaccaanaaaaaaatccaggcatggtgactac

SEQ ID NO: 382065 - DNA, 4963 bp, Homo sapiens
tccttgtagttcttccccgcgttctatcctttatcttctagagaccttggtagttcccataggaatagtgctttacggagtctaatggtgatttcttaggtaaagacaggaaacatttttttcttttttacctacaagttccatatcaaaaaatgaatgtaaacttttcatgcagttttacacattgaaaatgcaggttattttaattccattccatttttcagaattctcaatcacaatcctctgacaactgttgaagatccgtatctctttaaattgccagcattaaaatatctgtaagtactatagtactctcatgagtcaagagatgatttatgctttttaaatttttcatcaaagcttaagtattttgcatttaggctaaaatgtcataatttaaattttaactgggttattgaaaaaaagttattggcgaagaaaaaaattaagaggatgtataatggtcaagacagccagcaggggaagagaacagcattgaagaacccatatagatttggaacatgtagacacatggaggaatattatttaaccaagaaagcaaaggggaaaaggtgttcattattctaaaaataaagaaaagagtaaataagatggtgagtgcaatatgaaaatgagaagataatggtaaaaaaaaaaagtgtcagttctgctcttgagtatcattaatttgatgatgcaaatcaacttttaatttctttaataagagctccctggaattctacagcaaataaagtcttgagctggcttgtttaatagagaagccaaaattgaattgttaagtacagaattttttattggggctcatatcatgaatgtttcggctttcttcttcagagacatgggaacaacgctagtcccacttacaacacttaagaacattctcatgatgactgttgaactggaaaaactgatcttacctagccatatggcctgctgcctctgccaatttaaaaacagcattgaggctgtctgcaagacagtcaagctgcattgcaacagtgcatgtctgacaaacaccacacattgtcgtgagtccaaattgcgcggtgataaattgttacattaagtatttgtttttaaactttttatttttaatgatgataaaattttaagctaatgacataattgctttatttttatttactcattcagagttaaactccctcaatttccgaactactcccttgctgaaagtcaggttctcagttactattacaaaatttaataatagaactgttccatatgcagaaaggaccaagacaaaggaatgggaaggctagggaataacattaacatccacacactgtatactgtgctctctgcttgatgctttgcccacagtgataatttcttcatatagtgcaatgtagtttgtaagctggttttaaatccatgagatctcaagtactctctgccttataggacagatgtagatacggttttggtctttctgtttttacagttttataagagtacaagtgatgctgttttatttgaagcctgagagcttctggttccataaccagaaattgctacctggctcttctaatggaatggagggcttttccattcttagaccatccaactctgaacttgctccgaatctcaaacctttctgttcacagaacaaacgctcaagggctttcaagagtgtttctgtagattaggcttattagcatcaacttcatgacttctaaaatgtgactgctttcatgtccagatagcttgaatacaggtatctaccagtgatatggggtggagaattaataatgcttggttacataaagtcagtgttgcttatttttcaaaactttttttttttttttttttttttaccaattatgttattcccttctccccaagaagtgggcagaaaagctttgttaacctccttttacagatgaggaaaaacaagatcagaggtgctaagtgctgtagcctagtgccaggtcttctggccccaattctgggttctccccaagcccatgtttcttcccctttctcacaatctttacttcttcctctgaccctcaccaccacccaaagtacttttaattctagaaaagaaacccagctgcacactggcacacctgaccttcatgcagtcagaagctttggatgattccccatccaaaatattagagatgaaatgaaagcaaagtaggcatctgacaaaagttgctttttcccttctgcattttaggacctcaagtaatgtttatccagaaactgctatcataccagggattcattgtgtatttaacaacataggcatacaatctggcaaatttgaaaaactcttaacatacaccccaaatccctgcccaaatttaagaactagggtggacacagtgcgtttttccatgtcgcatcttctgtgatggggctacgatacgtgggagcagagaatggggagggtggagcgcatgccagatgaggatctatcagcaatgggacggggcctccactttagcatctccaccctgctcctctcagaggaccgcctttcattgcattcagctgtgatggtagcacgaacacaggtgcaccgaggacgaggagagcaggagccttgtgctctctctgcatctgaggcaggacagcacagggtacggagcagtctgcagagaggccagctcatcagggaagcacttgtcttccaccttgggctttgactgagcactgggcaattggcctctggggatcaacgaaataatcctaaacagagttactctatgtcacactatggaatgttccaagtaggtggccgtgttttcaaaagatgtattttctccttttgttgttgccatttcataggtttaggattgggtgtgtgtttctcctctctgaatggcactcgaatgtttgctgactcctactctgtgtgactggggtgtacagctatggactgatgcatcccatcccatcatctttcatgatcaaagcagtctcttcttttttgacagctgaagaagcatcggtagggaatccagaaggagcgttcatgaaggtgttacaagcccggaagaactacacaagcactgagctgattgttgagccagaggagccctcagacagcagtggcatcaacttgtcaggctttgggagtgagcagctagacaccaatgacgagagtgattttatcagtacactaagttacatcttgccttatttctcagcggtaaacctagatgtgaaatcactgttactaccgttcattaaactgccaaccacaggaaacagcctggcaaagattcaaactgtaggccaaaaccggcagagagtgaagagagtcctcatgggcccaaggagcatccagaaaaggcacttcaaagaggtaggaaggcagagcatcaggagggaacagggtgcccaggcatctgtggagaacgctgccgaagaaaaaaggctcgggagtccagccccaagggaggtggaacagccccacacacagcaggggcctgagaagttagcgggaaacgccgtctacaccaagccttccttcacccaagagcataaggcagcagtctctgtgctgaaacccttctccaagggcgcgccttctacctccagccctgcaaaagccctaccacaggtgagagacagatggaaagacttaacccacgctatttccattttagaaagtgcaaaggctagagttacaaatacgaagacgtctaaaccaatcgtacatgccagaaaaaaataccgctttcacaaaactcgctcccacgtgacccacagaacacccaaagtcaaaaagagtccaaaggtcagaaagaaaagttatctgagtagactgatgctcgcaaacaggcttccattctctgcagcgaagagcctcataaattccccttcacaaggggctttttcatccttaggagacctgagtcctcaagaaaacccttttctggaagtatctgctccttcagaacattttatagaaaagaataatacaaaacacacaactgcaagaaatgcctttgaagaaaatgattttatggaaaacactaacatgccagaaggaaccatctctgaaaacacaaactacaatcatcctcctgaggcagattccgctgggactgcattcaacttagggccaactgttaaacaaactgagacaaaatgggaatacaacaacgtgggcactgacctgtcccccgagcccaaaagcttcaattacccattgctctcgtccccaggtgatcagtttgaaattcagctaacccagcagctacagtcccttatccccaacaacaatgtgagaaggctcattgctcatgttatccggaccttgaagatggactgctctggggcccatgtgcaagtgacctgtgccaagctcatctccaggacaggccacctgatgaagcttctcagtgggcagcaggaagtaaaggcatccaagatagaatgggatacggaccaatggaagattgagaactacattaatgagagcacagaagcccagagtgaacagaaagagaagtcgcttgagctcaaaaaagaagttccaggatatggctatactgacaaactcatcttggcattaattgttactggaatactaacgattttgattatacttttctgcctcattgtgatatgttgtcaccgaaggtcattacaagaagatgaagaaggattctcaagggacagcgaagccccaacggaggaggaggagagtgaagccctgccataggaggagaacacagcccacctcaggcctcctgcaaaaatacatagaataaacaacggccatcaaaaaagcaggactgaagccagcggcccacacatccacagaggcagcgggcagagcaagcacagggccatcgttcctgcccttgtttcccagtctaattagtcacccagacctgaaaacatatgctcagggggtggagattttacaattaaataacattgtttttggtgccctcaaaaa

SEQ ID NO: 382066 - DNA, 5164 bp, Homo sapiens
tccttgtagttcttccccgcgttctatcctttatcttctagagaccttggtagttcccataggaatagtgctttacggagtctaatggtgatttcttaggtaaagacaggaaacatttttttcttttttacctacaagttccatatcaaaaaatgaatgtaaacttttcatgcagttttacacattgaaaatgcaggttattttaattccattccatttttcagaattctcaatcacaatcctctgacaactgttgaagatccgtatctctttaaattgccagcattaaaatatctgtaagtactatagtactctcatgagtcaagagatgatttatgctttttaaatttttcatcaaagcttaagtattttgcatttaggctaaaatgtcataatttaaattttaactgggttattgaaaaaaagttattggcgaagaaaaaaattaagaggatgtataatggtcaagacagccagcaggggaagagaacagcattgaagaacccatatagatttggaacatgtagacacatggaggaatattatttaaccaagaaagcaaaggggaaaaggtgttcattattctaaaaataaagaaaagagtaaataagatggtgagtgcaatatgaaaatgagaagataatggtaaaaaaaaaaagtgtcagttctgctcttgagtatcattaatttgatgatgcaaatcaacttttaatttctttaataagagctccctggaattctacagcaaataaagtcttgagctggcttgtttaatagagaagccaaaattgaattgttaagtacagaattttttattggggctcatatcatgaatgtttcggctttcttcttcagagacatgggaacaacgctagtcccacttacaacacttaagaacattctcatgatgactgttgaactggaaaaactgatcttacctagccatatggcctgctgcctctgccaatttaaaaacagcattgaggctgtctgcaagacagtcaagctgcattgcaacagtgcatgtctgacaaacaccacacattgtcgtgagtccaaattgcgcggtgataaattgttacattaagtatttgtttttaaactttttatttttaatgatgataaaattttaagctaatgacataattgctttatttttatttactcattcagagttaaactccctcaatttccgaactactcccttgctgaaagtcaggttctcagttactattacaaaatttaataatagaactgttccatatgcagaaaggaccaagacaaaggaatgggaaggctagggaataacattaacatccacacactgtatactgtgctctctgcttgatgctttgcccacagtgataatttcttcatatagtgcaatgtagtttgtaagctggttttaaatccatgagatctcaagtactctctgccttataggacagatgtagatacggttttggtctttctgtttttacagttttataagagtacaagtgatgctgttttatttgaagcctgagagcttctggttccataaccagaaattgctacctggctcttctaatggaatggagggcttttccattcttagaccatccaactctgaacttgctccgaatctcaaacctttctgttcacagaacaaacgctcaagggctttcaagagtgtttctgtagattaggcttattagcatcaacttcatgacttctaaaatgtgactgctttcatgtccagatagcttgaatacaggtatctaccagtgatatggggtggagaattaataatgcttggttacataaagtcagtgttgcttatttttcaaaactttttttttttttttttttttttaccaattatgttattcccttctccccaagaagtgggcagaaaagctttgttaacctccttttacagatgaggaaaaacaagatcagaggtgctaagtgctgtagcctagtgccaggtcttctggccccaattctgggttctccccaagcccatgtttcttcccctttctcacaatctttacttcttcctctgaccctcaccaccacccaaagtacttttaattctagaaaagaaacccagctgcacactggcacacctgaccttcatgcagtcagaagctttggatgattccccatccaaaatattagagatgaaatgaaagcaaagtaggcatctgacaaaagttgctttttcccttctgcattttaggacctcaagtaatgtttatccagaaactgctatcataccagggattcattgtgtatttaacaacataggcatacaatctggcaaatttgaaaaactcttaacatacaccccaaatccctgcccaaatttaagaactagggtggacacagtgcgtttttccatgtcgcatcttctgtgatggggctacgatacgtgggagcagagaatggggagggtggagcgcatgccagatgaggatctatcagcaatgggacggggcctccactttagcatctccaccctgctcctctcagaggaccgcctttcattgcattcagctgtgatggtagcacgaacacaggtgcaccgaggacgaggagagcaggagccttgtgctctctctgcatctgaggcaggacagcacagggtacggagcagtctgcagagaggccagctcatcagggaagcacttgtcttccaccttgggctttgactgagcactgggcaattggcctctggggatcaacgaaataatcctaaacagagttactctatgtcacactatggaatgttccaagtaggtggccgtgttttcaaaagatgtattttctccttttgttgttgccatttcataggtttaggattgggtgtgtgtttctcctctctgaatggcactcgaatgtttgctgactcctactctgtgtgactggggtgtacagctatggactgatgcatcccatcccatcatctttcatgatcaaagcagtctcttcttttttgacagctgaagaagcatcggtagggaatccagaaggagcgttcatgaaggtgttacaagcccggaagaactacacaagcactgagctgattgttgagccagaggagccctcagacagcagtggcatcaacttgtcaggctttgggagtgagcagctagacaccaatgacgagagtgattttatcagtacactaagttacatcttgccttatttctcagcggtaaacctagatgtgaaatcactgttactaccgttcattaaactgccaaccacaggaaacagcctggcaaagattcaaactgtaggccaaaaccggcagagagtgaagagagtcctcatgggcccaaggagcatccagaaaaggcacttcaaagaggtaggaaggcagagcatcaggagggaacagggtgcccaggcatctgtggagaacgctgccgaagaaaaaaggctcgggagtccagccccaagggaggtggaacagccccacacacagcaggggcctgagaagttagcgggaaacgccgtctacaccaagccttccttcacccaagagcataaggcagcagtctctgtgctgaaacccttctccaagggcgcgccttctacctccagccctgcaaaagccctaccacaggtgagagacagatggaaagacttaacccacgctatttccattttagaaagtgcaaaggctagagttacaaatacgaagacgtctaaaccaatcgtacatgccagaaaaaaataccgctttcacaaaactcgctcccacgtgacccacagaacacccaaagtcaaaaagagtccaaaggtcagaaagaaaagttatctgagtagactgatgctcgcaaacaggcttccattctctgcagcgaagagcctcataaattccccttcacaaggggctttttcatccttaggagacctgagtcctcaagaaaacccttttctggaagtatctgctccttcagaacattttatagaaaagaataatacaaaacacacaactgcaagaaatgcctttgaagaaaatgattttatggaaaacactaacatgccagaaggaaccatctctgaaaacacaaactacaatcatcctcctgaggcagattccgctgggactgcattcaacttagggccaactgttaaacaaactgagacaaaatgggaatacaacaacgtgggcactgacctgtcccccgagcccaaaagcttcaattacccattgctctcgtccccaggtgatcagtttgaaattcagctaacccagcagctacagtcccttatccccaacaacaatgtgagaaggctcattgctcatgttatccggaccttgaagatggactgctctggggcccatgtgcaagtgacctgtgccaagctcatctccaggacaggccacctgatgaagcttctcagtgggcagcaggaagtaaaggcatccaagatagaatgggatacggaccaatggaagattgagaactacattaatgagagcacagaagcccagagtgaacagaaagagaagtcgcttgagctcaaaaaagaagttccaggatatggctatactgacaaactcatcttggcattaattgttactggaatactaacgattttgattatacttttctgcctcattgtgatatgttgtcaccgaaggtcattacaagaagatgaagaaggattctcaaggtaaatattagtctggtgattttttttttcttctcttttgagacggagtttccctcttgttgccaggctggagtgcaatgacacgatctcggctcacggcaacctccacttcccaggttcaagcgattctcctgcctcagcctcccgagtagctgggattacaggcatgcaccactagtctcgcgacgttttaattagaattttagaattagaggagggcttagaactctgccctcatttttcagtgaggaaactgcccaagacaggacaaatacttaccctaatgcttagcctggctccagtgaaattagctccccagccaaagctgagctggatggaactaacaaggacacacctgctgtccccagccctttcgggaggtggggagggataggaaggagaaaggttttggtgcctattgctgctgatggtgggcatcaggccaggccaggggccttcttggaggctctgggaaaggggaagggaaggc

SEQ ID NO: 382067 - DNA, 4877 bp, Homo sapiens
tccttgtagttcttccccgcgttctatcctttatcttctagagaccttggtagttcccataggaatagtgctttacggagtctaatggtgatttcttaggtaaagacaggaaacatttttttcttttttacctacaagttccatatcaaaaaatgaatgtaaacttttcatgcagttttacacattgaaaatgcaggttattttaattccattccatttttcagaattctcaatcacaatcctctgacaactgttgaagatccgtatctctttaaattgccagcattaaaatatctgtaagtactatagtactctcatgagtcaagagatgatttatgctttttaaatttttcatcaaagcttaagtattttgcatttaggctaaaatgtcataatttaaattttaactgggttattgaaaaaaagttattggcgaagaaaaaaattaagaggatgtataatggtcaagacagccagcaggggaagagaacagcattgaagaacccatatagatttggaacatgtagacacatggaggaatattatttaaccaagaaagcaaaggggaaaaggtgttcattattctaaaaataaagaaaagagtaaataagatggtgagtgcaatatgaaaatgagaagataatggtaaaaaaaaaaagtgtcagttctgctcttgagtatcattaatttgatgatgcaaatcaacttttaatttctttaataagagctccctggaattctacagcaaataaagtcttgagctggcttgtttaatagagaagccaaaattgaattgttaagtacagaattttttattggggctcatatcatgaatgtttcggctttcttcttcagagacatgggaacaacgctagtcccacttacaacacttaagaacattctcatgatgactgttgaactggaaaaactgatcttacctagccatatggcctgctgcctctgccaatttaaaaacagcattgaggctgtctgcaagacagtcaagctgcattgcaacagtgcatgtctgacaaacaccacacattgtcgtgagtccaaattgcgcggtgataaattgttacattaagtatttgtttttaaactttttatttttaatgatgataaaattttaagctaatgacataattgctttatttttatttactcattcagagttaaactccctcaatttccgaactactcccttgctgaaagtcaggttctcagttactattacaaaatttaataatagaactgttccatatgcagaaaggaccaagacaaaggaatgggaaggctagggaataacattaacatccacacactgtatactgtgctctctgcttgatgctttgcccacagtgataatttcttcatatagtgcaatgtagtttgtaagctggttttaaatccatgagatctcaagtactctctgccttataggacagatgtagatacggttttggtctttctgtttttacagttttataagagtacaagtgatgctgttttatttgaagcctgagagcttctggttccataaccagaaattgctacctggctcttctaatggaatggagggcttttccattcttagaccatccaactctgaacttgctccgaatctcaaacctttctgttcacagaacaaacgctcaagggctttcaagagtgtttctgtagattaggcttattagcatcaacttcatgacttctaaaatgtgactgctttcatgtccagatagcttgaatacaggtatctaccagtgatatggggtggagaattaataatgcttggttacataaagtcagtgttgcttatttttcaaaactttttttttttttttttttttttaccaattatgttattcccttctccccaagaagtgggcagaaaagctttgttaacctccttttacagatgaggaaaaacaagatcagaggtgctaagtgctgtagcctagtgccaggtcttctggccccaattctgggttctccccaagcccatgtttcttcccctttctcacaatctttacttcttcctctgaccctcaccaccacccaaagtacttttaattctagaaaagaaacccagctgcacactggcacacctgaccttcatgcagtcagaagctttggatgattccccatccaaaatattagagatgaaatgaaagcaaagtaggcatctgacaaaagttgctttttcccttctgcattttaggacctcaagtaatgtttatccagaaactgctatcataccagggattcattgtgtatttaacaacataggcatacaatctggcaaatttgaaaaactcttaacatacaccccaaatccctgcccaaatttaagaactagggtggacacagtgcgtttttccatgtcgcatcttctgtgatggggctacgatacgtgggagcagagaatggggagggtggagcgcatgccagatgaggatctatcagcaatgggacggggcctccactttagcatctccaccctgctcctctcagaggaccgcctttcattgcattcagctgtgatggtagcacgaacacaggtgcaccgaggacgaggagagcaggagccttgtgctctctctgcatctgaggcaggacagcacagggtacggagcagtctgcagagaggccagctcatcagggaagcacttgtcttccaccttgggctttgactgagcactgggcaattggcctctggggatcaacgaaataatcctaaacagagttactctatgtcacactatggaatgttccaagtaggtggccgtgttttcaaaagatgtattttctccttttgttgttgccatttcataggtttaggattgggtgtgtgtttctcctctctgaatggcactcgaatgtttgctgactcctactctgtgtgactggggtgtacagctatggactgatgcatcccatcccatcatctttcatgatcaaagcagtctcttcttttttgacagctgaagaagcatcggtagggaatccagaaggagcgttcatgaaggtgttacaagcccggaagaactacacaagcactgagctgattgttgagccagaggagccctcagacagcagtggcatcaacttgtcaggctttgggagtgagcagctagacaccaatgacgagagtgattttatcagtacactaagttacatcttgccttatttctcagcggtaaacctagatgtgaaatcactgttactaccgttcattaaactgccaaccacaggaaacagcctggcaaagattcaaactgtaggccaaaaccggcagagagtgaagagagtcctcatgggcccaaggagcatccagaaaaggcacttcaaagaggtaggaaggcagagcatcaggagggaacagggtgcccaggcatctgtggagaacgctgccgaagaaaaaaggctcgggagtccagccccaagggaggtggaacagccccacacacagcaggggcctgagaagttagcgggaaacgccgtctacaccaagccttccttcacccaagagcataaggcagcagtctctgtgctgaaacccttctccaagggcgcgccttctacctccagccctgcaaaagccctaccacaggtgagagacagatggaaagacttaacccacgctatttccattttagaaagtgcaaaggctagagttacaaatacgaagacgtctaaaccaatcgtacatgccagaaaaaaataccgctttcacaaaactcgctcccacgtgacccacagaacacccaaagtcaaaaagagtccaaaggtcagaaagaaaagttatctgagtagactgatgctcgcaaacaggcttccattctctgcagcgaagagcctcataaattccccttcacaaggggctttttcatccttaggagacctgagtcctcaagaaaacccttttctggaagtatctgctccttcagaacattttatagaaaagaataatacaaaacacacaactgcaagaaatgcctttgaagaaaatgattttatggaaaacactaacatgccagaaggaaccatctctgaaaacacaaactacaatcatcctcctgaggcagattccgctgggactgcattcaacttagggccaactgttaaacaaactgagacaaaatgggaatacaacaacgtgggcactgacctgtcccccgagcccaaaagcttcaattacccattgctctcgtccccaggtgatcagtttgaaattcagctaacccagcagctacagtcccttatccccaacaacaatgtgagaaggctcattgctcatgttatccggaccttgaagatggactgctctggggcccatgtgcaagtgacctgtgccaagctcatctccaggacaggccacctgatgaagcttctcagtgggcagcaggaagtaaaggcatccaagatagaatgggatacggaccaatggaagattgagaactacattaatgagagcacagaagcccagagtgaacagaaagagaagtcgcttgaggtgaggaccacacagaaacatgagacccagatttcccatcatttagcatatcccaggaaagtgcccacacagaagagtctgggactcccaggccatagcttatcttggccatgtaactttggtcatgacagtgatctcccactttgctcatgtagagagagaaatagattagggcacaagatgaactgtaggccgggggtggtagctcacgcctgtaatctcagcactttgggaggcgaaggtgggtggattacttgaagtcaggagtttgagaccagcttggccaacatagtgaaagcctgtctccacaaaaaataagaaaattagctgggttgatgacacgtgcctgtagtcccag

SEQ ID NO: 382068 - DNA, 6078 bp, Homo sapiens
aggcctccacaagcaccaacatatgtgagctctgtacctgcggagatgagatgttgtcatgtattgatctcaacccagagcagaggctccgccaagtgcctgtgccagagcccaacacccacaatggcaccttcaccatcttaaatttccaaggaaactatatttcttacattgatggaaatgtatggaaagcatacagttggaccgagaaactaattctcagagaaaataacttgactgaattacacaaggattcatttgaaggcctgctatccctccagtatttagatttatcctgcaataaaatacagtctattgaaagacatacatttgaaccactaccatttttgaagtttataaatcttagttgcaatgtaattacagaactcagctttggaacatttcaggcctggcacggaatgcagtttttacataagttaattctcaatcacaatcctctgacaactgttgaagatccgtatctctttaaattgccagcattaaaatatctagacatgggaacaacgctagtcccacttacaacacttaagaacattctcatgatgactgttgaactggaaaaactgatcttacctagccatatggcctgctgcctctgccaatttaaaaacagcattgaggctgtctgcaagacagtcaagctgcattgcaacagtgcatgtctgacaaacaccacacattgtcctgaagaagcatcggtagggaatccagaaggagcgttcatgaaggtgttacaagcccggaagaactacacaagcactgagctgattgttgagccagaggagccctcagacagcagtggcatcaacttgtcaggctttgggagtgagcagctagacaccaatgacgagagtgattttatcagtacactaagttacatcttgccttatttctcagcggtaaacctagatgtgaaatcactgttactaccgttcattaaactgccaaccacaggaaacagcctggcaaagattcaaactgtaggccaaaaccggcagagagtgaagagagtcctcatgggcccaaggagcatccagaaaaggcacttcaaagaggtaggaaggcagagcatcaggagggaacagggtgcccaggcatctgtggagaacgctgccgaagaaaaaaggctcgggagtccagccccaagggaggtggaacagccccacacacagcaggggcctgagaagttagcgggaaacgccgtctacaccaagccttccttcacccaagagcataaggcagcagtctctgtgctgaaacccttctccaagggcgcgccttctacctccagccctgcaaaagccctaccacaggtgagagacagatggaaagacttaacccacgctatttccattttagaaagtgcaaaggctagagttacaaatacgaagacgtctaaaccaatcgtacatgccagaaaaaaataccgctttcacaaaactcgctcccacgtgacccacagaacacccaaagtcaaaaagagtccaaaggtcagaaagaaaagttatctgagtagactgatgctcgcaaacaggcttccattctctgcagcgaagagcctcataaattccccttcacaaggggctttttcatccttaggagacctgagtcctcaagaaaacccttttctggaagtatctgctccttcagaacattttatagaaaagaataatacaaaacacacaactgcaagaaatgcctttgaagaaaatgattttatggaaaacactaacatgccagaaggaaccatctctgaaaacacaaactacaatcatcctcctgaggcagattccgctgggactgcattcaacttagggccaactgttaaacaaactgagacaaaatgggaatacaacaacgtgggcactgacctgtcccccgagcccaaaagcttcaattacccattgctctcgtccccaggtgatcagtttgaaattcagctaacccagcagctacagtcccttatccccaacaacaatgtgagaaggctcattgctcatgttatccggaccttgaagatggactgctctggggcccatgtgcaagtgacctgtgccaagctcatctccaggacaggccacctgatgaagcttctcagtgggcagcaggaagtaaaggcatccaagatagaatgggatacggaccaatggaagattgagaactacattaatgagagcacagaagcccagagtgaacagaaagagaagtcgcttgagctcaaaaaagaagttccaggatatggctatactgacaaactcatcttggcattaattgttactggaatactaacgattttgattatacttttctgcctcattgtggtaaggacaataattaattcaggttttcagaatgcagtcctgtctttgtgtggattcagagctcacaaactgaaaaccaaagccactttcccacctgctgctacttgacatacttcttcagtcatttaaggctgaggtgtatgctttgttcttttactgcagtgtatatttcaggatttttaaaggatcctcgctttcagatctctgtgaattgaaaccatgtgaatcccactagactattttaagaagtcgatataatagcaaaatttctcccacccaaaactatgtcaacaattggatgtactcatcaagtcacccttactctgccactaatttatttccttggtgctgaaatgatgagagaggtataatctccaccctcacggagttgtcatcaccctggagaggaaggagagagccaaaagacatacgtattgtcttgtagacttattagatttacacagtatcgtcctccagtgtgtaaggcattgtctaaataggtccagttaaagcactacagagtagccatcttttacaaaaatttttggccacatttttaagttcactggtgagggggaacgtctcatactctagccctcctgagcctagaccctctgtgagatgtgtcaccatttcttggacaccatgtgagacattccccctcagattagagatgctcagcttgcatcaacttacctaaagcctacatctggctactctgggacaagtcctgtttacagtgcccattcctggagcttgcctctgtcttttgttcgattacatgatgtattacttttcccaacaggccagtgctagcatattggaagagtgatttaataaagctggcaaccttgacgctatgccaccagtccaaccttacttgcctcatttaccatttccattattgtggcagccctccattccagccacagcagcccctcaccaaaccccagtcacaccacccacatttctgcttttgtctgtgtgtttgtccatctaaaatgcccttatttcactctgcctgtgggagtcctatgcatctctcaaaagccaactcaagttcatctttcttcttgacaccttccctgaatattccagccctgctgagcctagtccctttgtgagatttgtcaccatttcttggacaccatatgagagacttcagaggctgaagtgggaggatcgcttgagcctgggaggtcgaggatgcagtgagctgtggtcgtaccactgcactctagcctgggcaacacagctaggccctgtcttaaaaacagccaccaccaaaaactatcttgggatttgaataggattacgttaaatttgtagattaatttgagaatttacatctgtacgacattctaggaacgtgctatctcatgtcatgtattcatttcttgttaatgtctttcagaagagctttagtgtttccatatatagatcttatacatcttttgttagataaaagatctttgtatttttgttcctaaattcttcatacatttgtattgccattgtaaatgggatctttcttccattttctaattagttattggtggtacatgggaaaagtatttgaggtttgtgtgctgatttcttgattttgtagatagccactgtattgaattctcattacttccagtaaaatcttagttgattctcttaggcttctttggctaacatttatcatttaatatgcaaataatgatagttttgtctcttcctttccaatacttctactctttccttcctttcccttttcctttttcctttcctttcctttccttttttttcccttctcagggccttgttgtcacccaggctggagagcaatggtgtgacctagctcactgtaacatcaaactcctgggctcaagggatcctcccgcctcagcttcctgagtggctgggactacaggcaggagaactgcttgagcccaggaggcgcaggttgcagggagccaagatagcaccattgcactccagcctggggaatgagccaaactgtctcaaataaaaaaaaaacaacaaaaaagaattttaactacggagaccttagatagtagtttgtccttttatgacaggaaaactgagaaggagaaagggagagtgtcttacttaccccatggtcacacaatgcactctgccttttcctattttattcaaattcaaaaataacatgttgtgctttaagctgatttcgtagctcactcactcatcagcgacagccagccatatgaagactgtgagatagagaacttggctagctgcactcacgcatttgcttgaggtgatccaacttatagaataaagtatctagaaaacgaagaaccacttcatctcccatcccccatcaaatgatgcctgtgagactaagtccgaaggggactgatataaaatgcttctgcccagcatggttgtgcagtttgttcactgcacaagggcacttggccaagggagtgagtgggactgaaaatcctgcccctgctccatgctgagccacatacaaagtccccccagtatattgtggggcccttctgggcagacatggagagcttctgaaagtcccacatgcatggaattattttcaagaccccgggtatgtggtctgtggtggtggttctccctgtgattatggactgagatactcatttagtcctaataagaccagagaagtacattgtgagatacgtgggaaacggctgcatcactcactgtcttgtgcatgtgtctccccaggggcattttcagatttctgccacggaggggatgctcttcgcgaagggagagtcaggtacattggaggattcattgctgtggccagggaaagcagaggacatgcaaaattaatatttccctttctatcttctaggatggactttcctcatttggacagccgctctggtttaaagatatgtacaaacctctcagtgccacaagaataaataatcatgcatggaagctgcacaagaagtcatctaatgaggacaagatcctcaacagggaccctggggacagcgaagccccaacggaggaggaggagagtgaagccctgccataggaggagaacacagcccacctcaggcctcctgcaaaaatacatagaataaacaacaacagttactaaataaatgaaaattgtgattccgatgaagcctgccagagaaataaagcattttttaaaagaggaaataaggtgatatctgattagggcaaacatgatgcagacaagaaatgcaccggttcagaggagggaaggtcaggccgcctggggagagtccatgaaaaagatggaacgtgccagatgctgtacctggtgctgggaaagagttgactaggccagcatccctttcctcaaagggggggctcctagactggggggagggctggacatctgaatacatcctgaggagacagtgtgggacagcatggtggcagtggaaccagccgtggttctgctcttggtcggctggaaaggagtagatgtaagggatggtttagaagaagggaagtggaagaaaagttttctgagctgacaagaggaaggaaaggccgcctagaaggacactaaaaaggcaagagaagccctaagcagagtgagcaccagactccacaggttaagggctcagtcacacaggaccatccgcatgtcagaccccaggtgcaaggccaagcatcacctatgcatctgaccaactggctgtaaattggaggtccccacaactccctcctcagg

SEQ ID NO: 382069 - DNA, 6163 bp, Homo sapiens
tgtattacactgacggttgcaaagtgacacttttaaaaattctgtcattccttctacatttactagctggcattatttcattgaagaagaactcctcctctttctttttcaatatcactcttcgtggattcttctttatattaaatatgttgtaacttattgttgttattcttttgaatgctcaaattgtccagatttgaccaatgcagtctttgttattttttaactccgcaatccaggttaaactaagctatttttaatgcccagagtaatttataatatttcccactcccaacaggaattgagaaagggactccagaagttgggggcttattcagacttcttaaaagtctaccttcttcctctgtactttcagcccaaagtgagacttttgaattgggaagagatacttctgaaactactaatcactgtcacccaattctaatcccaaccatctttattctaggcataccatactcactgccatgcttacccttcagttgggcacttttgtcctccttcctattggccttctggttcctacccaactgtccagtccataggcttcaatgacacctttttcccacacctgtggtagcgttggctgcctcctttacctactcaagtaaccgctttaccgctaatttattgctctctgttttcatctataggatcttacctagccatatggcctgctgcctctgccaatttaaaaacagcattgaggctgtctgcaagacagtcaagctgcattgcaacagtgcatgtctgacaaacaccacacattgtcctgaagaagcatcggtagggaatccagaaggagcgttcatgaaggtgttacaagcccggaagaactacacaagcactgagctgattgttgagccagaggagccctcagacagcagtggcatcaacttgtcaggctttgggagtgagcagctagacaccaatgacgagagtgattttatcagtacactaagttacatcttgccttatttctcagcggtaaacctagatgtgaaatcactgttactaccgttcattaaactgccaaccacaggaaacagcctggcaaagattcaaactgtaggccaaaaccggcagagagtgaagagagtcctcatgggcccaaggagcatccagaaaaggcacttcaaagaggtaggaaggcagagcatcaggagggaacagggtgcccaggcatctgtggagaacgctgccgaagaaaaaaggctcgggagtccagccccaagggaggtggaacagccccacacacagcaggggcctgagaagttagcgggaaacgccgtctacaccaagccttccttcacccaagagcataaggcagcagtctctgtgctgaaacccttctccaagggcgcgccttctacctccagccctgcaaaagccctaccacaggtgagagacagatggaaagacttaacccacgctatttccattttagaaagtgcaaaggctagagttacaaatacgaagacgtctaaaccaatcgtacatgccagaaaaaaataccgctttcacaaaactcgctcccacgtgacccacagaacacccaaagtcaaaaagagtccaaaggtcagaaagaaaagttatctgagtagactgatgctcgcaaacaggcttccattctctgcagcgaagagcctcataaattccccttcacaaggggctttttcatccttaggagacctgagtcctcaagaaaacccttttctggaagtatctgctccttcagaacattttatagaaaagaataatacaaaacacacaactgcaagaaatgcctttgaagaaaatgattttatggaaaacactaacatgccagaaggaaccatctctgaaaacacaaactacaatcatcctcctgaggcagattccgctgggactgcattcaacttagggccaactgttaaacaaactgagacaaaatgggaatacaacaacgtgggcactgacctgtcccccgagcccaaaagcttcaattacccattgctctcgtccccaggtgatcagtttgaaattcagctaacccagcagctacagtcccttatccccaacaacaatgtgagaaggctcattgctcatgttatccggaccttgaagatggactgctctggggcccatgtgcaagtgacctgtgccaagctcatctccaggacaggccacctgatgaagcttctcagtgggcagcaggaagtaaaggcatccaagatagaatgggatacggaccaatggaagattgagaactacattaatgagagcacagaagcccagagtgaacagaaagagaagtcgcttgagctcaaaaaagaagttccaggatatggctatactgacaaactcatcttggcattaattgttactggaatactaacgattttgattatacttttctgcctcattgtggtaaggacaataattaattcaggttttcagaatgcagtcctgtctttgtgtggattcagagctcacaaactgaaaaccaaagccactttcccacctgctgctacttgacatacttcttcagtcatttaaggctgaggtgtatgctttgttcttttactgcagtgtatatttcaggatttttaaaggatcctcgctttcagatctctgtgaattgaaaccatgtgaatcccactagactattttaagaagtcgatataatagcaaaatttctcccacccaaaactatgtcaacaattggatgtactcatcaagtcacccttactctgccactaatttatttccttggtgctgaaatgatgagagaggtataatctccaccctcacggagttgtcatcaccctggagaggaaggagagagccaaaagacatacgtattgtcttgtagacttattagatttacacagtatcgtcctccagtgtgtaaggcattgtctaaataggtccagttaaagcactacagagtagccatcttttacaaaaatttttggccacatttttaagttcactggtgagggggaacgtctcatactctagccctcctgagcctagaccctctgtgagatgtgtcaccatttcttggacaccatgtgagacattccccctcagattagagatgctcagcttgcatcaacttacctaaagcctacatctggctactctgggacaagtcctgtttacagtgcccattcctggagcttgcctctgtcttttgttcgattacatgatgtattacttttcccaacaggccagtgctagcatattggaagagtgatttaataaagctggcaaccttgacgctatgccaccagtccaaccttacttgcctcatttaccatttccattattgtggcagccctccattccagccacagcagcccctcaccaaaccccagtcacaccacccacatttctgcttttgtctgtgtgtttgtccatctaaaatgcccttatttcactctgcctgtgggagtcctatgcatctctcaaaagccaactcaagttcatctttcttcttgacaccttccctgaatattccagccctgctgagcctagtccctttgtgagatttgtcaccatttcttggacaccatatgagagacttcagaggctgaagtgggaggatcgcttgagcctgggaggtcgaggatgcagtgagctgtggtcgtaccactgcactctagcctgggcaacacagctaggccctgtcttaaaaacagccaccaccaaaaactatcttgggatttgaataggattacgttaaatttgtagattaatttgagaatttacatctgtacgacattctaggaacgtgctatctcatgtcatgtattcatttcttgttaatgtctttcagaagagctttagtgtttccatatatagatcttatacatcttttgttagataaaagatctttgtatttttgttcctaaattcttcatacatttgtattgccattgtaaatgggatctttcttccattttctaattagttattggtggtacatgggaaaagtatttgaggtttgtgtgctgatttcttgattttgtagatagccactgtattgaattctcattacttccagtaaaatcttagttgattctcttaggcttctttggctaacatttatcatttaatatgcaaataatgatagttttgtctcttcctttccaatacttctactctttccttcctttcccttttcctttttcctttcctttcctttccttttttttcccttctcagggccttgttgtcacccaggctggagagcaatggtgtgacctagctcactgtaacatcaaactcctgggctcaagggatcctcccgcctcagcttcctgagtggctgggactacaggcaggagaactgcttgagcccaggaggcgcaggttgcagggagccaagatagcaccattgcactccagcctggggaatgagccaaactgtctcaaataaaaaaaaaacaacaaaaaagaattttaactacggagaccttagatagtagtttgtccttttatgacaggaaaactgagaaggagaaagggagagtgtcttacttaccccatggtcacacaatgcactctgccttttcctattttattcaaattcaaaaataacatgttgtgctttaagctgatttcgtagctcactcactcatcagcgacagccagccatatgaagactgtgagatagagaacttggctagctgcactcacgcatttgcttgaggtgatccaacttatagaataaagtatctagaaaacgaagaaccacttcatctcccatcccccatcaaatgatgcctgtgagactaagtccgaaggggactgatataaaatgcttctgcccagcatggttgtgcagtttgttcactgcacaagggcacttggccaagggagtgagtgggactgaaaatcctgcccctgctccatgctgagccacatacaaagtccccccagtatattgtggggcccttctgggcagacatggagagcttctgaaagtcccacatgcatggaattattttcaagaccccgggtatgtggtctgtggtggtggttctccctgtgattatggactgagatactcatttagtcctaataagaccagagaagtacattgtgagatacgtgggaaacggctgcatcactcactgtcttgtgcatgtgtctccccaggggcattttcagatttctgccacggaggggatgctcttcgcgaagggagagtcaggtacattggaggattcattgctgtggccagggaaagcagaggacatgcaaaattaatatttccctttctatcttctaggatggactttcctcatttggacagccgctctggtttaaagatatgtacaaacctctcagtgccacaagaataaataatcatgcatggaagctgcacaagaagtcatctaatgaggacaagatcctcaacagggaccctggggacagcgaagccccaacggaggaggaggagagtgaagccctgccataggaggagaacacagcccacctcaggcctcctgcaaaaatacatagaataaacaacaacagttactaaataaatgaaaattgtgattccgatgaagcctgccagagaaataaagcattttttaaaagaggaaataaggtgatatctgattagggcaaacatgatgcagacaagaaatgcaccggttcagaggagggaaggtcaggccgcctggggagagtccatgaaaaagatggaacgtgccagatgctgtacctggtgctgggaaagagttgactaggccagcatccctttcctcaaagggggggctcctagactggggggagggctggacatctgaatacatcctgaggagacagtgtgggacagcatggtggcagtggaaccagccgtggttctgctcttggtcggctggaaaggagtagatgtaagggatggtttagaagaagggaagtggaagaaaagttttctgagctgacaagaggaaggaaaggccgcctagaaggacactaaaaaggcaagagaagccctaagcagagtgagcaccagactccacaggttaagggctcagtcacacaggaccatccgcatgtcagaccccaggtgcaaggccaagcatcacctatgcatctgaccaactggctgtaaattggaggtccccacaactccctcctcagg

SEQ ID NO: 382070 - DNA, 3287 bp, Homo sapiens
  misc_feature (448)..(448): n is a, c, g, or t
taacaatgtacaatatgtatacattttattagtgatgacttaaattacatggggccaggcatggtggctcacacttgtaatcccaacacattgggaggccaacctgggcagcatagtgagaccttgtctttattaaaaattaaaaaaaaaaatagccaggtgtggtagtatgcacctgtagtctcagctactcaagaggctgaggtgggcggatcactggagcccaggaggttgaggctacagtgagctgtgatcgtgacaccgcactccatcctgagtaacagaggatgacactgcactccagcgtaagcaacagagggcaatcctgtcgctaagtaaataaagtataggggggatgcgtgttggttataagcaaatattacaccattatatgtaagggattgagcatccacagattctggtatggtgtgggggcggtatcctaganccaatcccccgcaagatagcaaggatgactgaactatgcaagaatcaaagcagtgttactcagcatacaattcctgtgttcaaaaaagttacctcatcaggtacatgagacttataatgaataaaaggaatcttctaaaacagatatgttgtcaccgaaggtcattacaagaagatgaagaaggattctcaaggtaaatattagtctggtgattcttatgatcttctcgagatggagccctcttgttgccaggctggagtgcaatgacacgatctcggctcacggcaacctccacctgggaggtcgaggatgcagtgagctgtggtcgtaccactgcactctagcctgggcaacacagctaggccctgtcttaaaaacagccaccaccaaaaactatcttgggatttgaataggattacgttaaatttgtagattaatttgagaatttacatctgtacgacattctaggaacgtgctatctcatgtcatgtattcatttcttgttaatgtctttcagaagagctttagtgtttccatatatagatcttatacatcttttgttagataaaagatctttgtatttttgttcctaaattcttcatacatttgtattgccattgtaaatgggatctttcttccattttctaattagttattggtggtacatgggaaaagtatttgaggtttgtgtgctgatttcttgattttgtagatagccactgtattgaattctcattacttccagtaaaatcttagttgattctcttaggcttctttggctaacatttatcatttaatatgcaaataatgatagttttgtctcttcctttccaatacttctactctttccttcctttcccttttcctttttcctttcctttcctttccttttttttcccttctcagggccttgttgtcacccaggctggagagcaatggtgtgacctagctcactgtaacatcaaactcctgggctcaagggatcctcccgcctcagcttcctgagtggctgggactacaggcaggagaactgcttgagcccaggaggcgcaggttgcagggagccaagatagcaccattgcactccagcctggggaatgagccaaactgtctcaaataaaaaaaaaacaacaaaaaagaattttaactacggagaccttagatagtagtttgtccttttatgacaggaaaactgagaaggagaaagggagagtgtcttacttaccccatggtcacacaatgcactctgccttttcctattttattcaaattcaaaaataacatgttgtgctttaagctgatttcgtagctcactcactcatcagcgacagccagccatatgaagactgtgagatagagaacttggctagctgcactcacgcatttgcttgaggtgatccaacttatagaataaagtatctagaaaacgaagaaccacttcatctcccatcccccatcaaatgatgcctgtgagactaagtccgaaggggactgatataaaatgcttctgcccagcatggttgtgcagtttgttcactgcacaagggcacttggccaagggagtgagtgggactgaaaatcctgcccctgctccatgctgagccacatacaaagtccccccagtatattgtggggcccttctgggcagacatggagagcttctgaaagtcccacatgcatggaattattttcaagaccccgggtatgtggtctgtggtggtggttctccctgtgattatggactgagatactcatttagtcctaataagaccagagaagtacattgtgagatacgtgggaaacggctgcatcactcactgtcttgtgcatgtgtctccccaggggcattttcagatttctgccacggaggggatgctcttcgcgaagggagagtcaggtacattggaggattcattgctgtggccagggaaagcagaggacatgcaaaattaatatttccctttctatcttctaggatggactttcctcatttggacagccgctctggtttaaagatatgtacaaacctctcagtgccacaagaataaataatcatgcatggaagctgcacaagaagtcatctaatgaggacaagatcctcaacagggaccctggggacagcgaagccccaacggaggaggaggagagtgaagccctgccataggaggagaacacagcccacctcaggcctcctgcaaaaatacatagaataaacaacaacagttactaaataaatgaaaattgtgattccgatgaagcctgccagagaaataaagcattttttaaaagaggaaataaggtgatatctgattagggcaaacatgatgcagacaagaaatgcaccggttcagaggagggaaggtcaggccgcctggggagagtccatgaaaaagatggaacgtgccagatgctgtacctggtgctgggaaagagttgactaggccagcatccctttcctcaaagggggggctcctagactggggggagggctggacatctgaatacatcctgaggagacagtgtgggacagcatggtggcagtggaaccagccgtggttctgctcttggtcggctggaaaggagtagatgtaagggatggtttagaagaagggaagtggaagaaaagttttctgagctgacaagaggaaggaaaggccgcctagaaggacactaaaaaggcaagagaagccctaagcagagtgagcaccagactccacaggttaagggctcagtcacacaggaccatccgcatgtcagaccccaggtgcaaggccaagcatcacctatgcatctgaccaactggctgtaaattggaggtccccacaactccctcctcagg

SEQ ID NO: 382071 - DNA, 3372 bp, Homo sapiens
  misc_feature (44)..(44): n is a, c, g, or t
tggcgttctagaggatacccgttaggtcggacccacctattaantcctcttccaatatgctagcacggcctgtggggaaaagtaatacatcatgtaatcgaacaaaagacagaggcaagctccaggaatgggcactgtaaacaggacttgtcccagagtagccatcttttacaaaaatttttggccacatttttaagttcactggtgagggggaacgtctcatactctagccctcctgagcctagaccctctgtgagatgtgtcaccatttcttggacaccatgtgagacattccccctcagattagagatgctcagcttgcatcaacttacctaaagcctacatctggctactctgggacaagtcctgtttacagtgcccattcctggagcttgcctctgtcttttgttcgattacatgatgtattacttttcccaacaggccagtgctagcatattggaagagtgatttaataaagctggcaaccttgacgctatgccaccagtccaaccttacttgcctcatttaccatttccattattgtggcagccctccattccagccacagcagcccctcaccaaaccccagtcacaccacccacatttctgcttttgtctgtgtgtttgtccatctaaaatgcccttatttcactctgcctgtgggagtcctatgcatctctcaaaagccaactcaagttcatctttcttcttgacaccttccctgaatattccagccctgctgagcctagtccctttgtgagatttgtcaccatttcttggacaccatatgagagacttcagaggctgaagtgggaggatcgcttgagcctgggaggtcgaggatgcagtgagctgtggtcgtaccactgcactctagcctgggcaacacagctaggccctgtcttaaaaacagccaccaccaaaaactatcttgggatttgaataggattacgttaaatttgtagattaatttgagaatttacatctgtacgacattctaggaacgtgctatctcatgtcatgtattcatttcttgttaatgtctttcagaagagctttagtgtttccatatatagatcttatacatcttttgttagataaaagatctttgtatttttgttcctaaattcttcatacatttgtattgccattgtaaatgggatctttcttccattttctaattagttattggtggtacatgggaaaagtatttgaggtttgtgtgctgatttcttgattttgtagatagccactgtattgaattctcattacttccagtaaaatcttagttgattctcttaggcttctttggctaacatttatcatttaatatgcaaataatgatagttttgtctcttcctttccaatacttctactctttccttcctttcccttttcctttttcctttcctttcctttccttttttttcccttctcagggccttgttgtcacccaggctggagagcaatggtgtgacctagctcactgtaacatcaaactcctgggctcaagggatcctcccgcctcagcttcctgagtggctgggactacaggcaggagaactgcttgagcccaggaggcgcaggttgcagggagccaagatagcaccattgcactccagcctggggaatgagccaaactgtctcaaataaaaaaaaaacaacaaaaaagaattttaactacggagaccttagatagtagtttgtccttttatgacaggaaaactgagaaggagaaagggagagtgtcttacttaccccatggtcacacaatgcactctgccttttcctattttattcaaattcaaaaataacatgttgtgctttaagctgatttcgtagctcactcactcatcagcgacagccagccatatgaagactgtgagatagagaacttggctagctgcactcacgcatttgcttgaggtgatccaacttatagaataaagtatctagaaaacgaagaaccacttcatctcccatcccccatcaaatgatgcctgtgagactaagtccgaaggggactgatataaaatgcttctgcccagcatggttgtgcagtttgttcactgcacaagggcacttggccaagggagtgagtgggactgaaaatcctgcccctgctccatgctgagccacatacaaagtccccccagtatattgtggggcccttctgggcagacatggagagcttctgaaagtcccacatgcatggaattattttcaagaccccgggtatgtggtctgtggtggtggttctccctgtgattatggactgagatactcatttagtcctaataagaccagagaagtacattgtgagatacgtgggaaacggctgcatcactcactgtcttgtgcatgtgtctccccaggggcattttcagatttctgccacggaggggatgctcttcgcgaagggagagtcaggtacattggaggattcattgctgtggccagggaaagcagaggacatgcaaaattaatatttccctttctatcttctaggatggactttcctcatttggacagccgctctggtttaaagatatgtacaaacctctcagtgccacaagaataaataatcatgcatggaagctgcacaagaagtcatctaatgaggacaagatcctcaacagggaccctggggacagcgaagccccaacggaggaggaggagagtgaagccctgccataggaggagaacacagcccacctcaggcctcctgcaaaaatacatagaataaacaacaacagttactaaataaatgaaaattgtgattccgatgaagcctgccagagaaataaagcattttttaaaagaggaaataaggtgatatctgattagggcaaacatgatgcagacaagaaatgcaccggttcagaggagggaaggtcaggccgcctggggagagtccatgaaaaagatggaacgtgccagatgctgtacctggtgctgggaaagagttgactaggccagcatccctttcctcaaagggggggctcctagactggggggagggctggacatctgaatacatcctgaggagacagtgtgggacagcatggtggcagtggaaccagccgtggttctgctcttggtcggctggaaaggagtagatgtaagggatggtttagaagaagggaagtggaagaaaagttttctgagctgacaagaggaaggaaaggccgcctagaaggacactaaaaaggcaagagaagccctaagcagagtgagcaccagactccacaggttaagggctcagtcacacaggaccatccgcatgtcagaccccaggtgcaaggccaagcatcacctatgcatctgaccaactggctgtaaattggaggtccccacaactccctcctcagg

SEQ ID NO: 382072 - DNA, 2265 bp, Homo sapiens
agacggagtttccctcttgttgccaggctggagtgcagtgacagaggatgacactgcactccagcgtaagcaacagagggcaatcccgtcgctaagtaaataaagtataggggggatgcgtgttggttataagcaaatattacaccattatatgtaagggattgagcatccacagattctggtatggtgtgggggcggtatcctagaaccaatcccccgcaagatagcaaggatgactgaactatggaagaatcaaagcagtgttacacagcatacaattcctgtcttcaaaaaagttacctcatcaggtagatgagacttataatgaataaaaggaatcaatacagatttggagacggtggttgttgtcatagataatcttaattgcgttttcttctaaaacaatatgttgtcaccgaaggtcattacaagaagatgaagaaggattctcaaggtaaatattagtctggtgattttttttttcttctcttttgagacggagtttccctcttgttgccaggctggagtccaaactgtctcaaataaaaaaaaaacaacaaaaaagaattttaactacggagaccttagatagtagtttgtccttttatgacaggaaaactgagaaggagaaagggagagtgtcttacttaccccatggtcacacaatgcactctgccttttcctattttattcaaattcaaaaataacatgttgtgctttaagctgatttcgtagctcactcactcatcagcgacagccagccatatgaagactgtgagatagagaacttggctagctgcactcacgcatttgcttgaggtgatccaacttatagaataaagtatctagaaaacgaagaaccacttcatctcccatcccccatcaaatgatgcctgtgagactaagtccgaaggggactgatataaaatgcttctgcccagcatggttgtgcagtttgttcactgcacaagggcacttggccaagggagtgagtgggactgaaaatcctgcccctgctccatgctgagccacatacaaagtccccccagtatattgtggggcccttctgggcagacatggagagcttctgaaagtcccacatgcatggaattattttcaagaccccgggtatgtggtctgtggtggtggttctccctgtgattatggactgagatactcatttagtcctaataagaccagagaagtacattgtgagatacgtgggaaacggctgcatcactcactgtcttgtgcatgtgtctccccaggggcattttcagatttctgccacggaggggatgctcttcgcgaagggagagtcaggtacattggaggattcattgctgtggccagggaaagcagaggacatgcaaaattaatatttccctttctatcttctaggatggactttcctcatttggacagccgctctggtttaaagatatgtacaaacctctcagtgccacaagaataaataatcatgcatggaagctgcacaagaagtcatctaatgaggacaagatcctcaacagggaccctggggacagcgaagccccaacggaggaggaggagagtgaagccctgccataggaggagaacacagcccacctcaggcctcctgcaaaaatacatagaataaacaacaacagttactaaataaatgaaaattgtgattccgatgaagcctgccagagaaataaagcattttttaaaagaggaaataaggtgatatctgattagggcaaacatgatgcagacaagaaatgcaccggttcagaggagggaaggtcaggccgcctggggagagtccatgaaaaagatggaacgtgccagatgctgtacctggtgctgggaaagagttgactaggccagcatccctttcctcaaagggggggctcctagactggggggagggctggacatctgaatacatcctgaggagacagtgtgggacagcatggtggcagtggaaccagccgtggttctgctcttggtcggctggaaaggagtagatgtaagggatggtttagaagaagggaagtggaagaaaagttttctgagctgacaagaggaaggaaaggccgcctagaaggacactaaaaaggcaagagaagccctaagcagagtgagcaccagactccacaggttaagggctcagtcacacaggaccatccgcatgtcagaccccaggtgcaaggccaagcatcacctatgcatctgaccaactggctgtaaattggaggtccccacaactccctcctcagg

SEQ ID NO: 382073 - DNA, 1721 bp, Homo sapiens
  misc_feature (17)..(17): n is a, c, g, or t
  misc_feature (22)..(22): n is a, c, g, or t
  misc_feature (30)..(30): n is a, c, g, or t
  misc_feature (35)..(35): n is a, c, g, or t
ggtcatagctgattctngaggntacaaccncgagncgaccttagatagtagtttgtccttttatgacaggaaaactgagaaggagaaagggagagtgtcttacttaccccatggtcacacaatgcactctgccttttcctattttattcaaattcaaaaataacatgttgtgctttaagctgatttcgtagctcactcactcatcagcgacagccagccatatgaagactgtgagatagagaacttggctagctgcactcacgcatttgcttgaggtgatccaacttatagaataaagtatctagaaaacgaagaaccacttcatctcccatcccccatcaaatgatgcctgtgagactaagtccgaaggggactgatataaaatgcttctgcccagcatggttgtgcagtttgttcactgcacaagggcacttggccaagggagtgagtgggactgaaaatcctgcccctgctccatgctgagccacatacaaagtccccccagtatattgtggggcccttctgggcagacatggagagcttctgaaagtcccacatgcatggaattattttcaagaccccgggtatgtggtctgtggtggtggttctccctgtgattatggactgagatactcatttagtcctaataagaccagagaagtacattgtgagatacgtgggaaacggctgcatcactcactgtcttgtgcatgtgtctccccaggggcattttcagatttctgccacggaggggatgctcttcgcgaagggagagtcaggtacattggaggattcattgctgtggccagggaaagcagaggacatgcaaaattaatatttccctttctatcttctaggatggactttcctcatttggacagccgctctggtttaaagatatgtacaaacctctcagtgccacaagaataaataatcatgcatggaagctgcacaagaagtcatctaatgaggacaagatcctcaacagggaccctggggacagcgaagccccaacggaggaggaggagagtgaagccctgccataggaggagaacacagcccacctcaggcctcctgcaaaaatacatagaataaacaacaacagttactaaataaatgaaaattgtgattccgatgaagcctgccagagaaataaagcattttttaaaagaggaaataaggtgatatctgattagggcaaacatgatgcagacaagaaatgcaccggttcagaggagggaaggtcaggccgcctggggagagtccatgaaaaagatggaacgtgccagatgctgtacctggtgctgggaaagagttgactaggccagcatccctttcctcaaagggggggctcctagactggggggagggctggacatctgaatacatcctgaggagacagtgtgggacagcatggtggcagtggaaccagccgtggttctgctcttggtcggctggaaaggagtagatgtaagggatggtttagaagaagggaagtggaagaaaagttttctgagctgacaagaggaaggaaaggccgcctagaaggacactaaaaaggcaagagaagccctaagcagagtgagcaccagactccacaggttaagggctcagtcacacaggaccatccgcatgtcagaccccaggtgcaaggccaagcatcacctatgcatctgaccaactggctgtaaattggaggtccccacaactccctcctcagg

SEQ ID NO: 382074 - DNA, 1514 bp, Homo sapiens
tccttgtagttcttccccgcgttctatcctttatcttctagagaccttggtagttcccataggaatagtgctttacggagtctaatggtgatttcttaggtaaagacaggaaacatttttttcttttttacctacaagttccatatcaaaaaatgaatgtaaacttttcatgcagttttacacattgaaaatgcaggttattttaattccattccatttttcagaattctcaatcacaatcctctgacaactgttgaagatccgtatctctttaaattgccagcattaaaatatctgtaagtactatagtactctcatgagtcaagagatgatttatgctttttaaatttttcatcaaagcttaagtattttgcatttaggctaaaatgtcataatttaaattttaactgggttattgaaaaaaagttattggcgaagaaaaaaattaagaggatgtataatggtcaagacagccagcaggggaagagaacagcattgaagaacccatatagatttggaacatgtagacacatggaggaatattatttaaccaagaaagcaaaggggaaaaggtgttcattattctaaaaataaagaaaagagtaaataagatggtgagtgcaatatgaaaatgagaagataatggtaaaaaaaaaaagtgtcagttctgctcttgagtatcattaatttgatgatgcaaatcaacttttaatttctttaataagagctccctggaattctacagcaaataaagtcttgagctggcttgtttaatagagaagccaaaattgaattgttaagtacagaattttttattggggctcatatcatgaatgtttcggctttcttcttcagagacatgggaacaacgctagtcccacttacaacacttaagaacattctcatgatgactgttgaactggaaaaactgatcttacctagccatatggcctgctgcctctgccaatttaaaaacagcattgaggctgtctgcaagacagtcaagctgcattgcaacagtgcatgtctgacaaacaccacacattgtcgtgagtccaaattgcgcggtgataaattgttacattaagtatttgtttttaaactttttatttttaatgatgataaaattttaagctaatgacataattgctttatttttatttactcattcagagttaaactccctcaatttccgaactactcccttgctgaaagtcaggttctcagttactattacaaaatttaataatagaactgttccatatgcagaaaggaccaagacaaaggaatgggaaggctagggaataacattaacatccacacactgtatactgtgctctctgcttgatgctttgcccacagtgataatttcttcatatagtgcaatgtagtttgtaagctggttttaaatccatgagatctcaagtactctctgccttatatgaagaaattatcactgtgtgctatgcatcaagcagagatcacagtatactagtgtgtggatgttaatgtta

SEQ ID NO: 382075 - DNA, 1354 bp, Homo sapiens
tccttgtagttcttccccgcgttctatcctttatcttctagagaccttggtagttcccataggaatagtgctttacggagtctaatggtgatttcttaggtaaagacaggaaacatttttttcttttttacctacaagttccatatcaaaaaatgaatgtaaacttttcatgcagttttacacattgaaaatgcaggttattttaattccattccatttttcagaattctcaatcacaatcctctgacaactgttgaagatccgtatctctttaaattgccagcattaaaatatctgtaagtactatagtactctcatgagtcaagagatgatttatgctttttaaatttttcatcaaagcttaagtattttgcatttaggctaaaatgtcataatttaaattttaactgggttattgaaaaaaagttattggcgaagaaaaaaattaagaggatgtataatggtcaagacagccagcaggggaagagaacagcattgaagaacccatatagatttggaacatgtagacacatggaggaatattatttaaccaagaaagcaaaggggaaaaggtgttcattattctaaaaataaagaaaagagtaaataagatggtgagtgcaatatgaaaatgagaagataatggtaaaaaaaaaaagtgtcagttctgctcttgagtatcattaatttgatgatgcaaatcaacttttaatttctttaataagagctccctggaattctacagcaaataaagtcttgagctggcttgtttaatagagaagccaaaattgaattgttaagtacagaattttttattggggctcatatcatgaatgtttcggctttcttcttcagagacatgggaacaacgctagtcccacttacaacacttaagaacattctcatgatgactgttgaactggaaaaactgtaagttatttttttctgagatttatttttacttagttggttctttaggtttgttttattattttcttaagtcaggttcattgaggtataattttcatatagtaacattcacgctttttaagtgtacagtttgatgagtctgacaaatgtatagttacataaccaccaccacattcccaatataaagcatttctgatgcctcaaaaaggcccctactgtccctttgtaggcaatcccatcctcccaccatcagcccctgttagctactaatctgatttctgttcctatacttttgccttttccagaatgtcttataaatgaaatcatatagcacatagcctcttgtgtttggctcctttcacaaagcctaatttttttttttgtttttgaaatggaatctcactctgtcgcccaggctgcagtg

SEQ ID NO: 382076 - DNA, 944 bp, Homo sapiens
agacggagtttccctcttgttgccaggctggagtgcagtgacagaggatgacactgcactccagcgtaagcaacagagggcaatcccgtcgctaagtaaataaagtataggggggatgcgtgttggttataagcaaatattacaccattatatgtaagggattgagcatccacagattctggtatggtgtgggggcggtatcctagaaccaatcccccgcaagatagcaaggatgactgaactatggaagaatcaaagcagtgttacacagcatacaattcctgtcttcaaaaaagttacctcatcaggtagatgagacttataatgaataaaaggaatcaatacagatttggagacggtggttgttgtcatagataatcttaattgcgttttcttctaaaacaatatgttgtcaccgaaggtcattacaagaagatgaagaaggattctcaaggtaaatattagtctggtgattttttttttcttctcttttgagacggagtttccctcttgttgccaggctggagtgcaatgacacgatctcggctcacggcaacctccacttcccaggttcaagcgattctcctgcctcagcctcccgagtagctgggattacaggcatgcaccactagtctcgcgacgttttaattagaattttagaattagaggagggcttagaactctgccctcatttttcagtgaggaaactgcccaagacaggacaaatacttaccctaatgcttagcctggctccagtgaaattagctccccagccaaagctgagctggatggaactaacaaggacacacctgctgtccccagccctttcgggaggtggggagggataggaaggagaaaggttttggtgcctattgctgctgatggtgggcatcaggccaggccaggggccttcttggaggctctgggaaaggggaagggaaggc

SEQ ID NO: 382077 - DNA, 700 bp, Homo sapiens
tccttgtagttcttccccgcgttctatcctttatcttctagagaccttggtagttcccataggaatagtgctttacggagtctaatggtgatttcttaggtaaagacaggaaacatttttttcttttttacctacaagttccatatcaaaaaatgaatgtaaacttttcatgcagttttacacattgaaaatgcaggttattttaattccattccatttttcagaattctcaatcacaatcctctgacaactgttgaagatccgtatctctttaaattgccagcattaaaatatctgtaagtactatagtactctcatgagtcaagagatgatttatgctttttaaatttttcatcaaagcttaagtattttgcatttaggctaaaatgtcataatttaaattttaactgggttattgaaaaaaagttattggcgaagaaaaaaattaagaggatgtataatggtcaagacagccagcaggggaagagaacagcattgaagaacccatatagatttggaacatgtagacacatggaggaatattatttaaccaagaaagcaaaggggaaaaggtgttcattattctaaaaataaagaaaagagtaaataagatggtgagtgcaatatgaaaatgagaagataatggtatttaatttctttaataagagctccctggttctacagcactgccttgcgttgc

SEQ ID NO: 382078 - DNA, 336 bp, Homo sapiens
ctattcaaggatataaactgtgtttcttcacagaaatttccaaggaaactatatttcttacattgatggaaatgtatggaaagcatacagttggaccgagaaactgtgagtatattctctccaaatatgacaaaaagctaactgcattgtaagatccttcttggtccagaattttgaggtcggtacctctgaggaaagatatttctcctccacgccccaaatcaaccactgttgattgcaattgtatggttattttaaaattaaatttggtaggctctctttaaaataagaggcaatttaaatttattttttatcatacaaatagtacatggttat

SEQ ID NO: 382079 - DNA, 8360 bp, Homo sapiens
tccttgtagttcttccccgcgttctatcctttatcttctagagaccttggtagttcccataggaatagtgctttacggagtctaatggtgatttcttaggtaaagacaggaaacatttttttcttttttacctacaagttccatatcaaaaaatgaatgtaaacttttcatgcagttttacacattgaaaatgcaggttattttaattccattccatttttcagaattctcaatcacaatcctctgacaactgttgaagatccgtatctctttaaattgccagcattaaaatatctgtaagtactatagtactctcatgagtcaagagatgatttatgctttttaaatttttcatcaaagcttaagtattttgcatttaggctaaaatgtcataatttaaattttaactgggttattgaaaaaaagttattggcgaagaaaaaaattaagaggatgtataatggtcaagacagccagcaggggaagagaacagcattgaagaacccatatagatttggaacatgtagacacatggaggaatattatttaaccaagaaagcaaaggggaaaaggtgttcattattctaaaaataaagaaaagagtaaataagatggtgagtgcaatatgaaaatgagaagataatggtaaaaaaaaaaagtgtcagttctgctcttgagtatcattaatttgatgatgcaaatcaacttttaatttctttaataagagctccctggaattctacagcaaataaagtcttgagctggcttgtttaatagagaagccaaaattgaattgttaagtacagaattttttattggggctcatatcatgaatgtttcggctttcttcttcagagacatgggaacaacgctagtcccacttacaacacttaagaacattctcatgatgactgttgaactggaaaaactgatcttacctagccatatggcctgctgcctctgccaatttaaaaacagcattgaggctgtctgcaagacagtcaagctgcattgcaacagtgcatgtctgacaaacaccacacattgtcgtgagtccaaattgcgcggtgataaattgttacattaagtatttgtttttaaactttttatttttaatgatgataaaattttaagctaatgacataattgctttatttttatttactcattcagagttaaactccctcaatttccgaactactcccttgctgaaagtcaggttctcagttactattacaaaatttaataatagaactgttccatatgcagaaaggaccaagacaaaggaatgggaaggctagggaataacattaacatccacacactgtatactgtgctctctgcttgatgctttgcccacagtgataatttcttcatatagtgcaatgtagtttgtaagctggttttaaatccatgagatctcaagtactctctgccttataggacagatgtagatacggttttggtctttctgtttttacagttttataagagtacaagtgatgctgttttatttgaagcctgagagcttctggttccataaccagaaattgctacctggctcttctaatggaatggagggcttttccattcttagaccatccaactctgaacttgctccgaatctcaaacctttctgttcacagaacaaacgctcaagggctttcaagagtgtttctgtagattaggcttattagcatcaacttcatgacttctaaaatgtgactgctttcatgtccagatagcttgaatacaggtatctaccagtgatatggggtggagaattaataatgcttggttacataaagtcagtgttgcttatttttcaaaactttttttttttttttttttttttaccaattatgttattcccttctccccaagaagtgggcagaaaagctttgttaacctccttttacagatgaggaaaaacaagatcagaggtgctaagtgctgtagcctagtgccaggtcttctggccccaattctgggttctccccaagcccatgtttcttcccctttctcacaatctttacttcttcctctgaccctcaccaccacccaaagtacttttaattctagaaaagaaacccagctgcacactggcacacctgaccttcatgcagtcagaagctttggatgattccccatccaaaatattagagatgaaatgaaagcaaagtaggcatctgacaaaagttgctttttcccttctgcattttaggacctcaagtaatgtttatccagaaactgctatcataccagggattcattgtgtatttaacaacataggcatacaatctggcaaatttgaaaaactcttaacatacaccccaaatccctgcccaaatttaagaactagggtggacacagtgcgtttttccatgtcgcatcttctgtgatggggctacgatacgtgggagcagagaatggggagggtggagcgcatgccagatgaggatctatcagcaatgggacggggcctccactttagcatctccaccctgctcctctcagaggaccgcctttcattgcattcagctgtgatggtagcacgaacacaggtgcaccgaggacgaggagagcaggagccttgtgctctctctgcatctgaggcaggacagcacagggtacggagcagtctgcagagaggccagctcatcagggaagcacttgtcttccaccttgggctttgactgagcactgggcaattggcctctggggatcaacgaaataatcctaaacagagttactctatgtcacactatggaatgttccaagtaggtggccgtgttttcaaaagatgtattttctccttttgttgttgccatttcataggtttaggattgggtgtgtgtttctcctctctgaatggcactcgaatgtttgctgactcctactctgtgtgactggggtgtacagctatggactgatgcatcccatcccatcatctttcatgatcaaagcagtctcttcttttttgacagctgaagaagcatcggtagggaatccagaaggagcgttcatgaaggtgttacaagcccggaagaactacacaagcactgagctgattgttgagccagaggagccctcagacagcagtggcatcaacttgtcaggctttgggagtgagcagctagacaccaatgacgagagtgattttatcagtacactaagttacatcttgccttatttctcagcggtaaacctagatgtgaaatcactgttactaccgttcattaaactgccaaccacaggaaacagcctggcaaagattcaaactgtaggccaaaaccggcagagagtgaagagagtcctcatgggcccaaggagcatccagaaaaggcacttcaaagaggtaggaaggcagagcatcaggagggaacagggtgcccaggcatctgtggagaacgctgccgaagaaaaaaggctcgggagtccagccccaagggaggtggaacagccccacacacagcaggggcctgagaagttagcgggaaacgccgtctacaccaagccttccttcacccaagagcataaggcagcagtctctgtgctgaaacccttctccaagggcgcgccttctacctccagccctgcaaaagccctaccacaggtgagagacagatggaaagacttaacccacgctatttccattttagaaagtgcaaaggctagagttacaaatacgaagacgtctaaaccaatcgtacatgccagaaaaaaataccgctttcacaaaactcgctcccacgtgacccacagaacacccaaagtcaaaaagagtccaaaggtcagaaagaaaagttatctgagtagactgatgctcgcaaacaggcttccattctctgcagcgaagagcctcataaattccccttcacaaggggctttttcatccttaggagacctgagtcctcaagaaaacccttttctggaagtatctgctccttcagaacattttatagaaaagaataatacaaaacacacaactgcaagaaatgcctttgaagaaaatgattttatggaaaacactaacatgccagaaggaaccatctctgaaaacacaaactacaatcatcctcctgaggcagattccgctgggactgcattcaacttagggccaactgttaaacaaactgagacaaaatgggaatacaacaacgtgggcactgacctgtcccccgagcccaaaagcttcaattacccattgctctcgtccccaggtgatcagtttgaaattcagctaacccagcagctacagtcccttatccccaacaacaatgtgagaaggctcattgctcatgttatccggaccttgaagatggactgctctggggcccatgtgcaagtgacctgtgccaagctcatctccaggacaggccacctgatgaagcttctcagtgggcagcaggaagtaaaggcatccaagatagaatgggatacggaccaatggaagattgagaactacattaatgagagcacagaagcccagagtgaacagaaagagaagtcgcttgagctcaaaaaagaagttccaggatatggctatactgacaaactcatcttggcattaattgttactggaatactaacgattttgattatacttttctgcctcattgtggtaaggacaataattaattcaggttttcagaatgcagtcctgtctttgtgtggattcagagctcacaaactgaaaaccaaagccactttcccacctgctgctacttgacatacttcttcagtcatttaaggctgaggtgtatgctttgttcttttactgcagtgtatatttcaggatttttaaaggatcctcgctttcagatctctgtgaattgaaaccatgtgaatcccactagactattttaagaagtcgatataatagcaaaatttctcccacccaaaactatgtcaacaattggatgtactcatcaagtcacccttactctgccactaatttatttccttggtgctgaaatgatgagagaggtataatctccaccctcacggagttgtcatcaccctggagaggaaggagagagccaaaagacatacgtattgtcttgtagacttattagatttacacagtatcgtcctccagtgtgtaaggcattgtctaaataggtccagttaaagcactacagagtagccatcttttacaaaaatttttggccacatttttaagttcactggtgagggggaacgtctcatactctagccctcctgagcctagaccctctgtgagatgtgtcaccatttcttggacaccatgtgagacattccccctcagattagagatgctcagcttgcatcaacttacctaaagcctacatctggctactctgggacaagtcctgtttacagtgcccattcctggagcttgcctctgtcttttgttcgattacatgatgtattacttttcccaacaggccagtgctagcatattggaagagtgatttaataaagctggcaaccttgacgctatgccaccagtccaaccttacttgcctcatttaccatttccattattgtggcagccctccattccagccacagcagcccctcaccaaaccccagtcacaccacccacatttctgcttttgtctgtgtgtttgtccatctaaaatgcccttatttcactctgcctgtgggagtcctatgcatctctcaaaagccaactcaagttcatctttcttcttgacaccttccctgaatattccagccctgctgagcctagtccctttgtgagatttgtcaccatttcttggacaccatatgagagacttcagaggctgaagtgggaggatcgcttgagcctgggaggtcgaggatgcagtgagctgtggtcgtaccactgcactctagcctgggcaacacagctaggccctgtcttaaaaacagccaccaccaaaaactatcttgggatttgaataggattacgttaaatttgtagattaatttgagaatttacatctgtacgacattctaggaacgtgctatctcatgtcatgtattcatttcttgttaatgtctttcagaagagctttagtgtttccatatatagatcttatacatcttttgttagataaaagatctttgtatttttgttcctaaattcttcatacatttgtattgccattgtaaatgggatctttcttccattttctaattagttattggtggtacatgggaaaagtatttgaggtttgtgtgctgatttcttgattttgtagatagccactgtattgaattctcattacttccagtaaaatcttagttgattctcttaggcttctttggctaacatttatcatttaatatgcaaataatgatagttttgtctcttcctttccaatacttctactctttccttcctttcccttttcctttttcctttcctttcctttccttttttttcccttctcagggccttgttgtcacccaggctggagagcaatggtgtgacctagctcactgtaacatcaaactcctgggctcaagggatcctcccgcctcagcttcctgagtggctgggactacaggcaggagaactgcttgagcccaggaggcgcaggttgcagggagccaagatagcaccattgcactccagcctggggaatgagccaaactgtctcaaataaaaaaaaaacaacaaaaaagaattttaactacggagaccttagatagtagtttgtccttttatgacaggaaaactgagaaggagaaagggagagtgtcttacttaccccatggtcacacaatgcactctgccttttcctattttattcaaattcaaaaataacatgttgtgctttaagctgatttcgtagctcactcactcatcagcgacagccagccatatgaagactgtgagatagagaacttggctagctgcactcacgcatttgcttgaggtgatccaacttatagaataaagtatctagaaaacgaagaaccacttcatctcccatcccccatcaaatgatgcctgtgagactaagtccgaaggggactgatataaaatgcttctgcccagcatggttgtgcagtttgttcactgcacaagggcacttggccaagggagtgagtgggactgaaaatcctgcccctgctccatgctgagccacatacaaagtccccccagtatattgtggggcccttctgggcagacatggagagcttctgaaagtcccacatgcatggaattattttcaagaccccgggtatgtggtctgtggtggtggttctccctgtgattatggactgagatactcatttagtcctaataagaccagagaagtacattgtgagatacgtgggaaacggctgcatcactcactgtcttgtgcatgtgtctccccaggggcattttcagatttctgccacggaggggatgctcttcgcgaagggagagtcaggtacattggaggattcattgctgtggccagggaaagcagaggacatgcaaaattaatatttccctttctatcttctaggatggactttcctcatttggacagccgctctggtttaaagatatgtacaaacctctcagtgccacaagaataaataatcatgcatggaagctgcacaagaagtcatctaatgaggacaagatcctcaacagggaccctggggacagcgaagccccaacggaggaggaggagagtgaagccctgccataggaggagaacacagcccacctcaggcctcctgcaaaaatacatagaataaacaacaacagttactaaataaatgaaaattgtgattccgatgaagcctgccagagaaataaagcattttttaaaagaggaaataaggtgatatctgattagggcaaacatgatgcagacaagaaatgcaccggttcagaggagggaaggtcaggccgcctggggagagtccatgaaaaagatggaacgtgccagatgctgtacctggtgctgggaaagagttgactaggccagcatccctttcctcaaagggggggctcctagactggggggagggctggacatctgaatacatcctgaggagacagtgtgggacagcatggtggcagtggaaccagccgtggttctgctcttggtcggctggaaaggagtagatgtaagggatggtttagaagaagggaagtggaagaaaagttttctgagctgacaagaggaaggaaaggccgcctagaaggacactaaaaaggcaagagaagccctaagcagagtgagcaccagactccacaggttaagggctcagtcacacaggaccatccgcatgtcagaccccaggtgcaaggccaagcatcacctatgcatctgaccaactggctgtaaattggaggtccccacaactccctcctcagg

SEQ ID NO: 382080 - DNA, 8016 bp, Homo sapiens
aggcctccacaagcaccaacatatgtgagctctgtacctgcggagatgagatgttgtcatgtattgatctcaacccagagcagaggctccgccaagtgcctgtgccagagcccaacacccacaatggcaccttcaccatcttaaatttccaaggaaactatatttcttacattgatggaaatgtatggaaagcatacagttggaccgagaaactaattctcagagaaaataacttgactgaattacacaaggattcatttgaaggcctgctatccctccagtatttagatttatcctgcaataaaatacagtctattgaaagacatacatttgaaccactaccatttttgaagtttataaatcttagttgcaatgtaattacagaactcagctttggaacatttcaggcctggcacggaatgcagtttttacataagttaattctcaatcacaatcctctgacaactgttgaagatccgtatctctttaaattgccagcattaaaatatctagacatgggaacaacgctagtcccacttacaacacttaagaacattctcatgatgactgttgaactggaaaaactgatcttacctagccatatggcctgctgcctctgccaatttaaaaacagcattgaggctgtctgcaagacagtcaagctgcattgcaacagtgcatgtctgacaaacaccacacattgtcgtgagtccaaattgcgcggtgataaattgttacattaagtatttgtttttaaactttttatttttaatgatgataaaattttaagctaatgacataattgctttatttttatttactcattcagagttaaactccctcaatttccgaactactcccttgctgaaagtcaggttctcagttactattacaaaatttaataatagaactgttccatatgcagaaaggaccaagacaaaggaatgggaaggctagggaataacattaacatccacacactgtatactgtgctctctgcttgatgctttgcccacagtgataatttcttcatatagtgcaatgtagtttgtaagctggttttaaatccatgagatctcaagtactctctgccttataggacagatgtagatacggttttggtctttctgtttttacagttttataagagtacaagtgatgctgttttatttgaagcctgagagcttctggttccataaccagaaattgctacctggctcttctaatggaatggagggcttttccattcttagaccatccaactctgaacttgctccgaatctcaaacctttctgttcacagaacaaacgctcaagggctttcaagagtgtttctgtagattaggcttattagcatcaacttcatgacttctaaaatgtgactgctttcatgtccagatagcttgaatacaggtatctaccagtgatatggggtggagaattaataatgcttggttacataaagtcagtgttgcttatttttcaaaactttttttttttttttttttttttaccaattatgttattcccttctccccaagaagtgggcagaaaagctttgttaacctccttttacagatgaggaaaaacaagatcagaggtgctaagtgctgtagcctagtgccaggtcttctggccccaattctgggttctccccaagcccatgtttcttcccctttctcacaatctttacttcttcctctgaccctcaccaccacccaaagtacttttaattctagaaaagaaacccagctgcacactggcacacctgaccttcatgcagtcagaagctttggatgattccccatccaaaatattagagatgaaatgaaagcaaagtaggcatctgacaaaagttgctttttcccttctgcattttaggacctcaagtaatgtttatccagaaactgctatcataccagggattcattgtgtatttaacaacataggcatacaatctggcaaatttgaaaaactcttaacatacaccccaaatccctgcccaaatttaagaactagggtggacacagtgcgtttttccatgtcgcatcttctgtgatggggctacgatacgtgggagcagagaatggggagggtggagcgcatgccagatgaggatctatcagcaatgggacggggcctccactttagcatctccaccctgctcctctcagaggaccgcctttcattgcattcagctgtgatggtagcacgaacacaggtgcaccgaggacgaggagagcaggagccttgtgctctctctgcatctgaggcaggacagcacagggtacggagcagtctgcagagaggccagctcatcagggaagcacttgtcttccaccttgggctttgactgagcactgggcaattggcctctggggatcaacgaaataatcctaaacagagttactctatgtcacactatggaatgttccaagtaggtggccgtgttttcaaaagatgtattttctccttttgttgttgccatttcataggtttaggattgggtgtgtgtttctcctctctgaatggcactcgaatgtttgctgactcctactctgtgtgactggggtgtacagctatggactgatgcatcccatcccatcatctttcatgatcaaagcagtctcttcttttttgacagctgaagaagcatcggtagggaatccagaaggagcgttcatgaaggtgttacaagcccggaagaactacacaagcactgagctgattgttgagccagaggagccctcagacagcagtggcatcaacttgtcaggctttgggagtgagcagctagacaccaatgacgagagtgattttatcagtacactaagttacatcttgccttatttctcagcggtaaacctagatgtgaaatcactgttactaccgttcattaaactgccaaccacaggaaacagcctggcaaagattcaaactgtaggccaaaaccggcagagagtgaagagagtcctcatgggcccaaggagcatccagaaaaggcacttcaaagaggtaggaaggcagagcatcaggagggaacagggtgcccaggcatctgtggagaacgctgccgaagaaaaaaggctcgggagtccagccccaagggaggtggaacagccccacacacagcaggggcctgagaagttagcgggaaacgccgtctacaccaagccttccttcacccaagagcataaggcagcagtctctgtgctgaaacccttctccaagggcgcgccttctacctccagccctgcaaaagccctaccacaggtgagagacagatggaaagacttaacccacgctatttccattttagaaagtgcaaaggctagagttacaaatacgaagacgtctaaaccaatcgtacatgccagaaaaaaataccgctttcacaaaactcgctcccacgtgacccacagaacacccaaagtcaaaaagagtccaaaggtcagaaagaaaagttatctgagtagactgatgctcgcaaacaggcttccattctctgcagcgaagagcctcataaattccccttcacaaggggctttttcatccttaggagacctgagtcctcaagaaaacccttttctggaagtatctgctccttcagaacattttatagaaaagaataatacaaaacacacaactgcaagaaatgcctttgaagaaaatgattttatggaaaacactaacatgccagaaggaaccatctctgaaaacacaaactacaatcatcctcctgaggcagattccgctgggactgcattcaacttagggccaactgttaaacaaactgagacaaaatgggaatacaacaacgtgggcactgacctgtcccccgagcccaaaagcttcaattacccattgctctcgtccccaggtgatcagtttgaaattcagctaacccagcagctacagtcccttatccccaacaacaatgtgagaaggctcattgctcatgttatccggaccttgaagatggactgctctggggcccatgtgcaagtgacctgtgccaagctcatctccaggacaggccacctgatgaagcttctcagtgggcagcaggaagtaaaggcatccaagatagaatgggatacggaccaatggaagattgagaactacattaatgagagcacagaagcccagagtgaacagaaagagaagtcgcttgagctcaaaaaagaagttccaggatatggctatactgacaaactcatcttggcattaattgttactggaatactaacgattttgattatacttttctgcctcattgtggtaaggacaataattaattcaggttttcagaatgcagtcctgtctttgtgtggattcagagctcacaaactgaaaaccaaagccactttcccacctgctgctacttgacatacttcttcagtcatttaaggctgaggtgtatgctttgttcttttactgcagtgtatatttcaggatttttaaaggatcctcgctttcagatctctgtgaattgaaaccatgtgaatcccactagactattttaagaagtcgatataatagcaaaatttctcccacccaaaactatgtcaacaattggatgtactcatcaagtcacccttactctgccactaatttatttccttggtgctgaaatgatgagagaggtataatctccaccctcacggagttgtcatcaccctggagaggaaggagagagccaaaagacatacgtattgtcttgtagacttattagatttacacagtatcgtcctccagtgtgtaaggcattgtctaaataggtccagttaaagcactacagagtagccatcttttacaaaaatttttggccacatttttaagttcactggtgagggggaacgtctcatactctagccctcctgagcctagaccctctgtgagatgtgtcaccatttcttggacaccatgtgagacattccccctcagattagagatgctcagcttgcatcaacttacctaaagcctacatctggctactctgggacaagtcctgtttacagtgcccattcctggagcttgcctctgtcttttgttcgattacatgatgtattacttttcccaacaggccagtgctagcatattggaagagtgatttaataaagctggcaaccttgacgctatgccaccagtccaaccttacttgcctcatttaccatttccattattgtggcagccctccattccagccacagcagcccctcaccaaaccccagtcacaccacccacatttctgcttttgtctgtgtgtttgtccatctaaaatgcccttatttcactctgcctgtgggagtcctatgcatctctcaaaagccaactcaagttcatctttcttcttgacaccttccctgaatattccagccctgctgagcctagtccctttgtgagatttgtcaccatttcttggacaccatatgagagacttcagaggctgaagtgggaggatcgcttgagcctgggaggtcgaggatgcagtgagctgtggtcgtaccactgcactctagcctgggcaacacagctaggccctgtcttaaaaacagccaccaccaaaaactatcttgggatttgaataggattacgttaaatttgtagattaatttgagaatttacatctgtacgacattctaggaacgtgctatctcatgtcatgtattcatttcttgttaatgtctttcagaagagctttagtgtttccatatatagatcttatacatcttttgttagataaaagatctttgtatttttgttcctaaattcttcatacatttgtattgccattgtaaatgggatctttcttccattttctaattagttattggtggtacatgggaaaagtatttgaggtttgtgtgctgatttcttgattttgtagatagccactgtattgaattctcattacttccagtaaaatcttagttgattctcttaggcttctttggctaacatttatcatttaatatgcaaataatgatagttttgtctcttcctttccaatacttctactctttccttcctttcccttttcctttttcctttcctttcctttccttttttttcccttctcagggccttgttgtcacccaggctggagagcaatggtgtgacctagctcactgtaacatcaaactcctgggctcaagggatcctcccgcctcagcttcctgagtggctgggactacaggcaggagaactgcttgagcccaggaggcgcaggttgcagggagccaagatagcaccattgcactccagcctggggaatgagccaaactgtctcaaataaaaaaaaaacaacaaaaaagaattttaactacggagaccttagatagtagtttgtccttttatgacaggaaaactgagaaggagaaagggagagtgtcttacttaccccatggtcacacaatgcactctgccttttcctattttattcaaattcaaaaataacatgttgtgctttaagctgatttcgtagctcactcactcatcagcgacagccagccatatgaagactgtgagatagagaacttggctagctgcactcacgcatttgcttgaggtgatccaacttatagaataaagtatctagaaaacgaagaaccacttcatctcccatcccccatcaaatgatgcctgtgagactaagtccgaaggggactgatataaaatgcttctgcccagcatggttgtgcagtttgttcactgcacaagggcacttggccaagggagtgagtgggactgaaaatcctgcccctgctccatgctgagccacatacaaagtccccccagtatattgtggggcccttctgggcagacatggagagcttctgaaagtcccacatgcatggaattattttcaagaccccgggtatgtggtctgtggtggtggttctccctgtgattatggactgagatactcatttagtcctaataagaccagagaagtacattgtgagatacgtgggaaacggctgcatcactcactgtcttgtgcatgtgtctccccaggggcattttcagatttctgccacggaggggatgctcttcgcgaagggagagtcaggtacattggaggattcattgctgtggccagggaaagcagaggacatgcaaaattaatatttccctttctatcttctaggatggactttcctcatttggacagccgctctggtttaaagatatgtacaaacctctcagtgccacaagaataaataatcatgcatggaagctgcacaagaagtcatctaatgaggacaagatcctcaacagggaccctggggacagcgaagccccaacggaggaggaggagagtgaagccctgccataggaggagaacacagcccacctcaggcctcctgcaaaaatacatagaataaacaacaacagttactaaataaatgaaaattgtgattccgatgaagcctgccagagaaataaagcattttttaaaagaggaaataaggtgatatctgattagggcaaacatgatgcagacaagaaatgcaccggttcagaggagggaaggtcaggccgcctggggagagtccatgaaaaagatggaacgtgccagatgctgtacctggtgctgggaaagagttgactaggccagcatccctttcctcaaagggggggctcctagactggggggagggctggacatctgaatacatcctgaggagacagtgtgggacagcatggtggcagtggaaccagccgtggttctgctcttggtcggctggaaaggagtagatgtaagggatggtttagaagaagggaagtggaagaaaagttttctgagctgacaagaggaaggaaaggccgcctagaaggacactaaaaaggcaagagaagccctaagcagagtgagcaccagactccacaggttaagggctcagtcacacaggaccatccgcatgtcagaccccaggtgcaaggccaagcatcacctatgcatctgaccaactggctgtaaattggaggtccccacaactccctcctcagg

SEQ ID NO: 382081 - DNA, 8282 bp, Homo sapiens
tccttgtagttcttccccgcgttctatcctttatcttctagagaccttggtagttcccataggaatagtgctttacggagtctaatggtgatttcttaggtaaagacaggaaacatttttttcttttttacctacaagttccatatcaaaaaatgaatgtaaacttttcatgcagttttacacattgaaaatgcaggttattttaattccattccatttttcagaattctcaatcacaatcctctgacaactgttgaagatccgtatctctttaaattgccagcattaaaatatctgtaagtactatagtactctcatgagtcaagagatgatttatgctttttaaatttttcatcaaagcttaagtattttgcatttaggctaaaatgtcataatttaaattttaactgggttattgaaaaaaagttattggcgaagaaaaaaattaagaggatgtataatggtcaagacagccagcaggggaagagaacagcattgaagaacccatatagatttggaacatgtagacacatggaggaatattatttaaccaagaaagcaaaggggaaaaggtgttcattattctaaaaataaagaaaagagtaaataagatggtgagtgcaatatgaaaatgagaagataatggtaaaaaaaaaaagtgtcagttctgctcttgagtatcattaatttgatgatgcaaatcaacttttaatttctttaataagagctccctggaattctacagcaaataaagtcttgagctggcttgtttaatagagaagccaaaattgaattgttaagtacagaattttttattggggctcatatcatgaatgtttcggctttcttcttcagagacatgggaacaacgctagtcccacttacaacacttaagaacattctcatgatgactgttgaactggaaaaactgatcttacctagccatatggcctgctgcctctgccaatttaaaaacagcattgaggctgtctgcaagacagtcaagctgcattgcaacagtgcatgtctgacaaacaccacacattgtcgtgagtccaaattgcgcggtgataaattgttacattaagtatttgtttttaaactttttatttttaatgatgataaaattttaagctaatgacataattgctttatttttatttactcattcagagttaaactccctcaatttccgaactactcccttgctgaaagtcaggttctcagttactattacaaaatttaataatagaactgttccatatgcagaaaggaccaagacaaaggaatgggaaggctagggaataacattaacatccacacactgtatactgtgctctctgcttgatgctttgcccacagtgataatttcttcatatagtgcaatgtagtttgtaagctggttttaaatccatgagatctcaagtactctctgccttataggacagatgtagatacggttttggtctttctgtttttacagttttataagagtacaagtgatgctgttttatttgaagcctgagagcttctggttccataaccagaaattgctacctggctcttctaatggaatggagggcttttccattcttagaccatccaactctgaacttgctccgaatctcaaacctttctgttcacagaacaaacgctcaagggctttcaagagtgtttctgtagattaggcttattagcatcaacttcatgacttctaaaatgtgactgctttcatgtccagatagcttgaatacaggtatctaccagtgatatggggtggagaattaataatgcttggttacataaagtcagtgttgcttatttttcaaaactttttttttttttttttttttttaccaattatgttattcccttctccccaagaagtgggcagaaaagctttgttaacctccttttacagatgaggaaaaacaagatcagaggtgctaagtgctgtagcctagtgccaggtcttctggccccaattctgggttctccccaagcccatgtttcttcccctttctcacaatctttacttcttcctctgaccctcaccaccacccaaagtacttttaattctagaaaagaaacccagctgcacactggcacacctgaccttcatgcagtcagaagctttggatgattccccatccaaaatattagagatgaaatgaaagcaaagtaggcatctgacaaaagttgctttttcccttctgcattttaggacctcaagtaatgtttatccagaaactgctatcataccagggattcattgtgtatttaacaacataggcatacaatctggcaaatttgaaaaactcttaacatacaccccaaatccctgcccaaatttaagaactagggtggacacagtgcgtttttccatgtcgcatcttctgtgatggggctacgatacgtgggagcagagaatggggagggtggagcgcatgccagatgaggatctatcagcaatgggacggggcctccactttagcatctccaccctgctcctctcagaggaccgcctttcattgcattcagctgtgatggtagcacgaacacaggtgcaccgaggacgaggagagcaggagccttgtgctctctctgcatctgaggcaggacagcacagggtacggagcagtctgcagagaggccagctcatcagggaagcacttgtcttccaccttgggctttgactgagcactgggcaattggcctctggggatcaacgaaataatcctaaacagagttactctatgtcacactatggaatgttccaagtaggtggccgtgttttcaaaagatgtattttctccttttgttgttgccatttcataggtttaggattgggtgtgtgtttctcctctctgaatggcactcgaatgtttgctgactcctactctgtgtgactggggtgtacagctatggactgatgcatcccatcccatcatctttcatgatcaaagcagtctcttcttttttgacagctgaagaagcatcggtagggaatccagaaggagcgttcatgaaggtgttacaagcccggaagaactacacaagcactgagctgattgttgagccagaggagccctcagacagcagtggcatcaacttgtcaggctttgggagtgagcagctagacaccaatgacgagagtgattttatcagtacactaagttacatcttgccttatttctcagcggtaaacctagatgtgaaatcactgttactaccgttcattaaactgccaaccacaggaaacagcctggcaaagattcaaactgtaggccaaaaccggcagagagtgaagagagtcctcatgggcccaaggagcatccagaaaaggcacttcaaagaggtaggaaggcagagcatcaggagggaacagggtgcccaggcatctgtggagaacgctgccgaagaaaaaaggctcgggagtccagccccaagggaggtggaacagccccacacacagcaggggcctgagaagttagcgggaaacgccgtctacaccaagccttccttcacccaagagcataaggcagcagtctctgtgctgaaacccttctccaagggcgcgccttctacctccagccctgcaaaagccctaccacaggtgagagacagatggaaagacttaacccacgctatttccattttagaaagtgcaaaggctagagttacaaatacgaagacgtctaaaccaatcgtacatgccagaaaaaaataccgctttcacaaaactcgctcccacgtgacccacagaacacccaaagtcaaaaagagtccaaaggtcagaaagaaaagttatctgagtagactgatgctcgcaaacaggcttccattctctgcagcgaagagcctcataaattccccttcacaaggggctttttcatccttaggagacctgagtcctcaagaaaacccttttctggaagtatctgctccttcagaacattttatagaaaagaataatacaaaacacacaactgcaagaaatgcctttgaagaaaatgattttatggaaaacactaacatgccagaaggaaccatctctgaaaacacaaactacaatcatcctcctgaggcagattccgctgggactgcattcaacttagggccaactgttaaacaaactgagacaaaatgggaatacaacaacgtgggcactgacctgtcccccgagcccaaaagcttcaattacccattgctctcgtccccaggtgatcagtttgaaattcagctaacccagcagctacagtcccttatccccaacaacaatgtgagaaggctcattgctcatgttatccggaccttgaagatggactgctctggggcccatgtgcaagtgacctgtgccaagctcatctccaggacaggccacctgatgaagcttctcagtgggcagcaggaagtaaaggcatccaagatagaatgggatacggaccaatggaagattgagaactacattaatgagagcacagaagcccagagtgaacagaaagagaagtcgcttgagctcaaaaaagaagttccaggatatggctatactgacaaactcatcttggcattaattgttactggaatactaacgattttgattatacttttctgcctcattgtggtaaggacaataattaattcaggttttcagaatgcagtcctgtctttgtgtggattcagagctcacaaactgaaaaccaaagccactttcccacctgctgctacttgacatacttcttcagtcatttaaggctgaggtgtatgctttgttcttttactgcagtgtatatttcaggatttttaaaggatcctcgctttcagatctctgtgaattgaaaccatgtgaatcccactagactattttaagaagtcgatataatagcaaaatttctcccacccaaaactatgtcaacaattggatgtactcatcaagtcacccttactctgccactaatttatttccttggtgctgaaatgatgagagaggtataatctccaccctcacggagttgtcatcaccctggagaggaaggagagagccaaaagacatacgtattgtcttgtagacttattagatttacacagtatcgtcctccagtgtgtaaggcattgtctaaataggtccagttaaagcactacagagtagccatcttttacaaaaatttttggccacatttttaagttcactggtgagggggaacgtctcatactctagccctcctgagcctagaccctctgtgagatgtgtcaccatttcttggacaccatgtgagacattccccctcagattagagatgctcagcttgcatcaacttacctaaagcctacatctggctactctgggacaagtcctgtttacagtgcccattcctggagcttgcctctgtcttttgttcgattacatgatgtattacttttcccaacaggccagtgctagcatattggaagagtgatttaataaagctggcaaccttgacgctatgccaccagtccaaccttacttgcctcatttaccatttccattattgtggcagccctccattccagccacagcagcccctcaccaaaccccagtcacaccacccacatttctgcttttgtctgtgtgtttgtccatctaaaatgcccttatttcactctgcctgtgggagtcctatgcatctctcaaaagccaactcaagttcatctttcttcttgacaccttccctgaatattccagccctgctgagcctagtccctttgtgagatttgtcaccatttcttggacaccatatgagagacttcagaggctgaagtgggaggatcgcttgagcctgggaggtcgaggatgcagtgagctgtggtcgtaccactgcactctagcctgggcaacacagctaggccctgtcttaaaaacagccaccaccaaaaactatcttgggatttgaataggattacgttaaatttgtagattaatttgagaatttacatctgtacgacattctaggaacgtgctatctcatgtcatgtattcatttcttgttaatgtctttcagaagagctttagtgtttccatatatagatcttatacatcttttgttagataaaagatctttgtatttttgttcctaaattcttcatacatttgtattgccattgtaaatgggatctttcttccattttctaattagttattggtggtacatgggaaaagtatttgaggtttgtgtgctgatttcttgattttgtagatagccactgtattgaattctcattacttccagtaaaatcttagttgattctcttaggcttctttggctaacatttatcatttaatatgcaaataatgatagttttgtctcttcctttccaatacttctactctttccttcctttcccttttcctttttcctttcctttcctttccttttttttcccttctcagggccttgttgtcacccaggctggagagcaatggtgtgacctagctcactgtaacatcaaactcctgggctcaagggatcctcccgcctcagcttcctgagtggctgggactacaggcaggagaactgcttgagcccaggaggcgcaggttgcagggagccaagatagcaccattgcactccagcctggggaatgagccaaactgtctcaaataaaaaaaaaacaacaaaaaagaattttaactacggagaccttagatagtagtttgtccttttatgacaggaaaactgagaaggagaaagggagagtgtcttacttaccccatggtcacacaatgcactctgccttttcctattttattcaaattcaaaaataacatgttgtgctttaagctgatttcgtagctcactcactcatcagcgacagccagccatatgaagactgtgagatagagaacttggctagctgcactcacgcatttgcttgaggtgatccaacttatagaataaagtatctagaaaacgaagaaccacttcatctcccatcccccatcaaatgatgcctgtgagactaagtccgaaggggactgatataaaatgcttctgcccagcatggttgtgcagtttgttcactgcacaagggcacttggccaagggagtgagtgggactgaaaatcctgcccctgctccatgctgagccacatacaaagtccccccagtatattgtggggcccttctgggcagacatggagagcttctgaaagtcccacatgcatggaattattttcaagaccccgggtatgtggtctgtggtggtggttctccctgtgattatggactgagatactcatttagtcctaataagaccagagaagtacattgtgagatacgtgggaaacggctgcatcactcactgtcttgtgcatgtgtctccccaggggcattttcagatttctgccacggaggggatgctcttcgcgaagggagagtcaggatggactttcctcatttggacagccgctctggtttaaagatatgtacaaacctctcagtgccacaagaataaataatcatgcatggaagctgcacaagaagtcatctaatgaggacaagatcctcaacagggaccctggggacagcgaagccccaacggaggaggaggagagtgaagccctgccataggaggagaacacagcccacctcaggcctcctgcaaaaatacatagaataaacaacaacagttactaaataaatgaaaattgtgattccgatgaagcctgccagagaaataaagcattttttaaaagaggaaataaggtgatatctgattagggcaaacatgatgcagacaagaaatgcaccggttcagaggagggaaggtcaggccgcctggggagagtccatgaaaaagatggaacgtgccagatgctgtacctggtgctgggaaagagttgactaggccagcatccctttcctcaaagggggggctcctagactggggggagggctggacatctgaatacatcctgaggagacagtgtgggacagcatggtggcagtggaaccagccgtggttctgctcttggtcggctggaaaggagtagatgtaagggatggtttagaagaagggaagtggaagaaaagttttctgagctgacaagaggaaggaaaggccgcctagaaggacactaaaaaggcaagagaagccctaagcagagtgagcaccagactccacaggttaagggctcagtcacacaggaccatccgcatgtcagaccccaggtgcaaggccaagcatcacctatgcatctgaccaactggctgtaaattggaggtccccacaactccctcctcagg

SEQ ID NO: 382082 - DNA, 5593 bp, Homo sapiens
tccttgtagttcttccccgcgttctatcctttatcttctagagaccttggtagttcccataggaatagtgctttacggagtctaatggtgatttcttaggtaaagacaggaaacatttttttcttttttacctacaagttccatatcaaaaaatgaatgtaaacttttcatgcagttttacacattgaaaatgcaggttattttaattccattccatttttcagaattctcaatcacaatcctctgacaactgttgaagatccgtatctctttaaattgccagcattaaaatatctgtaagtactatagtactctcatgagtcaagagatgatttatgctttttaaatttttcatcaaagcttaagtattttgcatttaggctaaaatgtcataatttaaattttaactgggttattgaaaaaaagttattggcgaagaaaaaaattaagaggatgtataatggtcaagacagccagcaggggaagagaacagcattgaagaacccatatagatttggaacatgtagacacatggaggaatattatttaaccaagaaagcaaaggggaaaaggtgttcattattctaaaaataaagaaaagagtaaataagatggtgagtgcaatatgaaaatgagaagataatggtaaaaaaaaaaagtgtcagttctgctcttgagtatcattaatttgatgatgcaaatcaacttttaatttctttaataagagctccctggaattctacagcaaataaagtcttgagctggcttgtttaatagagaagccaaaattgaattgttaagtacagaattttttattggggctcatatcatgaatgtttcggctttcttcttcagagacatgggaacaacgctagtcccacttacaacacttaagaacattctcatgatgactgttgaactggaaaaactgatcttacctagccatatggcctgctgcctctgccaatttaaaaacagcattgaggctgtctgcaagacagtcaagctgcattgcaacagtgcatgtctgacaaacaccacacattgtcgtgagtccaaattgcgcggtgataaattgttacattaagtatttgtttttaaactttttatttttaatgatgataaaattttaagctaatgacataattgctttatttttatttactcattcagagttaaactccctcaatttccgaactactcccttgctgaaagtcaggttctcagttactattacaaaatttaataatagaactgttccatatgcagaaaggaccaagacaaaggaatgggaaggctagggaataacattaacatccacacactgtatactgtgctctctgcttgatgctttgcccacagtgataatttcttcatatagtgcaatgtagtttgtaagctggttttaaatccatgagatctcaagtactctctgccttataggacagatgtagatacggttttggtctttctgtttttacagttttataagagtacaagtgatgctgttttatttgaagcctgagagcttctggttccataaccagaaattgctacctggctcttctaatggaatggagggcttttccattcttagaccatccaactctgaacttgctccgaatctcaaacctttctgttcacagaacaaacgctcaagggctttcaagagtgtttctgtagattaggcttattagcatcaacttcatgacttctaaaatgtgactgctttcatgtccagatagcttgaatacaggtatctaccagtgatatggggtggagaattaataatgcttggttacataaagtcagtgttgcttatttttcaaaactttttttttttttttttttttttaccaattatgttattcccttctccccaagaagtgggcagaaaagctttgttaacctccttttacagatgaggaaaaacaagatcagaggtgctaagtgctgtagcctagtgccaggtcttctggccccaattctgggttctccccaagcccatgtttcttcccctttctcacaatctttacttcttcctctgaccctcaccaccacccaaagtacttttaattctagaaaagaaacccagctgcacactggcacacctgaccttcatgcagtcagaagctttggatgattccccatccaaaatattagagatgaaatgaaagcaaagtaggcatctgacaaaagttgctttttcccttctgcattttaggacctcaagtaatgtttatccagaaactgctatcataccagggattcattgtgtatttaacaacataggcatacaatctggcaaatttgaaaaactcttaacatacaccccaaatccctgcccaaatttaagaactagggtggacacagtgcgtttttccatgtcgcatcttctgtgatggggctacgatacgtgggagcagagaatggggagggtggagcgcatgccagatgaggatctatcagcaatgggacggggcctccactttagcatctccaccctgctcctctcagaggaccgcctttcattgcattcagctgtgatggtagcacgaacacaggtgcaccgaggacgaggagagcaggagccttgtgctctctctgcatctgaggcaggacagcacagggtacggagcagtctgcagagaggccagctcatcagggaagcacttgtcttccaccttgggctttgactgagcactgggcaattggcctctggggatcaacgaaataatcctaaacagagttactctatgtcacactatggaatgttccaagtaggtggccgtgttttcaaaagatgtattttctccttttgttgttgccatttcataggtttaggattgggtgtgtgtttctcctctctgaatggcactcgaatgtttgctgactcctactctgtgtgactggggtgtacagctatggactgatgcatcccatcccatcatctttcatgatcaaagcagtctcttcttttttgacagctgaagaagcatcggtagggaatccagaaggagcgttcatgaaggtgttacaagcccggaagaactacacaagcactgagctgattgttgagccagaggagccctcagacagcagtggcatcaacttgtcaggctttgggagtgagcagctagacaccaatgacgagagtgattttatcagtacactaagttacatcttgccttatttctcagcggtaaacctagatgtgaaatcactgttactaccgttcattaaactgccaaccacaggaaacagcctggcaaagattcaaactgtaggccaaaaccggcagagagtgaagagagtcctcatgggcccaaggagcatccagaaaaggcacttcaaagaggtaggaaggcagagcatcaggagggaacagggtgcccaggcatctgtggagaacgctgccgaagaaaaaaggctcgggagtccagccccaagggaggtggaacagccccacacacagcaggggcctgagaagttagcgggaaacgccgtctacaccaagccttccttcacccaagagcataaggcagcagtctctgtgctgaaacccttctccaagggcgcgccttctacctccagccctgcaaaagccctaccacaggtgagagacagatggaaagacttaacccacgctatttccattttagaaagtgcaaaggctagagttacaaatacgaagacgtctaaaccaatcgtacatgccagaaaaaaataccgctttcacaaaactcgctcccacgtgacccacagaacacccaaagtcaaaaagagtccaaaggtcagaaagaaaagttatctgagtagactgatgctcgcaaacaggcttccattctctgcagcgaagagcctcataaattccccttcacaaggggctttttcatccttaggagacctgagtcctcaagaaaacccttttctggaagtatctgctccttcagaacattttatagaaaagaataatacaaaacacacaactgcaagaaatgcctttgaagaaaatgattttatggaaaacactaacatgccagaaggaaccatctctgaaaacacaaactacaatcatcctcctgaggcagattccgctgggactgcattcaacttagggccaactgttaaacaaactgagacaaaatgggaatacaacaacgtgggcactgacctgtcccccgagcccaaaagcttcaattacccattgctctcgtccccaggtgatcagtttgaaattcagctaacccagcagctacagtcccttatccccaacaacaatgtgagaaggctcattgctcatgttatccggaccttgaagatggactgctctggggcccatgtgcaagtgacctgtgccaagctcatctccaggacaggccacctgatgaagcttctcagtgggcagcaggaagtaaaggcatccaagatagaatgggatacggaccaatggaagattgagaactacattaatgagagcacagaagcccagagtgaacagaaagagaagtcgcttgagctcaaaaaagaagttccaggatatggctatactgacaaactcatcttggcattaattgttactggaatactaacgattttgattatacttttctgcctcattgtgatatgttgtcaccgaaggtcattacaagaagatgaagaaggattctcaaggggcattttcagatttctgccacggaggggatgctcttcgcgaagggagagtcaggatggactttcctcatttggacagccgctctggtttaaagatatgtacaaacctctcagtgccacaagaataaataatcatgcatggaagctgcacaagaagtcatctaatgaggacaagatcctcaacagggaccctggggacagcgaagccccaacggaggaggaggagagtgaagccctgccataggaggagaacacagcccacctcaggcctcctgcaaaaatacatagaataaacaacaacagttactaaataaatgaaaattgtgattccgatgaagcctgccagagaaataaagcattttttaaaagaggaaataaggtgatatctgattagggcaaacatgatgcagacaagaaatgcaccggttcagaggagggaaggtcaggccgcctggggagagtccatgaaaaagatggaacgtgccagatgctgtacctggtgctgggaaagagttgactaggccagcatccctttcctcaaagggggggctcctagactggggggagggctggacatctgaatacatcctgaggagacagtgtgggacagcatggtggcagtggaaccagccgtggttctgctcttggtcggctggaaaggagtagatgtaagggatggtttagaagaagggaagtggaagaaaagttttctgagctgacaagaggaaggaaaggccgcctagaaggacactaaaaaggcaagagaagccctaagcagagtgagcaccagactccacaggttaagggctcagtcacacaggaccatccgcatgtcagaccccaggtgcaaggccaagcatcacctatgcatctgaccaactggctgtaaattggaggtccccacaactccctcctcagg

SEQ ID NO: 382083 - DNA, 5488 bp, Homo sapiens
tccttgtagttcttccccgcgttctatcctttatcttctagagaccttggtagttcccataggaatagtgctttacggagtctaatggtgatttcttaggtaaagacaggaaacatttttttcttttttacctacaagttccatatcaaaaaatgaatgtaaacttttcatgcagttttacacattgaaaatgcaggttattttaattccattccatttttcagaattctcaatcacaatcctctgacaactgttgaagatccgtatctctttaaattgccagcattaaaatatctgtaagtactatagtactctcatgagtcaagagatgatttatgctttttaaatttttcatcaaagcttaagtattttgcatttaggctaaaatgtcataatttaaattttaactgggttattgaaaaaaagttattggcgaagaaaaaaattaagaggatgtataatggtcaagacagccagcaggggaagagaacagcattgaagaacccatatagatttggaacatgtagacacatggaggaatattatttaaccaagaaagcaaaggggaaaaggtgttcattattctaaaaataaagaaaagagtaaataagatggtgagtgcaatatgaaaatgagaagataatggtaaaaaaaaaaagtgtcagttctgctcttgagtatcattaatttgatgatgcaaatcaacttttaatttctttaataagagctccctggaattctacagcaaataaagtcttgagctggcttgtttaatagagaagccaaaattgaattgttaagtacagaattttttattggggctcatatcatgaatgtttcggctttcttcttcagagacatgggaacaacgctagtcccacttacaacacttaagaacattctcatgatgactgttgaactggaaaaactgatcttacctagccatatggcctgctgcctctgccaatttaaaaacagcattgaggctgtctgcaagacagtcaagctgcattgcaacagtgcatgtctgacaaacaccacacattgtcgtgagtccaaattgcgcggtgataaattgttacattaagtatttgtttttaaactttttatttttaatgatgataaaattttaagctaatgacataattgctttatttttatttactcattcagagttaaactccctcaatttccgaactactcccttgctgaaagtcaggttctcagttactattacaaaatttaataatagaactgttccatatgcagaaaggaccaagacaaaggaatgggaaggctagggaataacattaacatccacacactgtatactgtgctctctgcttgatgctttgcccacagtgataatttcttcatatagtgcaatgtagtttgtaagctggttttaaatccatgagatctcaagtactctctgccttataggacagatgtagatacggttttggtctttctgtttttacagttttataagagtacaagtgatgctgttttatttgaagcctgagagcttctggttccataaccagaaattgctacctggctcttctaatggaatggagggcttttccattcttagaccatccaactctgaacttgctccgaatctcaaacctttctgttcacagaacaaacgctcaagggctttcaagagtgtttctgtagattaggcttattagcatcaacttcatgacttctaaaatgtgactgctttcatgtccagatagcttgaatacaggtatctaccagtgatatggggtggagaattaataatgcttggttacataaagtcagtgttgcttatttttcaaaactttttttttttttttttttttttaccaattatgttattcccttctccccaagaagtgggcagaaaagctttgttaacctccttttacagatgaggaaaaacaagatcagaggtgctaagtgctgtagcctagtgccaggtcttctggccccaattctgggttctccccaagcccatgtttcttcccctttctcacaatctttacttcttcctctgaccctcaccaccacccaaagtacttttaattctagaaaagaaacccagctgcacactggcacacctgaccttcatgcagtcagaagctttggatgattccccatccaaaatattagagatgaaatgaaagcaaagtaggcatctgacaaaagttgctttttcccttctgcattttaggacctcaagtaatgtttatccagaaactgctatcataccagggattcattgtgtatttaacaacataggcatacaatctggcaaatttgaaaaactcttaacatacaccccaaatccctgcccaaatttaagaactagggtggacacagtgcgtttttccatgtcgcatcttctgtgatggggctacgatacgtgggagcagagaatggggagggtggagcgcatgccagatgaggatctatcagcaatgggacggggcctccactttagcatctccaccctgctcctctcagaggaccgcctttcattgcattcagctgtgatggtagcacgaacacaggtgcaccgaggacgaggagagcaggagccttgtgctctctctgcatctgaggcaggacagcacagggtacggagcagtctgcagagaggccagctcatcagggaagcacttgtcttccaccttgggctttgactgagcactgggcaattggcctctggggatcaacgaaataatcctaaacagagttactctatgtcacactatggaatgttccaagtaggtggccgtgttttcaaaagatgtattttctccttttgttgttgccatttcataggtttaggattgggtgtgtgtttctcctctctgaatggcactcgaatgtttgctgactcctactctgtgtgactggggtgtacagctatggactgatgcatcccatcccatcatctttcatgatcaaagcagtctcttcttttttgacagctgaagaagcatcggtagggaatccagaaggagcgttcatgaaggtgttacaagcccggaagaactacacaagcactgagctgattgttgagccagaggagccctcagacagcagtggcatcaacttgtcaggctttgggagtgagcagctagacaccaatgacgagagtgattttatcagtacactaagttacatcttgccttatttctcagcggtaaacctagatgtgaaatcactgttactaccgttcattaaactgccaaccacaggaaacagcctggcaaagattcaaactgtaggccaaaaccggcagagagtgaagagagtcctcatgggcccaaggagcatccagaaaaggcacttcaaagaggtaggaaggcagagcatcaggagggaacagggtgcccaggcatctgtggagaacgctgccgaagaaaaaaggctcgggagtccagccccaagggaggtggaacagccccacacacagcaggggcctgagaagttagcgggaaacgccgtctacaccaagccttccttcacccaagagcataaggcagcagtctctgtgctgaaacccttctccaagggcgcgccttctacctccagccctgcaaaagccctaccacaggtgagagacagatggaaagacttaacccacgctatttccattttagaaagtgcaaaggctagagttacaaatacgaagacgtctaaaccaatcgtacatgccagaaaaaaataccgctttcacaaaactcgctcccacgtgacccacagaacacccaaagtcaaaaagagtccaaaggtcagaaagaaaagttatctgagtagactgatgctcgcaaacaggcttccattctctgcagcgaagagcctcataaattccccttcacaaggggctttttcatccttaggagacctgagtcctcaagaaaacccttttctggaagtatctgctccttcagaacattttatagaaaagaataatacaaaacacacaactgcaagaaatgcctttgaagaaaatgattttatggaaaacactaacatgccagaaggaaccatctctgaaaacacaaactacaatcatcctcctgaggcagattccgctgggactgcattcaacttagggccaactgttaaacaaactgagacaaaatgggaatacaacaacgtgggcactgacctgtcccccgagcccaaaagcttcaattacccattgctctcgtccccaggtgatcagtttgaaattcagctaacccagcagctacagtcccttatccccaacaacaatgtgagaaggctcattgctcatgttatccggaccttgaagatggactgctctggggcccatgtgcaagtgacctgtgccaagctcatctccaggacaggccacctgatgaagcttctcagtgggcagcaggaagtaaaggcatccaagatagaatgggatacggaccaatggaagattgagaactacattaatgagagcacagaagcccagagtgaacagaaagagaagtcgcttgagatatgttgtcaccgaaggtcattacaagaagatgaagaaggattctcaaggggcattttcagatttctgccacggaggggatgctcttcgcgaagggagagtcaggatggactttcctcatttggacagccgctctggtttaaagatatgtacaaacctctcagtgccacaagaataaataatcatgcatggaagctgcacaagaagtcatctaatgaggacaagatcctcaacagggaccctggggacagcgaagccccaacggaggaggaggagagtgaagccctgccataggaggagaacacagcccacctcaggcctcctgcaaaaatacatagaataaacaacaacagttactaaataaatgaaaattgtgattccgatgaagcctgccagagaaataaagcattttttaaaagaggaaataaggtgatatctgattagggcaaacatgatgcagacaagaaatgcaccggttcagaggagggaaggtcaggccgcctggggagagtccatgaaaaagatggaacgtgccagatgctgtacctggtgctgggaaagagttgactaggccagcatccctttcctcaaagggggggctcctagactggggggagggctggacatctgaatacatcctgaggagacagtgtgggacagcatggtggcagtggaaccagccgtggttctgctcttggtcggctggaaaggagtagatgtaagggatggtttagaagaagggaagtggaagaaaagttttctgagctgacaagaggaaggaaaggccgcctagaaggacactaaaaaggcaagagaagccctaagcagagtgagcaccagactccacaggttaagggctcagtcacacaggaccatccgcatgtcagaccccaggtgcaaggccaagcatcacctatgcatctgaccaactggctgtaaattggaggtccccacaactccctcctcagg

SEQ ID NO: 382084 - DNA, 7140 bp, Homo sapiens
actatgcatatcttatttattctcatcaagttactcctcattccgactctccctgctgagtcagaagaatgggaaggctagggaataacattaacatccacacactgtatactgtgctctctgcttgatgctttgcccacagtgataatttcttcatatagtgcaatgtagtttgtaagctggttttaaatccatgagatctcaagtactctctgccttataggacagatgtagatacggttttggtctttctgtttttacagttttataagagtacaagtgatgctgttttatttgaagcctgagagcttctggttccataaccagaaattgctacctggctcttctaatggaatggagggcttttccattcttagaccatccaactctgaacttgctccgaatctcaaacctttctgttcacagaacaaacgctcaagggctttcaagagtgtttctgtagattaggcttattagcatcaacttcatgacttctaaaatgtgactgctttcatgtccagatagcttgaatacaggtatctaccagtgatatggggtggagaattaataatgcttggttacataaagtcagtgttgcttatttttcaaaactttttttttttttttttttttttaccaattatgttattcccttctccccaagaagtgggcagaaaagctttgttaacctccttttacagatgaggaaaaacaagatcagaggtgctaagtgctgtagcctagtgccaggtcttctggccccaattctgggttctccccaagcccatgtttcttcccctttctcacaatctttacttcttcctctgaccctcaccaccacccaaagtacttttaattctagaaaagaaacccagctgcacactggcacacctgaccttcatgcagtcagaagctttggatgattccccatccaaaatattagagatgaaatgaaagcaaagtaggcatctgacaaaagttgctttttcccttctgcattttaggacctcaagtaatgtttatccagaaactgctatcataccagggattcattgtgtatttaacaacataggcatacaatctggcaaatttgaaaaactcttaacatacaccccaaatccctgcccaaatttaagaactagggtggacacagtgcgtttttccatgtcgcatcttctgtgatggggctacgatacgtgggagcagagaatggggagggtggagcgcatgccagatgaggatctatcagcaatgggacggggcctccactttagcatctccaccctgctcctctcagaggaccgcctttcattgcattcagctgtgatggtagcacgaacacaggtgcaccgaggacgaggagagcaggagccttgtgctctctctgcatctgaggcaggacagcacagggtacggagcagtctgcagagaggccagctcatcagggaagcacttgtcttccaccttgggctttgactgagcactgggcaattggcctctggggatcaacgaaataatcctaaacagagttactctatgtcacactatggaatgttccaagtaggtggccgtgttttcaaaagatgtattttctccttttgttgttgccatttcataggtttaggattgggtgtgtgtttctcctctctgaatggcactcgaatgtttgctgactcctactctgtgtgactggggtgtacagctatggactgatgcatcccatcccatcatctttcatgatcaaagcagtctcttcttttttgacagctgaagaagcatcggtagggaatccagaaggagcgttcatgaaggtgttacaagcccggaagaactacacaagcactgagctgattgttgagccagaggagccctcagacagcagtggcatcaacttgtcaggctttgggagtgagcagctagacaccaatgacgagagtgattttatcagtacactaagttacatcttgccttatttctcagcggtaaacctagatgtgaaatcactgttactaccgttcattaaactgccaaccacaggaaacagcctggcaaagattcaaactgtaggccaaaaccggcagagagtgaagagagtcctcatgggcccaaggagcatccagaaaaggcacttcaaagaggtaggaaggcagagcatcaggagggaacagggtgcccaggcatctgtggagaacgctgccgaagaaaaaaggctcgggagtccagccccaagggaggtggaacagccccacacacagcaggggcctgagaagttagcgggaaacgccgtctacaccaagccttccttcacccaagagcataaggcagcagtctctgtgctgaaacccttctccaagggcgcgccttctacctccagccctgcaaaagccctaccacaggtgagagacagatggaaagacttaacccacgctatttccattttagaaagtgcaaaggctagagttacaaatacgaagacgtctaaaccaatcgtacatgccagaaaaaaataccgctttcacaaaactcgctcccacgtgacccacagaacacccaaagtcaaaaagagtccaaaggtcagaaagaaaagttatctgagtagactgatgctcgcaaacaggcttccattctctgcagcgaagagcctcataaattccccttcacaaggggctttttcatccttaggagacctgagtcctcaagaaaacccttttctggaagtatctgctccttcagaacattttatagaaaagaataatacaaaacacacaactgcaagaaatgcctttgaagaaaatgattttatggaaaacactaacatgccagaaggaaccatctctgaaaacacaaactacaatcatcctcctgaggcagattccgctgggactgcattcaacttagggccaactgttaaacaaactgagacaaaatgggaatacaacaacgtgggcactgacctgtcccccgagcccaaaagcttcaattacccattgctctcgtccccaggtgatcagtttgaaattcagctaacccagcagctacagtcccttatccccaacaacaatgtgagaaggctcattgctcatgttatccggaccttgaagatggactgctctggggcccatgtgcaagtgacctgtgccaagctcatctccaggacaggccacctgatgaagcttctcagtgggcagcaggaagtaaaggcatccaagatagaatgggatacggaccaatggaagattgagaactacattaatgagagcacagaagcccagagtgaacagaaagagaagtcgcttgagctcaaaaaagaagttccaggatatggctatactgacaaactcatcttggcattaattgttactggaatactaacgattttgattatacttttctgcctcattgtggtaaggacaataattaattcaggttttcagaatgcagtcctgtctttgtgtggattcagagctcacaaactgaaaaccaaagccactttcccacctgctgctacttgacatacttcttcagtcatttaaggctgaggtgtatgctttgttcttttactgcagtgtatatttcaggatttttaaaggatcctcgctttcagatctctgtgaattgaaaccatgtgaatcccactagactattttaagaagtcgatataatagcaaaatttctcccacccaaaactatgtcaacaattggatgtactcatcaagtcacccttactctgccactaatttatttccttggtgctgaaatgatgagagaggtataatctccaccctcacggagttgtcatcaccctggagaggaaggagagagccaaaagacatacgtattgtcttgtagacttattagatttacacagtatcgtcctccagtgtgtaaggcattgtctaaataggtccagttaaagcactacagagtagccatcttttacaaaaatttttggccacatttttaagttcactggtgagggggaacgtctcatactctagccctcctgagcctagaccctctgtgagatgtgtcaccatttcttggacaccatgtgagacattccccctcagattagagatgctcagcttgcatcaacttacctaaagcctacatctggctactctgggacaagtcctgtttacagtgcccattcctggagcttgcctctgtcttttgttcgattacatgatgtattacttttcccaacaggccagtgctagcatattggaagagtgatttaataaagctggcaaccttgacgctatgccaccagtccaaccttacttgcctcatttaccatttccattattgtggcagccctccattccagccacagcagcccctcaccaaaccccagtcacaccacccacatttctgcttttgtctgtgtgtttgtccatctaaaatgcccttatttcactctgcctgtgggagtcctatgcatctctcaaaagccaactcaagttcatctttcttcttgacaccttccctgaatattccagccctgctgagcctagtccctttgtgagatttgtcaccatttcttggacaccatatgagagacttcagaggctgaagtgggaggatcgcttgagcctgggaggtcgaggatgcagtgagctgtggtcgtaccactgcactctagcctgggcaacacagctaggccctgtcttaaaaacagccaccaccaaaaactatcttgggatttgaataggattacgttaaatttgtagattaatttgagaatttacatctgtacgacattctaggaacgtgctatctcatgtcatgtattcatttcttgttaatgtctttcagaagagctttagtgtttccatatatagatcttatacatcttttgttagataaaagatctttgtatttttgttcctaaattcttcatacatttgtattgccattgtaaatgggatctttcttccattttctaattagttattggtggtacatgggaaaagtatttgaggtttgtgtgctgatttcttgattttgtagatagccactgtattgaattctcattacttccagtaaaatcttagttgattctcttaggcttctttggctaacatttatcatttaatatgcaaataatgatagttttgtctcttcctttccaatacttctactctttccttcctttcccttttcctttttcctttcctttcctttccttttttttcccttctcagggccttgttgtcacccaggctggagagcaatggtgtgacctagctcactgtaacatcaaactcctgggctcaagggatcctcccgcctcagcttcctgagtggctgggactacaggcaggagaactgcttgagcccaggaggcgcaggttgcagggagccaagatagcaccattgcactccagcctggggaatgagccaaactgtctcaaataaaaaaaaaacaacaaaaaagaattttaactacggagaccttagatagtagtttgtccttttatgacaggaaaactgagaaggagaaagggagagtgtcttacttaccccatggtcacacaatgcactctgccttttcctattttattcaaattcaaaaataacatgttgtgctttaagctgatttcgtagctcactcactcatcagcgacagccagccatatgaagactgtgagatagagaacttggctagctgcactcacgcatttgcttgaggtgatccaacttatagaataaagtatctagaaaacgaagaaccacttcatctcccatcccccatcaaatgatgcctgtgagactaagtccgaaggggactgatataaaatgcttctgcccagcatggttgtgcagtttgttcactgcacaagggcacttggccaagggagtgagtgggactgaaaatcctgcccctgctccatgctgagccacatacaaagtccccccagtatattgtggggcccttctgggcagacatggagagcttctgaaagtcccacatgcatggaattattttcaagaccccgggtatgtggtctgtggtggtggttctccctgtgattatggactgagatactcatttagtcctaataagaccagagaagtacattgtgagatacgtgggaaacggctgcatcactcactgtcttgtgcatgtgtctccccaggggcattttcagatttctgccacggaggggatgctcttcgcgaagggagagtcaggtacattggaggattcattgctgtggccagggaaagcagaggacatgcaaaattaatatttccctttctatcttctaggatggactttcctcatttggacagccgctctggtttaaagatatgtacaaacctctcagtgccacaagaataaataatcatgcatggaagctgcacaagaagtcatctaatgaggacaagatcctcaacagggaccctggggacagcgaagccccaacggaggaggaggagagtgaagccctgccataggaggagaacacagcccacctcaggcctcctgcaaaaatacatagaataaacaacaacagttactaaataaatgaaaattgtgattccgatgaagcctgccagagaaataaagcattttttaaaagaggaaataaggtgatatctgattagggcaaacatgatgcagacaagaaatgcaccggttcagaggagggaaggtcaggccgcctggggagagtccatgaaaaagatggaacgtgccagatgctgtacctggtgctgggaaagagttgactaggccagcatccctttcctcaaagggggggctcctagactggggggagggctggacatctgaatacatcctgaggagacagtgtgggacagcatggtggcagtggaaccagccgtggttctgctcttggtcggctggaaaggagtagatgtaagggatggtttagaagaagggaagtggaagaaaagttttctgagctgacaagaggaaggaaaggccgcctagaaggacactaaaaaggcaagagaagccctaagcagagtgagcaccagactccacaggttaagggctcagtcacacaggaccatccgcatgtcagaccccaggtgcaaggccaagcatcacctatgcatctgaccaactggctgtaaattggaggtccccacaactccctcctcagg

SEQ ID NO: 382085 - DNA, 4858 bp, Homo sapiens
tccttgtagttcttccccgcgttctatcctttatcttctagagaccttggtagttcccataggaatagtgctttacggagtctaatggtgatttcttaggtaaagacaggaaacatttttttcttttttacctacaagttccatatcaaaaaatgaatgtaaacttttcatgcagttttacacattgaaaatgcaggttattttaattccattccatttttcagaattctcaatcacaatcctctgacaactgttgaagatccgtatctctttaaattgccagcattaaaatatctgtaagtactatagtactctcatgagtcaagagatgatttatgctttttaaatttttcatcaaagcttaagtattttgcatttaggctaaaatgtcataatttaaattttaactgggttattgaaaaaaagttattggcgaagaaaaaaattaagaggatgtataatggtcaagacagccagcaggggaagagaacagcattgaagaacccatatagatttggaacatgtagacacatggaggaatattatttaaccaagaaagcaaaggggaaaaggtgttcattattctaaaaataaagaaaagagtaaataagatggtgagtgcaatatgaaaatgagaagataatggtaaaaaaaaaaagtgtcagttctgctcttgagtatcattaatttgatgatgcaaatcaacttttaatttctttaataagagctccctggaattctacagcaaataaagtcttgagctggcttgtttaatagagaagccaaaattgaattgttaagtacagaattttttattggggctcatatcatgaatgtttcggctttcttcttcagagacatgggaacaacgctagtcccacttacaacacttaagaacattctcatgatgactgttgaactggaaaaactgatcttacctagccatatggcctgctgcctctgccaatttaaaaacagcattgaggctgtctgcaagacagtcaagctgcattgcaacagtgcatgtctgacaaacaccacacattgtcgtgagtccaaattgcgcggtgataaattgttacattaagtatttgtttttaaactttttatttttaatgatgataaaattttaagctaatgacataattgctttatttttatttactcattcagagttaaactccctcaatttccgaactactcccttgctgaaagtcaggttctcagttactattacaaaatttaataatagaactgttccatatgcagaaaggaccaagacaaaggaatgggaaggctagggaataacattaacatccacacactgtatactgtgctctctgcttgatgctttgcccacagtgataatttcttcatatagtgcaatgtagtttgtaagctggttttaaatccatgagatctcaagtactctctgccttataggacagatgtagatacggttttggtctttctgtttttacagttttataagagtacaagtgatgctgttttatttgaagcctgagagcttctggttccataaccagaaattgctacctggctcttctaatggaatggagggcttttccattcttagaccatccaactctgaacttgctccgaatctcaaacctttctgttcacagaacaaacgctcaagggctttcaagagtgtttctgtagattaggcttattagcatcaacttcatgacttctaaaatgtgactgctttcatgtccagatagcttgaatacaggtatctaccagtgatatggggtggagaattaataatgcttggttacataaagtcagtgttgcttatttttcaaaactttttttttttttttttttttttaccaattatgttattcccttctccccaagaagtgggcagaaaagctttgttaacctccttttacagatgaggaaaaacaagatcagaggtgctaagtgctgtagcctagtgccaggtcttctggccccaattctgggttctccccaagcccatgtttcttcccctttctcacaatctttacttcttcctctgaccctcaccaccacccaaagtacttttaattctagaaaagaaacccagctgcacactggcacacctgaccttcatgcagtcagaagctttggatgattccccatccaaaatattagagatgaaatgaaagcaaagtaggcatctgacaaaagttgctttttcccttctgcattttaggacctcaagtaatgtttatccagaaactgctatcataccagggattcattgtgtatttaacaacataggcatacaatctggcaaatttgaaaaactcttaacatacaccccaaatccctgcccaaatttaagaactagggtggacacagtgcgtttttccatgtcgcatcttctgtgatggggctacgatacgtgggagcagagaatggggagggtggagcgcatgccagatgaggatctatcagcaatgggacggggcctccactttagcatctccaccctgctcctctcagaggaccgcctttcattgcattcagctgtgatggtagcacgaacacaggtgcaccgaggacgaggagagcaggagccttgtgctctctctgcatctgaggcaggacagcacagggtacggagcagtctgcagagaggccagctcatcagggaagcacttgtcttccaccttgggctttgactgagcactgggcaattggcctctggggatcaacgaaataatcctaaacagagttactctatgtcacactatggaatgttccaagtaggtggccgtgttttcaaaagatgtattttctccttttgttgttgccatttcataggtttaggattgggtgtgtgtttctcctctctgaatggcactcgaatgtttgctgactcctactctgtgtgactggggtgtacagctatggactgatgcatcccatcccatcatctttcatgatcaaagcagtctcttcttttttgacagctgaagaagcatcggtagggaatccagaaggagcgttcatgaaggtgttacaagcccggaagaactacacaagcactgagctgattgttgagccagaggagccctcagacagcagtggcatcaacttgtcaggctttgggagtgagcagctagacaccaatgacgagagtgattttatcagtacactaagttacatcttgccttatttctcagcggtaaacctagatgtgaaatcactgttactaccgttcattaaactgccaaccacaggaaacagcctggcaaagattcaaactgtaggccaaaaccggcagagagtgaagagagtcctcatgggcccaaggagcatccagaaaaggcacttcaaagaggtaggaaggcagagcatcaggagggaacagggtgcccaggcatctgtggagaacgctgccgaagaaaaaaggctcgggagtccagccccaagggaggtggaacagccccacacacagcaggggcctgagaagttagcgggaaacgccgtctacaccaagccttccttcacccaagagcataaggcagcagtctctgtgctgaaacccttctccaagggcgcgccttctacctccagccctgcaaaagccctaccacaggtgagagacagatggaaagacttaacccacgctatttccattttagaaagtgcaaaggctagagttacaaatacgaagacgtctaaaccaatcgtacatgccagaaaaaaataccgctttcacaaaactcgctcccacgtgacccacagaacacccaaagtcaaaaagagtccaaaggtcagaaagaaaagttatctgagtagactgatgctcgcaaacaggcttccattctctgcagcgaagagcctcataaattccccttcacaaggggctttttcatccttaggagacctgagtcctcaagaaaacccttttctggaagtatctgctccttcagaacattttatagaaaagaataatacaaaacacacaactgcaagaaatgcctttgaagaaaatgattttatggaaaacactaacatgccagaaggaaccatctctgaaaacacaaactacaatcatcctcctgaggcagattccgctgggactgcattcaacttagggccaactgttaaacaaactgagacaaaatgggaatacaacaacgtgggcactgacctgtcccccgagcccaaaagcttcaattacccattgctctcgtccccaggtgatcagtttgaaattcagctaacccagcagctacagtcccttatccccaacaacaatgtgagaaggctcattgctcatgttatccggaccttgaagatggactgctctggggcccatgtgcaagtgacctgtgccaagctcatctccaggacaggccacctgatgaagcttctcagtgggcagcaggaagtaaaggcatccaagatagaatgggatacggaccaatggaagattgagaactacattaatgagagcacagaagcccagagtgaacagaaagagaagtcgcttgagatatgttgtcaccgaaggtcattacaagaagatgaagaaggattctcaagggacagcgaagccccaacggaggaggaggagagtgaagccctgccataggaggagaacacagcccacctcaggcctcctgcaaaaatacatagaataaacaacggccatcaaaaaagcaggactgaagccagcggcccacacatccacagaggcagcgggcagagcaagcacagggccatcgttcctgcccttgtttcccagtctaattagtcacccagacctgaaaacatatgctcagggggtggagattttacaattaaataacattgtttttggtgccctcaaaaa

SEQ ID NO: 382086 - DNA, 5303 bp, Homo sapiens
gctgcggtactctaaggatcagccagaggagccctcagacagcagtggcatcaacttgtcaggctttgggagtgagcagctagacaccaatgacgagagtgattttatcagtacactaagttacatcttgccttatttctcagcggtaaacctagatgtgaaatcactgttactaccgttcattaaactgccaaccacaggaaacagcctggcaaagattcaaactgtaggccaaaaccggcagagagtgaagagagtcctcatgggcccaaggagcatccagaaaaggcacttcaaagaggtaggaaggcagagcatcaggagggaacagggtgcccaggcatctgtggagaacgctgccgaagaaaaaaggctcgggagtccagccccaagggaggtggaacagccccacacacagcaggggcctgagaagttagcgggaaacgccgtctacaccaagccttccttcacccaagagcataaggcagcagtctctgtgctgaaacccttctccaagggcgcgccttctacctccagccctgcaaaagccctaccacaggtgagagacagatggaaagacttaacccacgctatttccattttagaaagtgcaaaggctagagttacaaatacgaagacgtctaaaccaatcgtacatgccagaaaaaaataccgctttcacaaaactcgctcccacgtgacccacagaacacccaaagtcaaaaagagtccaaaggtcagaaagaaaagttatctgagtagactgatgctcgcaaacaggcttccattctctgcagcgaagagcctcataaattccccttcacaaggggctttttcatccttaggagacctgagtcctcaagaaaacccttttctggaagtatctgctccttcagaacattttatagaaaagaataatacaaaacacacaactgcaagaaatgcctttgaagaaaatgattttatggaaaacactaacatgccagaaggaaccatctctgaaaacacaaactacaatcatcctcctgaggcagattccgctgggactgcattcaacttagggccaactgttaaacaaactgagacaaaatgggaatacaacaacgtgggcactgacctgtcccccgagcccaaaagcttcaattacccattgctctcgtccccaggtgatcagtttgaaattcagctaacccagcagctacagtcccttatccccaacaacaatgtgagaaggctcattgctcatgttatccggaccttgaagatggactgctctggggcccatgtgcaagtgacctgtgccaagctcatctccaggacaggccacctgatgaagcttctcagtgggcagcaggaagtaaaggcatccaagatagaatgggatacggaccaatggaagattgagaactacattaatgagagcacagaagcccagagtgaacagaaagagaagtcgcttgagctcaaaaaagaagttccaggatatggctatactgacaaactcatcttggcattaattgttactggaatactaacgattttgattatacttttctgcctcattgtggtaaggacaataattaattcaggttttcagaatgcagtcctgtctttgtgtggattcagagctcacaaactgaaaaccaaagccactttcccacctgctgctacttgacatacttcttcagtcatttaaggctgaggtgtatgctttgttcttttactgcagtgtatatttcaggatttttaaaggatcctcgctttcagatctctgtgaattgaaaccatgtgaatcccactagactattttaagaagtcgatataatagcaaaatttctcccacccaaaactatgtcaacaattggatgtactcatcaagtcacccttactctgccactaatttatttccttggtgctgaaatgatgagagaggtataatctccaccctcacggagttgtcatcaccctggagaggaaggagagagccaaaagacatacgtattgtcttgtagacttattagatttacacagtatcgtcctccagtgtgtaaggcattgtctaaataggtccagttaaagcactacagagtagccatcttttacaaaaatttttggccacatttttaagttcactggtgagggggaacgtctcatactctagccctcctgagcctagaccctctgtgagatgtgtcaccatttcttggacaccatgtgagacattccccctcagattagagatgctcagcttgcatcaacttacctaaagcctacatctggctactctgggacaagtcctgtttacagtgcccattcctggagcttgcctctgtcttttgttcgattacatgatgtattacttttcccaacaggccagtgctagcatattggaagagtgatttaataaagctggcaaccttgacgctatgccaccagtccaaccttacttgcctcatttaccatttccattattgtggcagccctccattccagccacagcagcccctcaccaaaccccagtcacaccacccacatttctgcttttgtctgtgtgtttgtccatctaaaatgcccttatttcactctgcctgtgggagtcctatgcatctctcaaaagccaactcaagttcatctttcttcttgacaccttccctgaatattccagccctgctgagcctagtccctttgtgagatttgtcaccatttcttggacaccatatgagagacttcagaggctgaagtgggaggatcgcttgagcctgggaggtcgaggatgcagtgagctgtggtcgtaccactgcactctagcctgggcaacacagctaggccctgtcttaaaaacagccaccaccaaaaactatcttgggatttgaataggattacgttaaatttgtagattaatttgagaatttacatctgtacgacattctaggaacgtgctatctcatgtcatgtattcatttcttgttaatgtctttcagaagagctttagtgtttccatatatagatcttatacatcttttgttagataaaagatctttgtatttttgttcctaaattcttcatacatttgtattgccattgtaaatgggatctttcttccattttctaattagttattggtggtacatgggaaaagtatttgaggtttgtgtgctgatttcttgattttgtagatagccactgtattgaattctcattacttccagtaaaatcttagttgattctcttaggcttctttggctaacatttatcatttaatatgcaaataatgatagttttgtctcttcctttccaatacttctactctttccttcctttcccttttcctttttcctttcctttcctttccttttttttcccttctcagggccttgttgtcacccaggctggagagcaatggtgtgacctagctcactgtaacatcaaactcctgggctcaagggatcctcccgcctcagcttcctgagtggctgggactacaggcaggagaactgcttgagcccaggaggcgcaggttgcagggagccaagatagcaccattgcactccagcctggggaatgagccaaactgtctcaaataaaaaaaaaacaacaaaaaagaattttaactacggagaccttagatagtagtttgtccttttatgacaggaaaactgagaaggagaaagggagagtgtcttacttaccccatggtcacacaatgcactctgccttttcctattttattcaaattcaaaaataacatgttgtgctttaagctgatttcgtagctcactcactcatcagcgacagccagccatatgaagactgtgagatagagaacttggctagctgcactcacgcatttgcttgaggtgatccaacttatagaataaagtatctagaaaacgaagaaccacttcatctcccatcccccatcaaatgatgcctgtgagactaagtccgaaggggactgatataaaatgcttctgcccagcatggttgtgcagtttgttcactgcacaagggcacttggccaagggagtgagtgggactgaaaatcctgcccctgctccatgctgagccacatacaaagtccccccagtatattgtggggcccttctgggcagacatggagagcttctgaaagtcccacatgcatggaattattttcaagaccccgggtatgtggtctgtggtggtggttctccctgtgattatggactgagatactcatttagtcctaataagaccagagaagtacattgtgagatacgtgggaaacggctgcatcactcactgtcttgtgcatgtgtctccccaggggcattttcagatttctgccacggaggggatgctcttcgcgaagggagagtcaggtacattggaggattcattgctgtggccagggaaagcagaggacatgcaaaattaatatttccctttctatcttctaggatggactttcctcatttggacagccgctctggtttaaagatatgtacaaacctctcagtgccacaagaataaataatcatgcatggaagctgcacaagaagtcatctaatgaggacaagatcctcaacagggaccctggggacagcgaagccccaacggaggaggaggagagtgaagccctgccataggaggagaacacagcccacctcaggcctcctgcaaaaatacatagaataaacaacaacagttactaaataaatgaaaattgtgattccgatgaagcctgccagagaaataaagcattttttaaaagaggaaataaggtgatatctgattagggcaaacatgatgcagacaagaaatgcaccggttcagaggagggaaggtcaggccgcctggggagagtccatgaaaaagatggaacgtgccagatgctgtacctggtgctgggaaagagttgactaggccagcatccctttcctcaaagggggggctcctagactggggggagggctggacatctgaatacatcctgaggagacagtgtgggacagcatggtggcagtggaaccagccgtggttctgctcttggtcggctggaaaggagtagatgtaagggatggtttagaagaagggaagtggaagaaaagttttctgagctgacaagaggaaggaaaggccgcctagaaggacactaaaaaggcaagagaagccctaagcagagtgagcaccagactccacaggttaagggctcagtcacacaggaccatccgcatgtcagaccccaggtgcaaggccaagcatcacctatgcatctgaccaactggctgtaaattggaggtccccacaactccctcctcagg

SEQ ID NO: 382087 - DNA, 542 bp, Homo sapiens
ggtttcatcatgttggccaggatggtctcgatctcttgaccttgtgatctgcccacctcagcctcccacagtgttgggattacaggcgtgagccactgtgcccggctatctttacaatcttttatattgacttgacagtttaattctggattcacacacaattaagtttgatcttgcctagaggataggatctgtcacttgtattggcacattggcagtggccctttggaataccaaacttgtacatcagatggttctgtgtggtgtcagtcagtgtgccattgaatggtgtggtcagagatggatgttatctatttctacagatcacctcagtcgtcgtggcccacaagacttttctagcccatgttcagcccaagatctccaatgtcctcttcacttctcatttcagcccgtgtttccacttcactcgtgctttcttcagttctgctgaagttctgtcctttacttgtttataatttgatatctttgagactttaaatgtggcagtgagttgcaatgagaaaaggaggtggggaaagtga

SEQ ID NO: 382088 - DNA, 300 bp, Homo sapiens
gtatgggttaccaggatcagcagtttgcatacaaccaacttcaaaaacgtttatagtcagcatctagaaatcctgaaagctaagttaacattagatctgataatcaattgtctgtgtctccaaaatgcaatacagagataagaatgcacaattgattctagagcacacaatctggacctgggaactgtacaaacactgaggttaaactcagaataacagctgttaaatctatagatcttaacagtggaaattctgcaatcccccaattccatttgatatatgcttcatcattccactggc

SEQ ID NO: 382089 - DNA, 393 bp, Homo sapiens
taaatatagttaaactattttcaaagttttgagaaacctaaaacaaaaataaattttcttcttatatttattccataacagtcgaaattcagagacacattttaggaatcaagttagtttttttgttttttgttttttttgtttttttgttttttgtttttttgagacagggtcttgctctgtcgcccaggctgcaggctggaatgcagtagtgcattctcagctcacagcaacctctccacctaccaggctcaagtgatcctcccatctcagcctcttcatagaaccacaggcgcgtgccaccaagcccagctaatttttgtactttttgtagagatgggtttcactgtgttgccaaagctggtctcggaactccaagcaacctgcctgcct

SEQ ID NO: 382090 - DNA, 229 bp, Homo sapiens
acaatatataaaaataaaaagtcaacacaaatcgcttttagataccctttcacgaatctaataggttgtcacacactgtacaaaactatgtgagaacgtatactacttctcagccacaactactatttttagatattcataaaataacctctgtattgtgttttcacattgacccattcagttctgtccaatcttataattctgattaaatgttctggcctcaaaacta

SEQ ID NO: 382091 - DNA, 757 bp, Homo sapiens
gtggtgctgacaaagcttggaagagcctgcaggtgctgctgcgtggcatagccagacacagaagaggctggttcttacgatggcacccagtgagcactcccaagtctacagagtgatagccttccgtaacccaactctcctggactgccttgaatatcccctcccagtcaccttgtggcaagcccctgcccatctgggaaaataccccatcattcatgctactgccaacctggggagccagggctatgggagcagcttttttttcccccctagaaacgtttggaacaatctaaaactttaaagctcgaaaacaattgtaataatgctaaagaaaaagtcatccaatctaaccacatcaatattgtcattcctgtattcacccgtccagaccttgttcacactctcacatgtttagagttgcaatcgtaatgtacagatggttttataatctgatttgttttcctcttaacgttagaccacaaatagtgctcgctttctatgtagtttggtaattatcattttagaagactctaccagactgtgtattcattgaagtcagatgtggtaactgttaaattgctgtgtatctgatagctctttggcagtctatatgtttgtataatgaatgagagaataagtcatgttccttcaagatcatgtaccccaatttacttgccattactcaattgataaacatttaacttgtttccaatgtttagcaaatacatattttatagaacttccaaaaaaaaaaact

SEQ ID NO: 382092 - DNA, 717 bp, Homo sapiens
ccagccttcatcccggggatctctatcctttcaccaggaagccactgttcatcattgtggattcgtctaatagtgttgcgtataagaatttcacaaacttgtttggacagccactagtctgcttgctttctcctacagcatatccaaaagctttacaagatcaatctcagcgaggtagcctcttcactctctttttgaacaatcctctaatggccttcctatttgtctctggattgtcaagcatgcgcagaggcctatgggaaaagtgtcaagaatatcttcgaaaaatcaaccgtgatattgcccagctactgactcattcacgttcaatagatcaggcatttctccagttttttggagatgaatttcttcgcttgctcctcacaagatttatcttttgttcagccaccatgaggatgcacaagatttttcgggaaacacgaaattatccagaatcatatccacaactgccaagggatgaaacagtggagaatcctcatctccagaagcacattttggaattagcatccattctggatgttcgaaacgtgttctttgagaataccattgatgactattaaaacaaaaaccctgttgtcgaaacaagttttcattttccacaaattttaaatggtgcagttttctaacgtgataagacacatagtggtgttacttagtttttattttttaatttagggccaccattttaaaaacaaa

SEQ ID NO: 382093 - DNA, 6994 bp, Homo sapiens
tgcccctactcaggtgtcctggcctctaagccctcaacccctgggtatcccgaatttccgaaatctctgcccctagctattttgaccctgggggtcttgccatgattggggcctggagccacatccatggctctgctccggacgcccctgggttaagagcagcagcctctcaagccactctgtggcaggagctccaggtggaggtaaaagctcaccaggggcaggtgcaacgggtgctgagttctgggcggagcctggcagcctcagggcacccccaagcccaacacatcgtggagcagtgccaggagctggaaggccactgggcagagctggagagggcatgtgaagcgcgggcccagtgtctgcagcaggctgtcactttccagcagtactttctggatgtgtcagagctggagggctgggtggaggagaagcggccgctggtgagcagtcgggactatggcagagacgaggcagccaccctcaggctcattaacaagcaccaggctctacaggaggaactagccatttactggagctccatggaggagcttgaccagacggcccaaaccctcactggccccgaagtccctgagcagcagcgtgtggtgcaggagaggctccgggagcagctgcgggcactgcaggagttggcggccacacgggaccgggaactggaggggaccctgaggctgcatgagttcctgagggaggctgaggacctgcagggctggctggcaagccagaagcaggcagccaaaggaggggagagcctgggagaggaccccgagcacgccctgcacctctgcaccaagtttgcaaagtttcagcaccaagtggagatgggcagccagcgggtggccgcctgccggctgctggcggagagcctgctagagcgtgggcacagtgctggccccatggtccgtcagaggcagcaggatctgcagaccgcctggtcggagctgtgggagctgacccaggcccgaggccacgcgctccgagacaccgagaccaccctcagagttcacagagatctcttggaagtcctcacccaggtccaggagaaagccacgagcctccccaacaatgtggcacgggacctgtgtgggctggaggcgcagctgagaagccaccaggggctggagcgagaactcgtgggcaccgagcggcagctgcaggaactgctggagactgcaggcagggtgcagaagctgtgtccggggcctcaggcccatgcggtgcagcagaggcagcaagctgtgacgcaggcgtgggcagtgctgcagcgacgcatggagcagcgcagggcccagctggagcgggcacgcctcctggcccgcttccgcacggcggtgcgtgactatgcctcctgggcagcccgcgtgcgccaggacctgcaggtggaggagagttcgcaagagcctagcagtggcccgctgaagctcagtgcccaccagtggctccgggcggagctggaggcccgggagaagctgtggcagcaggccacccagctggggcagcaggcacttcttgctgcagggacacccaccaaggaggtccaggaagagcttcgagccctgcaggaccagcgggaccaggtgtatcagacctgggcacggaagcaagagaggctgcaggccgagcagcaggagcagctcttcctcagagagtgcggccgcctggaggagatcctcgcggcccaggaggtctccctgaaaaccagtgccttggggagctcggtggaagaggtagagcagttgattcgcaagcacgaggtcttcctgaaggttctgactgcccaggacaagaaggaggcagccctgcgtgagcggctgaagacgctccggcgcccccgggtgcgggaccggcttcccatcctgctgcagcgccggatgagagtgaaggagctggcggagagccggggacacgccctgcatgcctccctgctgatggccagcttcacccaggccgcaacccaggctgaggactggatccaggcgtgggcccagcagctgaaggagccggtccctcctggggacctgagagataagctgaagcccctgctgaaacaccaggcctttgaggctgaagtccaggcccatgaggaggtcatgacctctgttgccaagaagggagaggctctcctggcacagagtcaccctcgagccggagaggtctcccagcggctgcagggcctgcggaagcactgggaggacctgaggcaggcaatggccctcaggggccaggagctggaggacaggcggaacttcctggagttcctgcagagagtggaccttgcagaggcctggatccaggagaaggaggtgaagatgaatgttggtgacctgggccaggacctggagcactgcctgcagctccgacggcggctccgcgagttccgaggaaactcggccggggacacagtgggtgatgcctgcatcaggagcatcagtgacttgtcactgcagctcaagaaccgggaccctgaggaagtcaagatcatctgccagcggcgaagccagctcaacaacaggtgggcgagtttccatggcaacttgctccggtaccagcagcagctcgaaggggccttggagatacacgtgttgtcccgagagctggacaatgtcaccaagaggattcaggagaaggaagccctgatccaggccctggactgtgggaaagatctggagagcgtgcagaggctgctgcggaaacacgaggagctggagcgggaagtgcaccccatccaggcccaggtggagtccctagagcgtgaagtgggccgcctctgccaaagaagccccgaggcagcccacggcctcaggcacaggcagcaggaggtggctgagagctggtggcagctccggagcagggcccagaagcggagggaggcgctggatgccttgcaccaagctcagaaactccaggcaatgctgcaggaattgctggtcagcgcccagaggctgcgggctcagatggacacgagccccgctcctcgcagccctgtggaagcccggcgtatgttagaagagcatcaggagtgcaaggccgagctggactcctggacagacagcatcagcctggcccgaagcactgggcagcaactgctcacagcggggcaccccttcagctccgacattcgccaggtgctggctggcttagaacaggagctgagcagcctggaaggggcctggcaggagcatcagctacagctgcagcaggccctggagctacagctgtttctgagctcagtggagaagatggaacgttggctttgcagcaaggaagactccctagccagtgagggtctatgggaccccttggcccccatggagccccttctgtggaagcacaagatgctggagtgggacctggaggtgcaggcgggaaagatcagtgctctggaggccacggcccgcggcctgcaccagggtgggcaccccgaggcccagagtgccctgggcaggtgccaggccatgcttctgaggaaggaggcgctcttcaggcaagccgggacccgccgccatcgcctggaggagctccggcagctgcaggccttcctgcaggactcccaggaggtggctgcgtggctgagggagaagaacctggtggccttggaggagggtttgctggacacagccatgctgccagcacagttacagaagcagcagaatttccaggcggagctggacgcgagcatgcaccaacagcaggagctgcagcgggagggacagaggctgctgcaggggggccacccagcctcggaggccatccaggagcgactggaggagctgggagcactctggggtgagctgcaagacaactcccagaagaaggtggccaagctccagaaggcctgtgaggccctgcgtctgcggcggagcatggaggaactggagaactggctggagcccatcgaggttgagctgagagcccccactgtgggccaggccctgcctggggtgggcgagctcctgggcacacagagggagctggaggcagcagtggacaagaaggccaggcaggctgaggcactgctgggccaggcccaggcctttgtgagggaaggccactgccttgcccaagatgtggaagagcaggcccggcggctgcttcagaggttcaagagcctgagggagcccctgcaggagcgcaggacggccctggaggcccggagcctcctcttgaagttcttcagggacgccgacgaggaaatggcctgggtgcaggagaagctgcctctggccgctgcccaggactatggccagagcctgagtgcggtgcggcacctgcaggagcagcaccagaacctggagagtgagatgagcagccacgaggctctgacccgggtggtgctgggcactgggtacaagctggtgcaggctgggcactttgccgcccacgaggtggccgcccgggtgcagcagctggagaaggccatggcccacctgcgggcagaggcggcgcggaggcggcttctgctgcagcaggctcaggaggcccagcagtttctgactgagctcctggaggcgggatcctggctggctgagcggggccatgtcctggacagcgaggacatgggccacagtgctgaagccacacaggcccttctgcggcggctggaggccaccaagagagacctggaagcgttcagcccacgcatcgagcggctgcagcagacagcagcactcctggagagcaggaagaacccagaaagccccaaggtgctagcccagctgcaggcagttcgggaggcccacgcagagctgctgcggagggcggaggccagggggcacggcctgcaggagcagctgcagctacaccagctggagcgagagaccctgctcctcgacgcctggctgaccaccaaggcggccaccgccgagtcccaggactacgggcaggacctggagggtgtcaaggtgctggaagagaagtttgatgctttcagaaaggaagtgcagagcctgggccaggccaaggtgtatgccctgaggaagttggcaggcaccctggagcggggtgcacccaggcgctatccccacatccaagcccagaggagccgcattgaggctgcttgggagaggttggaccaagcaataaaagcccgcacagagaacttggctgcagcccatgaggtccacagctttcagcaggcagcagctgagctccagggaaggatgcaggagaagacggccctgatgaagggggaggacggaggccacagcctgtcatctgtgcggaccctgcagcaacagcacaggcgcctggagagagagctggaagctatggagaaggaggtggcacggctacagacggaggcctgccgactgggccagctacatcctgcagctccggggggcctggccaaggtgcaggaggcctgggccaccctgcaggcgaaggcccaggagcgaggccagtggctggcgcaggctgcacagggccatgccttcctcgggcgctgccaggaactgctagcatgggcacaggagaggcaggagctggcgtcctccgaggagctggctgaggacgtggcgggggctgagcagctccttgggcagcatgaagagctggggcaagaaatcagggagtgccgccttcaagcccaggacctgcggcaggaaggacagcagctggtggacaacagccacttcatgtctgcggaggtgacagagtgcctgcaggagctggaagggcggctgcaggagctggaggaggcttgggccctgcgctggcaacgctgtgccgagagctggggcctgcagaagcttcggcagaggctggagcaggctgaggcctggctggcctgctgggagggactcctgctgaagcccgactatgggcactcagtgtcagatgtggagttgctgctgcacagacaccaggacttagaaaagctgctggcagcccaggaagagaagtttgcccaaatgcaaaagacagagatggaacaggagctcctgctgcagccacaggagctgaagcccgggagagctggcagctcgctgacatcctttcagtggaggccctctggacaccaggggctaggagcacagctggctgagacgagggacccccaggatgcaaagggtacccccaccatggaggggtctttggagttcaagcagcacctgctgcctggcgggaggcagcctagctcgagctcctgggacagctgccgcgggaccttgcagggcagctctctgagcctgttcctggatgagaggatggcagcggagaaagtagcttccatagccctccttgacctcacgggagcccggtgtgagaggctgcggggccgccacggcaggaaacacacattctccttaaggctgaccagtggggcagagatcctgtttgcagcaccgtccgaagagcaggctgagagctggtggcgagccctgggcagcactgcagcccagagtctgagcccaaaactcaaagccaaacctgtcagctctctgaatgagtgcacgaccaaggatgcccggcctggatgtctactcaggtctgatccctgaggtgaaccccagtgcaacaccaaacttcaggggcacaagcgaggacacatctaagggaccagaataagactcagctacaggcaaaagggctccttcccgtggctgcttcaacccagttccccaggcccagcttctggaatagacagttccttctggttagatgggtcctaccatgtggcaggaaacagccattgcctggcctccccctgcattcctgtctgggtgaagaggagacgtgttacggcagagcaggtgggcaaggccagggctaccccaggcccatgtggcctcctccttgcttggaaggggtgactctgagcacaggtagacgcagacgtgtgcagagaatgtgctcttcggaggaagaacactgatgagcgagctctgtaccagcccttgccatgtacagccaagagcctagaatgacatggcccttctcagcagtaataacagatggtctcagcgcctca

SEQ ID NO: 382094 - DNA, 444 bp, Homo sapiens
acagcaaggtgggggacttccccagtgccagtgctcagagggacccagcaccttgggaccactgcaatgaccatcatctctggccaggagccggccaggtccaccgcctgtgggcagcagctggcagaagtggtggagctgctgcagaggcatgacctgctggaggctcaagtctcggcccacggagcccatgtgagccatcttgctcagcagacagcagagctggactcctccctgggcaccagtgtggaggtgctgcaggccaaggccaggacactggcccagctccaacagagcctggtggctcttgtcagggcccggtaagagcctgccccaactcttccacctttcccagaacttttctgtaacccaaattatctcctgcccaggttaaagtactgttggcctgccagttttctccacactgaccctcacttccaaagc

SEQ ID NO: 382095 - DNA, 11723 bp, Homo sapiens
ggacaatgccgcctgtgtgccgtcaccccagcacgctggctcaaggggagggctgtggtgcagccctgctccagccttggcctctcctgatgtccctctccctccctccacagcccctgctatctgccatctccatccgtccagctgggccgcctctgtggaacccaggcatcaccaaggtttagggagccatccagcagctcctcatccccaaagtctgcagggctgatggctggtcagccccacagtccccgggagctcctcggggctgcagggcaccgcagcaggaggcccagcacagaactccgggtcccgcccagtccaagtctcaccatggactctcagtacgagacgggccacattcgcaagctacaggcccggcacatgcagatgcaggagaagactttcaccaagtggatcaataacgtcttccagtgcggccaggcgggcatcaagatccggaacctgtacacagagctggctgacggcatccacctcctgcggctgctggagctcatctcaggggaggccctgccacccccgagccggggccgcctgcgtgtgcacttcctggagaacagcagccgagctctggccttcctcagggccaaggtgccagtaccactcatcgggccagagaacatcgtggacggagaccagacactcatcctgggactcatctgggtcatcattctgcgtttccagatctcccacatctccttggacaaggaggagtttggggccagcgcagccctgctgtccaccaaggaagccctgctggtctggtgccagcggaagacagccagctacaccaacgtgaacattacagatttctcccgaagctggagcgatgggctgggcttcaatgccctcatccatgcccacaggccagacctgttggactacggctccctgcgtccagaccgcccactgcacaaccttgcttttgctttcctggtggctgagcaggagctgggcattgctcagctgctggaccccgaggacgtggcagccgcacagccagatgagcgctctatcatgacctacgtctccctctactaccactactgctcccgcctgcatcaggggcagactgtccagaggagactcactaagatcctgcttcagctccaggagacagagctgctgcagacccagtacgagcagctggtggctgaccttctacgctggattgcagagaagcagatgcagctggaggcgcgggattttccagactcgctgcccgccatgcggcagctactggcagcattcaccatcttccgcacccaggagaagccaccccggctacagcagcgaggggccgcagaggccctgctcttccggctacagacagcactccaagcccagaaccgcaggcccttcctgcctcatgagggcctgggccttgcagagctgtcccagtgctgggcagggctggagtgggcagaggctgcaaggagccaggccctgcagcagaggctactgcagctgcagcggctagaaaccctggcccggcgcttccagcgcaaggcagccctccgggagagtttccttaaggatgcagagcaggtgctagaccaggccagagccccgccagccagcctggccacagtggaggcagccgtccagaggctgggcatgctggaggctggcatcctgccccaggaggggcgcttccaggccctggctgagatcgcagacatcctccggcaggagcagtaccacagctgggcagatgtggcccgcaggcaggaggaagttaccgtgcgctggcagaggctccttcagcatctacagggacagaggaagcaggtggcagacatgcaggctgtgctgagcctgctgcaggaggtggaggctgcctcccaccagctggaggagctgcaggagccggccaggtccaccgcctgtgggcagcagctggcagaagtggtggagctgctgcagaggcatgacctgctggaggctcaagtctcggcccacggagcccatgtgagccatcttgctcagcagacagcagagctggactcctccctgggcaccagtgtggaggtgctgcaggccaaggccaggacactggcccagctccaacagagcctggtggctcttgtcagggcccggcgggccctgctggagcagaccctgcagcgggcagagttcctgcgcaactgtgaggaggaggaagcctggctgaaggagtgcggacagcgggtggggaatgcggccctgggccgggatctcagccagatcgcaggcgccctgcagaaacacaaggccctggaagctgaggtccaccgccaccaggccgtgtgcgtagatctcgtgcggaggggacgcgacctcagcgcccgcaggcccccaacgcagccggatcccggggaacgggcagaggccgttcagggagggtggcagctgctccagacccgggtggtggggcggggcgcacggctgcagacagccctgctggtcctgcagtacttcgcggacgcggcggaggcggcttcgtggctgcgcgagcggcgatcctcgctggagagagcgtcctgcggtcaggaccaggcggccgccgagaccctgctgaggcgccacgtgcggctggagcgcgtcctgcgcgccttcgcggccgagctgcggcggctggaggagcaggggcgggcggcctcggcccgggcgtcgttattcacggtgaactctgccctgagccctccaggagaaagcctgaggaacccagggccctggagtgaggcttcctgccaccctggccctggggatgcctggaagatggccctcccagctgagcctgaccctgactttgatcccaacactatactccagacacaggaccacttgagtcaggactatgagagtctgcgggccctggcacagctccgcagggcccggttggaggaggccatggccctgttcggtttctgcagttcctgtggggagctccagttgtggctggagaagcagacagtgctgctccaaagggtgcagccccaggctgacaccctggaggtcatgcagctcaaatatgagaacttcctcactgccctggctgtgggaaagggcctctgggctgaggtcagcagctctgctgagcaactgaggcagagatatcctgggaactccacacaaatccaacgacagcaggaggaactgagccagaggtgggggcagctggaggccctgaagagggagaaggccgtgcagctggcacacagtgtggaagtgtgcagttttctgcaggagtgtggacccacacaggtccagctgcgagacgtgctcctccagctggaggccctgcagccagggagctcagaggacacccgccacgccctgcagctggcccagaagaagaccctggtgctggagaggagggtctacttcctccaaagtgtggtcgtaaaggtcgaggagccaggctacgcagagagccagcctctgcaaggacaggtggagacactgcaggggctgctgaagcaagtacaggaacaagtggcccaacgggcccggcgccaggctgagactcaggcccggcagagcttcctgcaagagagccagcaactgctactgtgggcagagagtgtccaggctcagctgcgcagcaaggaggtgtcagtggatgtggcctcggctcagcggctgctgagggagcatcaagacctgctggaggagatccacctgtggcaggagaggctgcagcagctggacgctcagagccagcccatggcagccttggactgcccagactcccaagaggtgcccaacactctgagggtcctggggcagcagggccaggagctgaaggttttgtgggagcagaggcagcagtggctgcaagaggggctggagctgcagaagtttggccgagaagtggatggtttcactgccacctgtgccaaccaccaggcctggctgcacctggacaaccttggggaggacgtgagggaggccctgagcctgctgcagcagcaccgggagtttgggcggctcctgagcaccctggggcctcgggcagaggctctgcgggcacacggcgagaagctggttcagagccagcacccagctgcacacacggtcagagagcagctgcagagtatccaggcacagtggaccaggctccaggggaggagtgagcagaggaggaggcagttgctggcttccctccagctccaggagtggaagcaggatgtggcagagctgatgcagtggatggaagagaaggggctgatggctgcgcatgagccctccggagcgcgcagaaacatcctgcagacactcaagcggcacgaagcagctgagagcgagctactcgccacccgcagacacgtggaggccctgcagcaggttgggagagagctgttgagtaggaggccctgtggccaggaggacatacagaccaggcttcaaggcctgagaagcaagtgggaagctttgaaccgcaagatgactgagcgtggggacgagctccagcaggctggacagcaggagcaactcctgaggcagctgcaggatgcaaaggagcagctggagcagctcgaaggggccctacagagctcggaaacagggcaggacctgcgctccagccagaggctgcagaaacggcaccaacagctggagagtgagagccggaccctggctgccaagatggctgccctcgcctccatggcccatggcatggccgcctccccggccatcctggaagagacccagaagcacctccggaggctggagcttctgcaggggcatctggccatccggggcctgcagctgcaggcctcagtggagctgcaccagttctgccacctgagcaacatggagctctcttgggtagccgagcacatgccccatggcagccccaccagctataccgagtgcttgaatggtgcccagagccttcaccgcaagcacaaggagctccaggtggaggtaaaagctcaccaggggcaggtgcaacgggtgctgagttctgggcggagcctggcagcctcagggcacccccaagcccaacacatcgtggagcagtgccaggagctggaaggccactgggcagagctggagagggcatgtgaagcgcgggcccagtgtctgcagcaggctgtcactttccagcagtactttctggatgtgtcagagctggagggctgggtggaggagaagcggccgctggtgagcagtcgggactatggcagagacgaggcagccaccctcaggctcattaacaagcaccaggctctacaggaggaactagccatttactggagctccatggaggagcttgaccagacggcccaaaccctcactggccccgaagtccctgagcagcagcgtgtggtgcaggagaggctccgggagcagctgcgggcactgcaggagttggcggccacacgggaccgggaactggaggggaccctgaggctgcatgagttcctgagggaggctgaggacctgcagggctggctggcaagccagaagcaggcagccaaaggaggggagagcctgggagaggaccccgagcacgccctgcacctctgcaccaagtttgcaaagtttcagcaccaagtggagatgggcagccagcgggtggccgcctgccggctgctggcggagagcctgctagagcgtgggcacagtgctggccccatggtccgtcagaggcagcaggatctgcagaccgcctggtcggagctgtgggagctgacccaggcccgaggccacgcgctccgagacaccgagaccaccctcagagttcacagagatctcttggaagtcctcacccaggtccaggagaaagccacgagcctccccaacaatgtggcacgggacctgtgtgggctggaggcgcagctgagaagccaccaggggctggagcgagaactcgtgggcaccgagcggcagctgcaggaactgctggagactgcaggcagggtgcagaagctgtgtccggggcctcaggcccatgcggtgcagcagaggcagcaagctgtgacgcaggcgtgggcagtgctgcagcgacgcatggagcagcgcagggcccagctggagcgggcacgcctcctggcccgcttccgcacggcggtgcgtgactatgcctcctgggcagcccgcgtgcgccaggacctgcaggtggaggagagttcgcaagagcctagcagtggcccgctgaagctcagtgcccaccagtggctccgggcggagctggaggcccgggagaagctgtggcagcaggccacccagctggggcagcaggcacttcttgctgcagggacacccaccaaggaggtccaggaagagcttcgagccctgcaggaccagcgggaccaggtgtatcagacctgggcacggaagcaagagaggctgcaggccgagcagcaggagcagctcttcctcagagagtgcggccgcctggaggagatcctcgcggcccaggaggtctccctgaaaaccagtgccttggggagctcggtggaagaggtagagcagttgattcgcaagcacgaggtcttcctgaaggttctgactgcccaggacaagaaggaggcagccctgcgtgagcggctgaagacgctccggcgcccccgggtgcgggaccggcttcccatcctgctgcagcgccggatgagagtgaaggagctggcggagagccggggacacgccctgcatgcctccctgctgatggccagcttcacccaggccgcaacccaggctgaggactggatccaggcgtgggcccagcagctgaaggagccggtccctcctggggacctgagagataagctgaagcccctgctgaaacaccaggcctttgaggctgaagtccaggcccatgaggaggtcatgacctctgttgccaagaagggagaggctctcctggcacagagtcaccctcgagccggagaggtctcccagcggctgcagggcctgcggaagcactgggaggacctgaggcaggcaatggccctcaggggccaggagctggaggacaggcggaacttcctggagttcctgcagagagtggaccttgcagaggcctggatccaggagaaggaggtgaagatgaatgttggtgacctgggccaggacctggagcactgcctgcagctccgacggcggctccgcgagttccgaggaaactcggccggggacacagtgggtgatgcctgcatcaggagcatcagtgacttgtcactgcagctcaagaaccgggaccctgaggaagtcaagatcatctgccagcggcgaagccagctcaacaacaggtgggcgagtttccatggcaacttgctccggtaccagcagcagctcgaaggggccttggagatacacgtgttgtcccgagagctggacaatgtcaccaagaggattcaggagaaggaagccctgatccaggccctggactgtgggaaagatctggagagcgtgcagaggctgctgcggaaacacgaggagctggagcgggaagtgcaccccatccaggcccaggtggagtccctagagcgtgaagtgggccgcctctgccaaagaagccccgaggcagcccacggcctcaggcacaggcagcaggaggtggctgagagctggtggcagctccggagcagggcccagaagcggagggaggcgctggatgccttgcaccaagctcagaaactccaggcaatgctgcaggaattgctggtcagcgcccagaggctgcgggctcagatggacacgagccccgctcctcgcagccctgtggaagcccggcgtatgttagaagagcatcaggagtgcaaggccgagctggactcctggacagacagcatcagcctggcccgaagcactgggcagcaactgctcacagcggggcaccccttcagctccgacattcgccaggtgctggctggcttagaacaggagctgagcagcctggaaggggcctggcaggagcatcagctacagctgcagcaggccctggagctacagctgtttctgagctcagtggagaagatggaacgttggctttgcagcaaggaagactccctagccagtgagggtctatgggaccccttggcccccatggagccccttctgtggaagcacaagatgctggagtgggacctggaggtgcaggcgggaaagatcagtgctctggaggccacggcccgcggcctgcaccagggtgggcaccccgaggcccagagtgccctgggcaggtgccaggccatgcttctgaggaaggaggcgctcttcaggcaagccgggacccgccgccatcgcctggaggagctccggcagctgcaggccttcctgcaggactcccaggaggtggctgcgtggctgagggagaagaacctggtggccttggaggagggtttgctggacacagccatgctgccagcacagttacagaagcagcagaatttccaggcggagctggacgcgagcatgcaccaacagcaggagctgcagcgggagggacagaggctgctgcaggggggccacccagcctcggaggccatccaggagcgactggaggagctgggagcactctggggtgagctgcaagacaactcccagaagaaggtggccaagctccagaaggcctgtgaggccctgcgtctgcggcggagcatggaggaactggagaactggctggagcccatcgaggttgagctgagagcccccactgtgggccaggccctgcctggggtgggcgagctcctgggcacacagagggagctggaggcagcagtggacaagaaggccaggcaggctgaggcactgctgggccaggcccaggcctttgtgagggaaggccactgccttgcccaagatgtggaagagcaggcccggcggctgcttcagaggttcaagagcctgagggagcccctgcaggagcgcaggacggccctggaggcccggagcctcctcttgaagttcttcagggacgccgacgaggaaatggcctgggtgcaggagaagctgcctctggccgctgcccaggactatggccagagcctgagtgcggtgcggcacctgcaggagcagcaccagaacctggagagtgagatgagcagccacgaggctctgacccgggtggtgctgggcactgggtacaagctggtgcaggctgggcactttgccgcccacgaggtggccgcccgggtgcagcagctggagaaggccatggcccacctgcgggcagaggcggcgcggaggcggcttctgctgcagcaggctcaggaggcccagcagtttctgactgagctcctggaggcgggatcctggctggctgagcggggccatgtcctggacagcgaggacatgggccacagtgctgaagccacacaggcccttctgcggcggctggaggccaccaagagagacctggaagcgttcagcccacgcatcgagcggctgcagcagacagcagcactcctggagagcaggaagaacccagaaagccccaaggtgctagcccagctgcaggcagttcgggaggcccacgcagagctgctgcggagggcggaggccagggggcacggcctgcaggagcagctgcagctacaccagctggagcgagagaccctgctcctcgacgcctggctgaccaccaaggcggccaccgccgagtcccaggactacgggcaggacctggagggtgtcaaggtgctggaagagaagtttgatgctttcagaaaggaagtgcagagcctgggccaggccaaggtgtatgccctgaggaagttggcaggcaccctggagcggggtgcacccaggcgctatccccacatccaagcccagaggagccgcattgaggctgcttgggagaggttggaccaagcaataaaagcccgcacagagaacttggctgcagcccatgaggtccacagctttcagcaggcagcagctgagctccagggaaggatgcaggagaagacggccctgatgaagggggaggacggaggccacagcctgtcatctgtgcggaccctgcagcaacagcacaggcgcctggagagagagctggaagctatggagaaggaggtggcacggctacagacggaggcctgccgactgggccagctacatcctgcagctccggggggcctggccaaggtgcaggaggcctgggccaccctgcaggcgaaggcccaggagcgaggccagtggctggcgcaggctgcacagggccatgccttcctcgggcgctgccaggaactgctagcatgggcacaggagaggcaggagctggcgtcctccgaggagctggctgaggacgtggcgggggctgagcagctccttgggcagcatgaagagctggggcaagaaatcagggagtgccgccttcaagcccaggacctgcggcaggaaggacagcagctggtggacaacagccacttcatgtctgcggaggtgacagagtgcctgcaggagctggaagggcggctgcaggagctggaggaggcttgggccctgcgctggcaacgctgtgccgagagctggggcctgcagaagcttcggcagaggctggagcaggctgaggcctggctggcctgctgggagggactcctgctgaagcccgactatgggcactcagtgtcagatgtggagttgctgctgcacagacaccaggacttagaaaagctgctggcagcccaggaagagaagtttgcccaaatgcaaaagacagagatggaacaggagctcctgctgcagccacaggagctgaagcccgggagagctggcagctcgctgacatcctttcagtggaggccctctggacaccaggggctaggagcacagctggctgagacgagggacccccaggatgcaaagggtacccccaccatggaggggtctttggagttcaagcagcacctgctgcctggcgggaggcagcctagctcgagctcctgggacagctgccgcgggaccttgcagggcagctctctgagcctgttcctggatgagaggatggcagcggagaaagtagcttccatagccctccttgacctcacgggagcccggtgtgagaggctgcggggccgccacggcaggaaacacacattctccttaaggctgaccagtggggcagagatcctgtttgcagcaccgtccgaagagcaggctgagagctggtggcgagccctgggcagcactgcagcccagagtctgagcccaaaactcaaagccaaacctgtcagctctctgaatgagtgcacgaccaaggatgcccggcctggatgtctactcaggtctgatccctgaggtgaaccccagtgcaacaccaaacttcaggggcacaagcgaggacacatctaagggaccagaataagactcagctacaggcaaaagggctccttcccgtggctgcttcaacccagttccccaggcccagcttctggaatagacagttccttctggttagatgggtcctaccatgtggcaggaaacagccattgcctggcctccccctgcattcctgtctgggtgaagaggagacgtgttacggcagagcaggtgggcaaggccagggctaccccaggcccatgtggcctcctccttgcttggaaggggtgactctgagcacaggtagacgcagacgtgtgcagagaatgtgctcttcggaggaagaacactgatgagcgagctctgtaccagcccttgccatgtacagccaagagcctagaatgacatggcccttctcagcagtaataacagatggtctcagcgcctca

SEQ ID NO: 382096 - DNA, 698 bp, Homo sapiens
ggagctcctcggggctgcagggcaccgcagcaggaggcccagcacagaactccgggtcccgcccagtccaagtctcaccatggactctcagtacgagacgggccacattcgcaagctacaggcccggcacatgcagatgcaggagaagactttcaccaagtggatcaataacgtcttccagtgcggccaggtgagtatagccagctgtgacccacagcccacccataccaggcccccagctctggccagtgggcctccggggtgagctgtggggtcatctgcctgaggccaagctgaggccagagctccttcttccaaagcagctgctctgggtcgtacctctcaggtcccaggatgggaggacaggtgaggctgggctgaccccatacttacccctgtcccctccccaggcgggcatcaagatccggaacctgtacacagagctggctgacggcatccacctcctgcggctgctggagctcatctcaggggaggccctgccacccccgagccggggccgcctgcgtgtgcacttcctggagaacagcagccgagctctggccttcctcagggccaaggtgggccccagggaaaggggtctgggatggtgctggggcaggcagctgggacaggctgaactactgggtcacctttcctgcgccaggccactgggcagaacagaggagctggggcctgag

SEQ ID NO: 382097 - DNA, 362 bp, Homo sapiens
aaggagggtacgccaaatgggaagcaattatgctgagacttgggctaaggaagagtctgttgttacaagactacccagagaagccaaatactcttccaccactgtttgaattctattcaaccaaggcaatctcaatgtaatactgaggagctgctcaaagtcttttgccaagtacatgatagaagagcaaaattttcacagccagttcaagatctggtcatcctttatgtttgaatctcacaactggctcttcaacagctcaaagttaaatttgtttcactctttgtccttcggcaagacttctgtccccgttccatcaagatgaacaatttttcttgggggagagctggaaaaatcattct

SEQ ID NO: 382098 - DNA, 380 bp, Homo sapiens
  misc_feature (320)..(320): n is a, c, g, or t
  misc_feature (326)..(326): n is a, c, g, or t
  misc_feature (328)..(328): n is a, c, g, or t
  misc_feature (330)..(330): n is a, c, g, or t
  misc_feature (340)..(340): n is a, c, g, or t
  misc_feature (360)..(360): n is a, c, g, or t
cagaaacccaaccccaaatccccagccccgtccaactcccctggtcttagaataattttccctctcctatgaaaggcctcatccccaaaagtctgtgttgtctgaatctgaatatgaaaagggaagggactgcctcctccccactgcccaccacacaccttcttattttgctgcctaggtcctgcttctcaatttttttaaaaaaaaattgtattagaatatgcataacataaaagttaccattttaaccatcatggggctttgtttgtttgtttgtttgtttgtttgtttgagacagagtcttgctctgcactccagcngggggnancnagccgggggnaccaaagccgaggctttganttccaaaaggaggaggaagg

SEQ ID NO: 382099 - DNA, 901 bp, Homo sapiens
tatctaaatccaacatttacattttatttcagtttgtgctgaaatgcctttcaagccctgtgctttttacctctaattttgtagaatgtattgggcaagtaagtattcttttgtccactgatttttttccctcccctacttttttttttttttttgagagagaggatcttgcttgccctgtcacctaggctggagtgcagtgatgcaaacatgtctcactgcagcctcaacctcccaggctcagtcagtcattctgcctcagccatcctaagtagatgggaccacaggcacatgccaccatacccggttaattttttgaatttttgtagagacagagtcttgccctgtttcccaagctaatatcctacattatatgatacatgcagaaaaaaactttcttcccctttaccccgagtgccctttttagctactttttatcctttacccatacttggagtagtttatattatatacaagtgctttttacaaattagtgaaataaggctctttattataagtgaaaaatgttagccttagttctagggtcattcagttagtttcccctcctttcctagagactcaattaacattgtagactttaacagtttacaaaatgcatgataaacatttaaccaagcatttgcagtccagatggtcttcattcctttctcaccatagctgtgaggtagaaagggctggtaaacgagctgcatctcctcacttgtgattgaatacttgttctagcagaccatctgccactctaggacaattaactgggatattacttagatatagcaatagtagtggtcttgctgttgcttctatgataaatactcactgaattctagatatttgcatcattcatcgttgtttctgaaaacccaggctacctgccagtaaa

SEQ ID NO: 382100 - DNA, 408 bp, Homo sapiens
ataacgaaaatgtggtaattatacaccatggaatactacatagccatagaaaaagaaaccatgtcccttgaagcaacatggatgcagctggaggccattatcctaaatgaattaatgcagcatcaggtaaccaaatacccatggtctcacttataagtgggagctaaacattgagtacacatggacacacagatgggatcaatagacactggggtctgcttgagtggggaggatggcatgaggctatgggtcaaaaaactattgggtactgtggttactacctgggtgacaatatcatttgtacaccaaaccccagtgacatgcaatttacccatgtaacaagcctgcacatttatcccttaaacctaaaaacagaaaaaattaaaaataaataaataaatgaggtat

SEQ ID NO: 382101 - DNA, 523 bp, Homo sapiens
cattgactgctaattagactcctctgggaaggtagaggcgggcaacacataatgccttcgctgtgggagcttcatcaaggggatgattcttggacggacatttttcctccctctttccacaggggcatgctagccctgtcattctaggagtttattatccttcagacacagctacttatgtttttaattccctcacaggatgaagacatgaagagaaagtttcaagatcttctgtctgaggaaaatgaatccacagctctaccccaggttctagcccagccttctactagtcgaaagcggccccgtgaaggggaagccgagggtgccgagaccacaaagcgcccagctgtgtgtgctgctgtgttgtgaactccgtggtttgaacacgaaagaaatgtaccttctttcactctgtcatctttcttttctttgagtctgtttttttatagtttgtattttaattatgggaataattgctttttcacagtcactgatgtacaattaaaaacctgatggaacctgg

SEQ ID NO: 382102 - DNA, 562 bp, Homo sapiens
cattgactgctaattagactcctctgggaaggtagaggcgggcaacacataatgccttcgctgtgggagcttcatcaaggggatgattcttggacggacatttttcctccctctttccacaggggcatgctagccctgtcattctaggagtttattatccttcagacacagctacttatgtttttaattccctcacaggatgaagacatgaagagaaagtttcaagatcttctgtctgaggaaaatgaatccacagctctaccccaggttctagcccagccttctactagtcgaaagcggccccgtgaaggggaagccgagggtgccgagaccacaaagcgcccagctgtgtgtgctgctgtgttgtgaactccgtggtttgaacacgaaagaaatgtaccttctttcactctgtcatctttcttttctttgagtctgtttttttatagtttgtattttaattatgggaataattgctttttcacagtcactgatgtacaattaaaaacctgatggaacctgggcctcgttggcctcagcggtggagctcgtcaggctggaa

SEQ ID NO: 382103 - DNA, 468 bp, Homo sapiens
gaggtcagaagccataagggagagaaatatctattagataagcatgtctgagttgggggctgtggtgaggactcagttgtcaatgatgacaaccagtaatttttggttctagaatttcacatcaaatgcccccactttactggaagcatattgaggaactttgataatcttaaagaagccagtgattttcttttgaacatttctccattttcctttattttcagccttctactagtcgaaagcggccccgtgaaggggaagccgagggtgccgagaccacaaagcgcccagctgtgtgtgctgctgtgttgtgaactccgtggtttgaacacgaaagaaatgtaccttctttcactctgtcatctttcttttctttgagtctgtttttttatagtttgtattttaattatgggaataattgctttttcacagtcactgatgtacaattaaaaacctgatggaacctgg

SEQ ID NO: 382104 - DNA, 490 bp, Homo sapiens
cattgactgctaattagactcctctgggaaggtagaggcgggcaacacataatgccttcgctgtgggagcttcatcaaggggatgattcttggacggacatttttcctccctctttccacaggggcatgctagccctgtcattctaggagtttattatccttcagacacagctacttatgtttttaattccctcacaggatgaagacatgaagagaaagtttcaagatcttctgtctgaggaaaatgaatccacagctctaccccaggttctagcccaggtattcgtattcctgatgatcactaaatgtagtctgggcttaaggagctgataagcaaagatgatgaaattcaagattttcctgagtagcaattgcttaacattgtttcagttataatgtagtagaaactctgttttaacttgattcgctccagcacccttagatttaaaaatgcaggatatgtttaatatctaacacataatagaccgat

SEQ ID NO: 382105 - DNA, 1821 bp, Homo sapiens
ggcacgaggggctccaggtgggctcacgcggtcgtgatgtctcgggagtcggatgttgaggctcagcagtctcatggcagcagtgcctgttcacagccccatggcagcgttacccagtcccaaggctcctcctcacagtcccagggcatatccagctcctctaccagcacgatgccaaactccagccagtcctctcactccagctctgggacactgagctccttagagacagtgtccactcaggaactctattctattcctgaggaccaagaacctgaggaccaagaacctgaggagcctacccctgccccctgggctcgattatgggcccttcaggatggatttgccaatcttgaatgtgtgaatgacaactactggtttgggagggacaaaagctgtgaatattgctttgatgaaccactgctgaaaagaacagataaataccgaacatacagcaagaaacactttcggattttcagggaagtgggtcctaaaaactcttacattgcatacatagaagatcacagtggcaatggaacctttgtaaatacagagcttgtagggaaaggaaaacgccgtcctttgaataacaattctgaaattgcactgtcactaagcagaaataaagttttgtcttttttgatctgactgtagatgatcagtcagtttatcctaaggcattaagagatgaatacatcatgtcaaaaactcttggaagtggtgcctgtggagaggtaaagctggctttcgagaggaaaacatgtaagaaagtagccataaagatcatcagcaaaaggaagtttgctattggttcagcaagagaggcagacccagctctcaatgttgaaacagaaatagaaattttgaaaaagctaaatcatccttgcatcatcaagattaaaaacttttttgatgcagaagattattatattgttttggaattgatggaagggggagagctgtttgacaaagtggtggggaataaacgcctgaaagaagctacctgcaagctctatttttaccagatgctcttggctgtgcagtaccttcatgaaaacggtattatacaccgtgacttaaagccagagaatgttttactgtcatctcaagaagaggactgtcttataaagattactgattttgggcactccaagattttgggagagacctctctcatgagaaccttatgtggaacccccacctacttggcgcctgaagttcttgtttctgttgggactgctgggtataaccgtgctgtggactgctggagtttaggagttattctttttatctgccttagtgggtatccacctttctctgagcataggactcaagtgtcactgaaggatcagatcaccagtggaaaatacaacttcattcctgaagtctgggcagaagtctcagagaaagctctggaccttgtcaagaagttgttggtagtggatccaaaggcacgttttacgacagaagaagccttaagacacccgtggcttcaggatgaagacatgaagagaaagtttcaagatcttctgtctgaggaaaatgaatccacagctctaccccaggttctagcccagccttctactagtcgaaagcggccccgtgaaggggaagccgagggtgccgagaccacaaagcgcccagctgtgtgtgctgctgtgttgtgaactccgtggtttgaacacgaaagaaatgtaccttctttcactctgtcatctttcttttctttgagtctgtttttttatagtttgtattttaattatgggaataattgctttttcacagtcactgatgtacaattaaaaacctgatggaacctgg

SEQ ID NO: 382106 - DNA, 1853 bp, Homo sapiens
gctggtactggcccgaggtgttaggattgcggagagtgtgcggctccaggtgggctcacgcggtcgtgatgtctcgggagtcggatgttgaggctcagcagtctcatggcagcagtgcctgttcacagccccatggcagcgttacccagtcccaaggctcctcctcacagtcccagggcatatccagctcctctaccagcacgatgccaaactccagccagtcctctcactccagctctgggacactgagctccttagagacagtgtccactcaggaactctattctattcctgaggaccaagaacctgaggaccaagaacctgaggagcctacccctgccccctgggctcgattatgggcccttcaggatggatttgccaatcttgaatgtgtgaatgacaactactggtttgggagggacaaaagctgtgaatattgctttgatgaaccactgctgaaaagaacagataaataccgaacatacagcaagaaacactttcggattttcagggaagtgggtcctaaaaactcttacattgcatacatagaagatcacagtggcaatggaacctttgtaaatacagagcttgtagggaaaggaaaacgccgtcctttgaataacaattctgaaattgcactgtcactaagcagaaataaagttttgtcttttttgatctgactgtagatgatcagtcagtttatcctaaggcattaagagatgaatacatcatgtcaaaaactcttggaagtggtgcctgtggagaggtaaagctggctttcgagaggaaaacatgtaagaaagtagccataaagatcatcagcaaaaggaagtttgctattggttcagcaagagaggcagacccagctctcaatgttgaaacagaaatagaaattttgaaaaagctaaatcatccttgcatcatcaagattaaaaacttttttgatgcagaagattattatattgttttggaattgatggaagggggagagctgtttgacaaagtggtggggaataaacgcctgaaagaagctacctgcaagctctatttttaccagatgctcttggctgtgcagtaccttcatgaaaacggtattatacaccgtgacttaaagccagagaatgttttactgtcatctcaagaagaggactgtcttataaagattactgattttgggcactccaagattttgggagagacctctctcatgagaaccttatgtggaacccccacctacttggcgcctgaagttcttgtttctgttgggactgctgggtataaccgtgctgtggactgctggagtttaggagttattctttttatctgccttagtgggtatccacctttctctgagcataggactcaagtgtcactgaaggatcagatcaccagtggaaaatacaacttcattcctgaagtctgggcagaagtctcagagaaagctctggaccttgtcaagaagttgttggtagtggatccaaaggcacgttttacgacagaagaagccttaagacacccgtggcttcaggatgaagacatgaagagaaagtttcaagatcttctgtctgaggaaaatgaatccacagctctaccccaggttctagcccagccttctactagtcgaaagcggccccgtgaaggggaagccgagggtgccgagaccacaaagcgcccagctgtgtgtgctgctgtgttgtgaactccgtggtttgaacacgaaagaaatgtaccttctttcactctgtcatctttcttttctttgagtctgtttttttatagtttgtattttaattatgggaataattgctttttcacagtcactgatgtacaattaaaaacctgatggaacctgg

SEQ ID NO: 382107 - DNA, 1866 bp, Homo sapiens
gcagctgattcgattcgactcggtacccgcacgagcatccttacacctcagcttcccaagtagctgggactacaggtcgtgatgtctcgggagtcggatgttgaggctcagcagtctcatggcagcagtgcctgttcacagccccatggcagcgttacccagtcccaaggctcctcctcacagtcccagggcatatccagctcctctaccagcacgatgccaaactccagccagtcctctcactccagctctgggacactgagctccttagagacagtgtccactcaggaactctattctattcctgaggaccaagaacctgaggaccaagaacctgaggagcctacccctgccccctgggctcgattatgggcccttcaggatggatttgccaatcttgaatgtgtgaatgacaactactggtttgggagggacaaaagctgtgaatattgctttgatgaaccactgctgaaaagaacagataaataccgaacatacagcaagaaacactttcggattttcagggaagtgggtcctaaaaactcttacattgcatacatagaagatcacagtggcaatggaacctttgtaaatacagagcttgtagggaaaggaaaacgccgtcctttgaataacaattctgaaattgcactgtcactaagcagaaataaagttttgtcttttttgatctgactgtagatgatcagtcagtttatcctaaggcattaagagatgaatacatcatgtcaaaaactcttggaagtggtgcctgtggagaggtaaagctggctttcgagaggaaaacatgtaagaaagtagccataaagatcatcagcaaaaggaagtttgctattggttcagcaagagaggcagacccagctctcaatgttgaaacagaaatagaaattttgaaaaagctaaatcatccttgcatcatcaagattaaaaacttttttgatgcagaagattattatattgttttggaattgatggaagggggagagctgtttgacaaagtggtggggaataaacgcctgaaagaagctacctgcaagctctatttttaccagatgctcttggctgtgcagtaccttcatgaaaacggtattatacaccgtgacttaaagccagagaatgttttactgtcatctcaagaagaggactgtcttataaagattactgattttgggcactccaagattttgggagagacctctctcatgagaaccttatgtggaacccccacctacttggcgcctgaagttcttgtttctgttgggactgctgggtataaccgtgctgtggactgctggagtttaggagttattctttttatctgccttagtgggtatccacctttctctgagcataggactcaagtgtcactgaaggatcagatcaccagtggaaaatacaacttcattcctgaagtctgggcagaagtctcagagaaagctctggaccttgtcaagaagttgttggtagtggatccaaaggcacgttttacgacagaagaagccttaagacacccgtggcttcaggatgaagacatgaagagaaagtttcaagatcttctgtctgaggaaaatgaatccacagctctaccccaggttctagcccagccttctactagtcgaaagcggccccgtgaaggggaagccgagggtgccgagaccacaaagcgcccagctgtgtgtgctgctgtgttgtgaactccgtggtttgaacacgaaagaaatgtaccttctttcactctgtcatctttcttttctttgagtctgtttttttatagtttgtattttaattatgggaataattgctttttcacagtcactgatgtacaattaaaaacctgatggaacctgg

SEQ ID NO: 382108 - DNA, 2456 bp, Homo sapiens
  misc_feature (2)..(2): n is a, c, g, or t
  misc_feature (4)..(4): n is a, c, g, or t
  misc_feature (7)..(11): n is a, c, g, or t
  misc_feature (263)..(263): n is a, c, g, or t
tncngcnnnnncttccgccagccagatccgtcctcccctctcgcaggccagacctcgacgtgtctctcgcccgggcccgtttcccgaaaccgtcgctcgtaccagtccataaggctgaagtagtctcgagtggggtcaggtgcctgcagcgctcggcactgtgggcagaagaacctgtcctcccgcccggggccccatgggccgccgcagttccaacagcggggataattgcttcccgcctgcgacgcagcatcgcagcttancggtctccttctgggaacccctgtcggccaaaacccccacacccggagcaaagccccggctctcccccgccacatctggccggcggcctatctagccgtggtcactcgtggggaaaagcaaagagagcgtctaaccagactaatgttgctgattggctggggagtcgagggggcgggatcacccgaggggaacccgggttctaagttccgctctcccttctaaactacaactcccaggaggcattgaggcggcgcctgacggccacatctgctgctcctcattggtccggcggcaggggagggggttttgattggctgagggtggagtttgtatctgcaggtttagcgccactctgctggctgaggctgcggagagtgtgcggctccaggtgggctcacgcggtcgtgatgtctcgggagtcggatgttgaggctcagcagtctcatggcagcagtgcctgttcacagccccatggcagcgttacccagtcccaaggctcctcctcacagtcccagggcatatccagctcctctaccagcacgatgccaaactccagccagtcctctcactccagctctgggacactgagctccttagagacagtgtccactcaggaactctattctattcctgaggaccaagaacctgaggaccaagaacctgaggagcctacccctgccccctgggctcgattatgggcccttcaggatggatttgccaatcttgaatgtgtgaatgacaactactggtttgggagggacaaaagctgtgaatattgctttgatgaaccactgctgaaaagaacagataaataccgaacatacagcaagaaacactttcggattttcagggaagtgggtcctaaaaactcttacattgcatacatagaagatcacagtggcaatggaacctttgtaaatacagagcttgtagggaaaggaaaacgccgtcctttgaataacaattctgaaattgcactgtcactaagcagaaataaagttttgtcttttttgatctgactgtagatgatcagtcagtttatcctaaggcattaagagatgaatacatcatgtcaaaaactcttggaagtggtgcctgtggagaggtaaagctggctttcgagaggaaaacatgtaagaaagtagccataaagatcatcagcaaaaggaagtttgctattggttcagcaagagaggcagacccagctctcaatgttgaaacagaaatagaaattttgaaaaagctaaatcatccttgcatcatcaagattaaaaacttttttgatgcagaagattattatattgttttggaattgatggaagggggagagctgtttgacaaagtggtggggaataaacgcctgaaagaagctacctgcaagctctatttttaccagatgctcttggctgtgcagtaccttcatgaaaacggtattatacaccgtgacttaaagccagagaatgttttactgtcatctcaagaagaggactgtcttataaagattactgattttgggcactccaagattttgggagagacctctctcatgagaaccttatgtggaacccccacctacttggcgcctgaagttcttgtttctgttgggactgctgggtataaccgtgctgtggactgctggagtttaggagttattctttttatctgccttagtgggtatccacctttctctgagcataggactcaagtgtcactgaaggatcagatcaccagtggaaaatacaacttcattcctgaagtctgggcagaagtctcagagaaagctctggaccttgtcaagaagttgttggtagtggatccaaaggcacgttttacgacagaagaagccttaagacacccgtggcttcaggatgaagacatgaagagaaagtttcaagatcttctgtctgaggaaaatgaatccacagctctaccccaggttctagcccagccttctactagtcgaaagcggccccgtgaaggggaagccgagggtgccgagaccacaaagcgcccagctgtgtgtgctgctgtgttgtgaactccgtggtttgaacacgaaagaaatgtaccttctttcactctgtcatctttcttttctttgagtctgtttttttatagtttgtattttaattatgggaataattgctttttcacagtcactgatgtacaattaaaaacctgatggaacctgg

SEQ ID NO: 382109 - DNA, 1766 bp, Homo sapiens
gctggtactggcccgaggtgttaggattgcggagagtgtgcggctccaggtgggctcacgcggtcgtgatgtctcgggagtcggatgttgaggctcagcagtctcatggcagcagtgcctgttcacagccccatggcagcgttacccagtcccaaggctcctcctcacagtcccagggcatatccagctcctctaccagcacgatgccaaactccagccagtcctctcactccagctctgggacactgagctccttagagacagtgtccactcaggaactctattctattcctgaggaccaagaacctgaggaccaagaacctgaggagcctacccctgccccctgggctcgattatgggcccttcaggatggatttgccaatcttgaatgtgtgaatgacaactactggtttgggagggacaaaagctgtgaatattgctttgatgaaccactgctgaaaagaacagataaataccgaacatacagcaagaaacactttcggattttcagggaagtgggtcctaaaaactcttacattgcatacatagaagatcacagtggcaatggaacctttgtaaatacagagcttgtagggaaaggaaaacgccgtcctttgaataacaattctgaaattgcactgtcactaagcagaaataaagttttgtcttttttgatctgactgtagatgatcagtcagtttatcctaaggcattaagagatgaatacatcatgtcaaaaactcttggaagtggtgcctgtggagaggtaaagctggctttcgagaggaaaacatgtaagaaagtagccataaagatcatcagcaaaaggaagtttgctattggttcagcaagagaggcagacccagctctcaatgttgaaacagaaatagaaattttgaaaaagctaaatcatccttgcatcatcaagattaaaaacttttttgatgcagaagattattatattgttttggaattgatggaagggggagagctgtttgacaaagtggtggggaataaacgcctgaaagaagctacctgcaagctctatttttaccagatgctcttggctgtgcagattactgattttgggcactccaagattttgggagagacctctctcatgagaaccttatgtggaacccccacctacttggcgcctgaagttcttgtttctgttgggactgctgggtataaccgtgctgtggactgctggagtttaggagttattctttttatctgccttagtgggtatccacctttctctgagcataggactcaagtgtcactgaaggatcagatcaccagtggaaaatacaacttcattcctgaagtctgggcagaagtctcagagaaagctctggaccttgtcaagaagttgttggtagtggatccaaaggcacgttttacgacagaagaagccttaagacacccgtggcttcaggatgaagacatgaagagaaagtttcaagatcttctgtctgaggaaaatgaatccacagctctaccccaggttctagcccagccttctactagtcgaaagcggccccgtgaaggggaagccgagggtgccgagaccacaaagcgcccagctgtgtgtgctgctgtgttgtgaactccgtggtttgaacacgaaagaaatgtaccttctttcactctgtcatctttcttttctttgagtctgtttttttatagtttgtattttaattatgggaataattgctttttcacagtcactgatgtacaattaaaaacctgatggaacctgg

SEQ ID NO: 382110 - DNA, 1820 bp, Homo sapiens
gctggtactggcccgaggtgttaggattgcggagagtgtgcggctccaggtgggctcacgcggtcgtgatgtctcgggagtcggatgttgaggctcagcagtctcatggcagcagtgcctgttcacagccccatggcagcgttacccagtcccaaggctcctcctcacagtcccagggcatatccagctcctctaccagcacgatgccaaactccagccagtcctctcactccagctctgggacactgagctccttagagacagtgtccactcaggaactctattctattcctgaggaccaagaacctgaggaccaagaacctgaggagcctacccctgccccctgggctcgattatgggcccttcaggatggatttgccaatcttgaatgtgtgaatgacaactactggtttgggagggacaaaagctgtgaatattgctttgatgaaccactgctgaaaagaacagataaataccgaacatacagcaagaaacactttcggattttcagggaagtgggtcctaaaaactcttacattgcatacatagaagatcacagtggcaatggaacctttgtaaatacagagcttgtagggaaaggaaaacgccgtcctttgaataacaattctgaaattgcactgtcactaagcagaaataaagttttgtcttttttgatctgactgtagatgatcagtcagtttatcctaaggcattaagagatgaatacatcatgtcaaaaactcttggaagtggtgcctgtggagaggtaaagctggctttcgagaggaaaacatgtaagaaagtagccataaagatcatcagcaaaaggaagtttgctattggttcagcaagagaggcagacccagctctcaatgttgaaacagaaatagaaattttgaaaaagctaaatcatccttgcatcatcaagattaaaaacttttttgatgcagaagattattatattgttttggaattgatggaagggggagagctgtttgacaaagtggtggggaataaacgcctgaaagaagctacctgcaagctctatttttaccagatgctcttggctgtgcagtaccttcatgaaaacggtattatacaccgtgacttaaagccagagaatgttttactgtcatctcaagaagaggactgtcttataaagattactgattttgggcactccaagattttgggagagacctctctcatgagaaccttatgtggaacccccacctacttggcgcctgaagttcttgtttctgttgggactgctgggtataaccgtgctgtggactgctggagtttaggagttattctttttatctggactcaagtgtcactgaaggatcagatcaccagtggaaaatacaacttcattcctgaagtctgggcagaagtctcagagaaagctctggaccttgtcaagaagttgttggtagtggatccaaaggcacgttttacgacagaagaagccttaagacacccgtggcttcaggatgaagacatgaagagaaagtttcaagatcttctgtctgaggaaaatgaatccacagctctaccccaggttctagcccagccttctactagtcgaaagcggccccgtgaaggggaagccgagggtgccgagaccacaaagcgcccagctgtgtgtgctgctgtgttgtgaactccgtggtttgaacacgaaagaaatgtaccttctttcactctgtcatctttcttttctttgagtctgtttttttatagtttgtattttaattatgggaataattgctttttcacagtcactgatgtacaattaaaaacctgatggaacctgg

SEQ ID NO: 382111 - DNA, 292 bp, Homo sapiens
tatgggaataattgctttttcacagtcactgatgtacaattaaaaacctgatggaacctggtgggctttgtgcttctgcttgataatcggttctttagttgaatggctttattatttatttatttgagatggagtctcactctgttgcccagcctgaatgaagtgcagtggtgcaggcttggctcactgcaacctctgcttcccaggttcaagcgattcttgtgcctcagcctcctgagtagctgggattacaggtatgcaccaccatgcctgttaatttttatatattttg

SEQ ID NO: 382112 - DNA, 2570 bp, Homo sapiens
  misc_feature (2)..(2): n is a, c, g, or t
  misc_feature (4)..(4): n is a, c, g, or t
  misc_feature (7)..(11): n is a, c, g, or t
  misc_feature (263)..(263): n is a, c, g, or t
tncngcnnnnncttccgccagccagatccgtcctcccctctcgcaggccagacctcgacgtgtctctcgcccgggcccgtttcccgaaaccgtcgctcgtaccagtccataaggctgaagtagtctcgagtggggtcaggtgcctgcagcgctcggcactgtgggcagaagaacctgtcctcccgcccggggccccatgggccgccgcagttccaacagcggggataattgcttcccgcctgcgacgcagcatcgcagcttancggtctccttctgggaacccctgtcggccaaaacccccacacccggagcaaagccccggctctcccccgccacatctggccggcggcctatctagccgtggtcactcgtggggaaaagcaaagagagcgtctaaccagactaatgttgctgattggctggggagtcgagggggcgggatcacccgaggggaacccgggttctaagttccgctctcccttctaaactacaactcccaggaggcattgaggcggcgcctgacggccacatctgctgctcctcattggtccggcggcaggggagggggttttgattggctgagggtggagtttgtatctgcaggtttagcgccactctgctggctgaggctgcggagagtgtgcggctccaggtgggctcacgcggtcgtgatgtctcgggagtcggatgttgaggctcagcagtctcatggcagcagtgcctgttcacagccccatggcagcgttacccagtcccaaggctcctcctcacagtcccagggcatatccagctcctctaccagcacgatgccaaactccagccagtcctctcactccagctctgggacactgagctccttagagacagtgtccactcaggaactctattctattcctgaggaccaagaacctgaggaccaagaacctgaggagcctacccctgccccctgggctcgattatgggcccttcaggatggatttgccaatcttgaatgtgtgaatgacaactactggtttgggagggacaaaagctgtgaatattgctttgatgaaccactgctgaaaagaacagataaataccgaacatacagcaagaaacactttcggattttcagggaagtgggtcctaaaaactcttacattgcatacatagaagatcacagtggcaatggaacctttgtaaatacagagcttgtagggaaaggaaaacgccgtcctttgaataacaattctgaaattgcactgtcactaagcagaaataaagagaaaatacttaaaatctactctctcagctgattttcaaaaatacggcggggcgcggtggctcacgtctttaatcccagcactttgggaggccgaggctggcagatcacctgagttttgtcttttttgatctgactgtagatgatcagtcagtttatcctaaggcattaagagatgaatacatcatgtcaaaaactcttggaagtggtgcctgtggagaggtaaagctggctttcgagaggaaaacatgtaagaaagtagccataaagatcatcagcaaaaggaagtttgctattggttcagcaagagaggcagacccagctctcaatgttgaaacagaaatagaaattttgaaaaagctaaatcatccttgcatcatcaagattaaaaacttttttgatgcagaagattattatattgttttggaattgatggaagggggagagctgtttgacaaagtggtggggaataaacgcctgaaagaagctacctgcaagctctatttttaccagatgctcttggctgtgcagtaccttcatgaaaacggtattatacaccgtgacttaaagccagagaatgttttactgtcatctcaagaagaggactgtcttataaagattactgattttgggcactccaagattttgggagagacctctctcatgagaaccttatgtggaacccccacctacttggcgcctgaagttcttgtttctgttgggactgctgggtataaccgtgctgtggactgctggagtttaggagttattctttttatctgccttagtgggtatccacctttctctgagcataggactcaagtgtcactgaaggatcagatcaccagtggaaaatacaacttcattcctgaagtctgggcagaagtctcagagaaagctctggaccttgtcaagaagttgttggtagtggatccaaaggcacgttttacgacagaagaagccttaagacacccgtggcttcaggatgaagacatgaagagaaagtttcaagatcttctgtctgaggaaaatgaatccacagctctaccccaggttctagcccagccttctactagtcgaaagcggccccgtgaaggggaagccgagggtgccgagaccacaaagcgcccagctgtgtgtgctgctgtgttgtgaactccgtggtttgaacacgaaagaaatgtaccttctttcactctgtcatctttcttttctttgagtctgtttttttatagtttgtattttaattatgggaataattgctttttcacagtcactgatgtacaattaaaaacctgatggaacctgg

SEQ ID NO: 382113 - DNA, 2367 bp, Homo sapiens
  misc_feature (1933)..(1934): n is a, c, g, or t
ggcacgaggggctccaggtgggctcacgcggtcgtgatgtctcgggagtcggatgttgaggctcagcagtctcatggcagcagtgcctgttcacagccccatggcagcgttacccagtcccaaggctcctcctcacagtcccagggcatatccagctcctctaccagcacgatgccaaactccagccagtcctctcactccagctctgggacactgagctccttagagacagtgtccactcaggaactctattctattcctgaggaccaagaacctgaggaccaagaacctgaggagcctacccctgccccctgggctcgattatgggcccttcaggatggatttgccaatcttgaatgtgtgaatgacaactactggtttgggagggacaaaagctgtgaatattgctttgatgaaccactgctgaaaagaacagataaataccgaacatacagcaagaaacactttcggattttcagggaagtgggtcctaaaaactcttacattgcatacatagaagatcacagtggcaatggaacctttgtaaatacagagcttgtagggaaaggaaaacgccgtcctttgaataacaattctgaaattgcactgtcactaagcagaaataaagttttgtcttttttgatctgactgtagatgatcagtcagtttatcctaaggcattaagagatgaatacatcatgtcaaaaactcttggaagtggtgcctgtggagaggtaaagctggctttcgagaggaaaacatgtaagaaagtagccataaagatcatcagcaaaaggaagtttgctattggttcagcaagagaggcagacccagctctcaatgttgaaacagaaatagaaattttgaaaaagctaaatcatccttgcatcatcaagattaaaaacttttttgatgcagaagattattatattgttttggaattgatggaagggggagagctgtttgacaaagtggtggggaataaacgcctgaaagaagctacctgcaagctctatttttaccagatgctcttggctgtgcagtaccttcatgaaaacggtattatacaccgtgacttaaagccagagaatgttttactgtcatctcaagaagaggactgtcttataaagattactgattttgggcactccaagattttgggagagacctctctcatgagaaccttatgtggaacccccacctacttggcgcctgaagttcttgtttctgttgggactgctgggtataaccgtgctgtggactgctggagtttaggagttattctttttatctgccttagtgggtatccacctttctctgagcataggactcaagtgtcactgaaggatcagatcaccagtggaaaatacaacttcattcctgaagtctgggcagaagtctcagagaaagctctggaccttgtcaagaagttgttggtagtggatccaaaggcacgttttacgacagaagaagccttaagacacccgtggcttcaggatgaagacatgaagagaaagtttcaagatcttctgtctgaggaaaatgaatccacagctctaccccaggttctagcccagccttctactagtcgaaagcggccccgtgaaggggaagccgagggtgccgagaccacaaagcgcccagctgtgtgtgctgctgtgttgtgaactccgtggtttgaacacgaaagaaatgtaccttctttcactctgtcatctttcttttctttgagtctgtttttttatagtttgtattttaattatgggaataattgctttttcacagtcactgatgtacaattaaaaacctgatggaacctggaaaaaaaaccaaaggatgagtatatgtcagggtcaaaggccaatgtaatggctcagttcaagtctaaagcccacgccccgggtaaaagacaagttgggcttctgtggccccnngcgggggaagtctgggggcccgttcctttagggggggggaaatcgagagccccctccctggctcagtgaccagggcgttggggggggggaggggttcagcttattaagggggatacggtttcccaactcagggaaacgccaaaaaacatggaccaaaggccccaagggggggacccataaagggcccttggttggtttttctaggctcccgcccccgggcttcaaaaatccgcttgatgagacgggcgaccccgagcgttataaataacgggtttcccctgaagtccttcccctctcaggcacacctcactaacgaaactgcacccttctcttgcaacagggcgtttcttctcacagggcgctcacgcgcgaaggccccccgaaacggcttgaacaccacccttacccacctatggtctctggactgcactgg

SEQ ID NO: 382114 - DNA, 1860 bp, Homo sapiens
ggcacgaggggctccaggtgggctcacgcggtcgtgatgtctcgggagtcggatgttgaggctcagcagtctcatggcagcagtgcctgttcacagccccatggcagcgttacccagtcccaaggctcctcctcacagtcccagggcatatccagctcctctaccagcacgatgccaaactccagccagtcctctcactccagctctgggacactgagctccttagagacagtgtccactcaggaactctattctattcctgaggaccaagaacctgaggaccaagaacctgaggagcctacccctgccccctgggctcgattatgggcccttcaggatggatttgccaatcttgaatgtgtgaatgacaactactggtttgggagggacaaaagctgtgaatattgctttgatgaaccactgctgaaaagaacagataaataccgaacatacagcaagaaacactttcggattttcagggaagtgggtcctaaaaactcttacattgcatacatagaagatcacagtggcaatggaacctttgtaaatacagagcttgtagggaaaggaaaacgccgtcctttgaataacaattctgaaattgcactgtcactaagcagaaataaagttttgtcttttttgatctgactgtagatgatcagtcagtttatcctaaggcattaagagatgaatacatcatgtcaaaaactcttggaagtggtgcctgtggagaggtaaagctggctttcgagaggaaaacatgtaagaaagtagccataaagatcatcagcaaaaggaagtttgctattggttcagcaagagaggcagacccagctctcaatgttgaaacagaaatagaaattttgaaaaagctaaatcatccttgcatcatcaagattaaaaacttttttgatgcagaagattattatattgttttggaattgatggaagggggagagctgtttgacaaagtggtggggaataaacgcctgaaagaagctacctgcaagctctatttttaccagatgctcttggctgtgcagtaccttcatgaaaacggtattatacaccgtgacttaaagccagagaatgttttactgtcatctcaagaagaggactgtcttataaagattactgattttgggcactccaagattttgggagagacctctctcatgagaaccttatgtggaacccccacctacttggcgcctgaagttcttgtttctgttgggactgctgggtataaccgtgctgtggactgctggagtttaggagttattctttttatctgccttagtgggtatccacctttctctgagcataggactcaagtgtcactgaaggatcagatcaccagtggaaaatacaacttcattcctgaagtctgggcagaagtctcagagaaagctctggaccttgtcaagaagttgttggtagtggatccaaaggcacgttttacgacagaagaagccttaagacacccgtggcttcaggatgaagacatgaagagaaagtttcaagatcttctgtctgaggaaaatgaatccacagctctaccccaggttctagcccagccttctactagtcgaaagcggccccgtgaaggggaagccgagggtgccgagaccacaaagcgcccagctgtgtgtgctgctgtgttgtgaactccgtggtttgaacacgaaagaaatgtaccttctttcactctgtcatctttcttttctttgagtctgtttttttatagtttgtattttaattatgggaataattgctttttcacagtcactgatgtacaattaaaaacctgatggaacctgggcctcgttggcctcagcggtggagctcgtcaggctggaa

SEQ ID NO: 382115 - DNA, 2643 bp, Homo sapiens
  misc_feature (2)..(2): n is a, c, g, or t
  misc_feature (4)..(4): n is a, c, g, or t
  misc_feature (7)..(11): n is a, c, g, or t
  misc_feature (263)..(263): n is a, c, g, or t
tncngcnnnnncttccgccagccagatccgtcctcccctctcgcaggccagacctcgacgtgtctctcgcccgggcccgtttcccgaaaccgtcgctcgtaccagtccataaggctgaagtagtctcgagtggggtcaggtgcctgcagcgctcggcactgtgggcagaagaacctgtcctcccgcccggggccccatgggccgccgcagttccaacagcggggataattgcttcccgcctgcgacgcagcatcgcagcttancggtctccttctgggaacccctgtcggccaaaacccccacacccggagcaaagccccggctctcccccgccacatctggccggcggcctatctagccgtggtcactcgtggggaaaagcaaagagagcgtctaaccagactaatgttgctgattggctggggagtcgagggggcgggatcacccgaggggaacccgggttctaagttccgctctcccttctaaactacaactcccaggaggcattgaggcggcgcctgacggccacatctgctgctcctcattggtccggcggcaggggagggggttttgattggctgagggtggagtttgtatctgcaggtttagcgccactctgctggctgaggctgcggagagtgtgcggctccaggtgggctcacgcgatactggatttcaccatggtgcccaggctggtcttgaattcctgggctcaagcaatctacctgcgttggcctcccaaagtgctgggattacagacatgaaccaccacacctggcagaacctttgtgaaagatctcaatttaatatggaaataaaaaaatttgtatgctgaggctgctaacgtctatggtcgtgatgtctcgggagtcggatgttgaggctcagcagtctcatggcagcagtgcctgttcacagccccatggcagcgttacccagtcccaaggctcctcctcacagtcccagggcatatccagctcctctaccagcacgatgccaaactccagccagtcctctcactccagctctgggacactgagctccttagagacagtgtccactcaggaactctattctattcctgaggaccaagaacctgaggaccaagaacctgaggagcctacccctgccccctgggctcgattatgggcccttcaggatggatttgccaatcttgaatgtgtgaatgacaactactggtttgggagggacaaaagctgtgaatattgctttgatgaaccactgctgaaaagaacagataaataccgaacatacagcaagaaacactttcggattttcagggaagtgggtcctaaaaactcttacattgcatacatagaagatcacagtggcaatggaacctttgtaaatacagagcttgtagggaaaggaaaacgccgtcctttgaataacaattctgaaattgcactgtcactaagcagaaataaagttttgtcttttttgatctgactgtagatgatcagtcagtttatcctaaggcattaagagatgaatacatcatgtcaaaaactcttggaagtggtgcctgtggagaggtaaagctggctttcgagaggaaaacatgtaagaaagtagccataaagatcatcagcaaaaggaagtttgctattggttcagcaagagaggcagacccagctctcaatgttgaaacagaaatagaaattttgaaaaagctaaatcatccttgcatcatcaagattaaaaacttttttgatgcagaagattattatattgttttggaattgatggaagggggagagctgtttgacaaagtggtggggaataaacgcctgaaagaagctacctgcaagctctatttttaccagatgctcttggctgtgcagtaccttcatgaaaacggtattatacaccgtgacttaaagccagagaatgttttactgtcatctcaagaagaggactgtcttataaagattactgattttgggcactccaagattttgggagagacctctctcatgagaaccttatgtggaacccccacctacttggcgcctgaagttcttgtttctgttgggactgctgggtataaccgtgctgtggactgctggagtttaggagttattctttttatctgccttagtgggtatccacctttctctgagcataggactcaagtgtcactgaaggatcagatcaccagtggaaaatacaacttcattcctgaagtctgggcagaagtctcagagaaagctctggaccttgtcaagaagttgttggtagtggatccaaaggcacgttttacgacagaagaagccttaagacacccgtggcttcaggatgaagacatgaagagaaagtttcaagatcttctgtctgaggaaaatgaatccacagctctaccccaggttctagcccagccttctactagtcgaaagcggccccgtgaaggggaagccgagggtgccgagaccacaaagcgcccagctgtgtgtgctgctgtgttgtgaactccgtggtttgaacacgaaagaaatgtaccttctttcactctgtcatctttcttttctttgagtctgtttttttatagtttgtattttaattatgggaataattgctttttcacagtcactgatgtacaattaaaaacctgatggaacctgg

SEQ ID NO: 382116 - DNA, 2131 bp, Homo sapiens
  misc_feature (2)..(2): n is a, c, g, or t
  misc_feature (4)..(4): n is a, c, g, or t
  misc_feature (7)..(11): n is a, c, g, or t
  misc_feature (263)..(263): n is a, c, g, or t
tncngcnnnnncttccgccagccagatccgtcctcccctctcgcaggccagacctcgacgtgtctctcgcccgggcccgtttcccgaaaccgtcgctcgtaccagtccataaggctgaagtagtctcgagtggggtcaggtgcctgcagcgctcggcactgtgggcagaagaacctgtcctcccgcccggggccccatgggccgccgcagttccaacagcggggataattgcttcccgcctgcgacgcagcatcgcagcttancggtctccttctgggaacccctgtcggccaaaacccccacacccggagcaaagccccggctctcccccgccacatctggccggcggcctatctagccgtggtcactcgtggggaaaagcaaagagagcgtctaaccagactaatgttgctgattggctggggagtcgagggggcgggatcacccgaggggaacccgggttctaagttccgctctcccttctaaactacaactcccaggaggcattgaggcggcgcctgacggccacatctgctgctcctcattggtccggcggcaggggagggggttttgattggctgagggtggagtttgtatctgcaggtttagcgccactctgctggctgaggctgcggagagtgtgcggctccaggtgggctcacgcgaatgtgtgaatgacaactactggtttgggagggacaaaagctgtgaatattgctttgatgaaccactgctgaaaagaacagataaataccgaacatacagcaagaaacactttcggattttcagggaagtgggtcctaaaaactcttacattgcatacatagaagatcacagtggcaatggaacctttgtaaatacagagcttgtagggaaaggaaaacgccgtcctttgaataacaattctgaaattgcactgtcactaagcagaaataaagttttgtcttttttgatctgactgtagatgatcagtcagtttatcctaaggcattaagagatgaatacatcatgtcaaaaactcttggaagtggtgcctgtggagaggtaaagctggctttcgagaggaaaacatgtaagaaagtagccataaagatcatcagcaaaaggaagtttgctattggttcagcaagagaggcagacccagctctcaatgttgaaacagaaatagaaattttgaaaaagctaaatcatccttgcatcatcaagattaaaaacttttttgatgcagaagattattatattgttttggaattgatggaagggggagagctgtttgacaaagtggtggggaataaacgcctgaaagaagctacctgcaagctctatttttaccagatgctcttggctgtgcagtaccttcatgaaaacggtattatacaccgtgacttaaagccagagaatgttttactgtcatctcaagaagaggactgtcttataaagattactgattttgggcactccaagattttgggagagacctctctcatgagaaccttatgtggaacccccacctacttggcgcctgaagttcttgtttctgttgggactgctgggtataaccgtgctgtggactgctggagtttaggagttattctttttatctgccttagtgggtatccacctttctctgagcataggactcaagtgtcactgaaggatcagatcaccagtggaaaatacaacttcattcctgaagtctgggcagaagtctcagagaaagctctggaccttgtcaagaagttgttggtagtggatccaaaggcacgttttacgacagaagaagccttaagacacccgtggcttcaggatgaagacatgaagagaaagtttcaagatcttctgtctgaggaaaatgaatccacagctctaccccaggttctagcccagccttctactagtcgaaagcggccccgtgaaggggaagccgagggtgccgagaccacaaagcgcccagctgtgtgtgctgctgtgttgtgaactccgtggtttgaacacgaaagaaatgtaccttctttcactctgtcatctttcttttctttgagtctgtttttttatagtttgtattttaattatgggaataattgctttttcacagtcactgatgtacaattaaaaacctgatggaacctgg

SEQ ID NO: 382117 - DNA, 1193 bp, Homo sapiens
cagtaagtttttccctttacactccttttattttttttaatctgacttaatattaaatgctatatttataggaggcattttatgtttaatttaaaagtaaaagatgcagaaatgattcttgtaagtttgctgtagtttggtaataccatttctttgcttttaaataactaaaccccaatatcaatctgcttgtcctccatttcacccccaacagggtgtatacatgggctggttaacagcatctggaagtggagcccggattcttgggcctatgttcatcagccaagtgtatgctcactggggaccacgatgggcattcagcctggtgtgtggaataatagtgctcaccatcaccctcctgggagtggtttacaaaagactcattgctctttctgtaagatatgggaggattcaggaataaactagctaagactgtgatggaaactacttgctgtgtggcacttcctggtctaaagctctgctagacaattgcggtgagccagtctccaagaatcagactacagatattgcagattttgaagaacaagaacatatgttgaataacagagagaattctacatgtcattgtgaatagtaggttatataaaaacatactagatgataatttccttacctcagaaatgaaatattattcttataatacctttttgtggttgcatgaactaatgagtgaatggacaatgatgaataaatgtgaagctgtattcttaatacccactgcagaagtgtcattaaaataatatacagtggaaccagaaagagggttctgtaagaattagccatagcagaacaaaattatagaattttaaatacctctacccaagtagaggtatttttattcagacacctactttttatttataaaaaaatgcattttctattatcaagttcacttatgaaataaaaattataacacatattttccatttagcgtgcctaacatcctaccctgccttctatgagtctttcttctaatactacacctctgccttattttagttcagggtttcactaagtaacccctacattaataaatgagtatggataatgctaatatttgagcaatacagaggattaagagatcaagatacttcactgcctattagcctaatagggatacctactttctttcaaatgccaaaaattcacattagaaacataatccagatgat

SEQ ID NO: 382118 - DNA, 2010 bp, Homo sapiens
tcaacccccttaaactggagaaaaacatttaattagtaaaacattaattaatttactttaatttttcccatctctcagtagtggcggggaggaacacaacagttttcaatctatgtctgcatagttgtgtagagctgcagaattttagttggatttttaatttggatgatccctgacagccccaaactagtcaggctaataagtatttgaggcaaaatggctttaatctaacaatttactgagtttacctgaagttggctaaataacactgtatgtttaacttctacctctacataagttgaatgctgataaaaggaactagtagataactatgtatattgataagcactgttaagaaaatgcaaaaatatttctaaacacttttccaaatgttttctactttaagttagaaatagtttcaaatctgagaataaacactatataatctgcactttataggttgggtgcagtgtctcatgcctgtaatcccagcactttggaaggccaaggcaggaggattgcttgaggccaggaattcaagaccagcctgggaaacaaagtgagaccctgtctttacaaaaaataaaaacaaaaatttaaaactgtataatctgcactttatgctaaactagctgtgctcttaaactcaattttttcagctctaataaagggcttaatttgatagaattattctacgattaaattttgaagactgttttcactctcctctgccgcccatagcaagactgcttccatagatttctcagaaccgtagccagttctggctatttggtcaagtctgggatccctcttacctgctattctgcagctgctttctctgtcttacattttttgggccacgtctaatcttaaagagtaaactctacccttggtttgcatagtgtgcatgacaaaaataacaagaataatggtaatgatgaaaatgataagagcaaaatttgtggagtgctttccacattccaggtaatgtgtaacatacaatttaattcttacagcagtcttatggagtgaaaatactattatgattcccgttttacagatgaaagaatggaggcacagaaaagttacttgtctaagtaacagtctatccttaaagtccacagtcttaaccacttgatttttcatagtgaggaaaatatcccagaaagttgcagtttcaattaatcactaattgtagggtaatttaactataccagtgagtcctactagcagaaatatttgggcaacataagcccactgactggagcttttgtcttagcataataacctgtttccagcaagaatataacagaaaaaagtttcccagctttcaaaggtttataatattgattaaaatttagataaacttaaccttacacaaatgactcttactttcctttttattgagagcattttctttggagcattttcttctttggaggattataccttgctcatcttggcacaaaagaaggcgaaaggaagtaacatgggattgggaaaagagcaaggagataaagtttgaggaaaaaaaatcaccatgttgatgtcttcttgagtaggccaagttgcgtataaagagaaaatgacaacaggagattttaaggtatgatatattgttaagagtagtacatatttaagaagagaaaatatgtttttgaaaacaaatttaaacttgaaaggatgattttcatattttgaagggatttataacttcacaaagcatctccattctatcttgttcagctttacatttaaaaataaactcttcttgttcatataaaccttatctcttacataaagtgaaatctgttaattttttgttttgacaaggataaactacttacctgcatctgtttaagaatagattaacttattttgagaagaaattctgggcaccatttttgaccattgaagacttatttgtaatttaatttctactttacattgtgaatgttcattttctaataaacaagattattttgcatatgtacaaaaaaaaaactttat

SEQ ID NO: 382119 - DNA, 1266 bp, Homo sapiens
accttggggaaatcaatttcccaaaatacagtgggaagatttgcacaataattcaatccctaataccacatttggggaaattattattggtctttggaagtctccaatggaagatgacaatgaaagaccaactggttgctcgattgaacaagcctggtgcctctacaccccggtgattcatctggcccagttccttacatcagctgtgctaataggattaggctatccagtctgcaatcttatgtcctatactctatattcaaaaattctaggaccaaaacctcagggtgtatacatgggctggttaacagcatctggaagtggagcccggattcttgggcctatgttcatcagccaagtgtatgctcactggggaccacgatgggcattcagcctggtgtgtggaataatagtgctcaccatcaccctcctgggagtggtttacaaaagactcattgctctttctgtaagatatgggaggattcaggaataaactagctaagactgtgatggaaactacttgctgtgtggcacttcctggtctaaagctctgctagacaattgcggttgggtgcagtgtctcatgcctgtaatcccagcactttggaaggccaaggcaggaggattgcttgaggccaggaattcaagaccagcctgggaaacaaacattttctttggagcattttcttctttggaggattataccttgctcatcttggcacaaaagaaggcgaaaggaagtaacatgggattgggaaaagagcaaggagataaagtttgaggaaaaaaaatcaccatgttgatgtcttcttgagtaggccaagttgcgtataaagagaaaatgacaacaggagattttaaggtatgatatattgttaagagtagtacatatttaagaagagaaaatatgtttttgaaaacaaatttaaacttgaaaggatgattttcatattttgaagggatttataacttcacaaagcatctccattctatcttgttcagctttacatttaaaaataaactcttcttgttcatataaaccttatctcttacataaagtgaaatctgttaattttttgttttgacaaggataaactacttacctgcatctgtttaagaatagattaacttattttgagaagaaattctgggcaccatttttgaccattgaagacttatttgtaatttaatttctactttacattgtgaatgttcattttctaataaacaagattattttgcatatgtacaaaaaaaaaactttat

SEQ ID NO: 382120 - DNA, 1194 bp, Homo sapiens
cagtaagtttttccctttacactccttttattttttttaatctgacttaatattaaatgctatatttataggaggcattttatgtttaatttaaaagtaaaagatgcagaaatgattcttgtaagtttgctgtagtttggtaataccatttctttgcttttaaataactaaaccccaatatcaatctgcttgtcctccatttcacccccaacagggtgtatacatgggctggttaacagcatctggaagtggagcccggattcttgggcctatgttcatcagccaagtgtatgctcactggggaccacgatgggcattcagcctggtgtgtggaataatagtgctcaccatcaccctcctgggagtggtttacaaaagactcattgctctttctgtaagatatgggaggattcaggaataaactagctaagactgtgatggaaactacttgctgtgtggcacttcctggtctaaagctctgctagacaattgcggttgggtgcagtgtctcatgcctgtaatcccagcactttggaaggccaaggcaggaggattgcttgaggccaggaattcaagaccagcctgggaaacaaacattttctttggagcattttcttctttggaggattataccttgctcatcttggcacaaaagaaggcgaaaggaagtaacatgggattgggaaaagagcaaggagataaagtttgaggaaaaaaaatcaccatgttgatgtcttcttgagtaggccaagttgcgtataaagagaaaatgacaacaggagattttaaggtatgatatattgttaagagtagtacatatttaagaagagaaaatatgtttttgaaaacaaatttaaacttgaaaggatgattttcatattttgaagggatttataacttcacaaagcatctccattctatcttgttcagctttacatttaaaaataaactcttcttgttcatataaaccttatctcttacataaagtgaaatctgttaattttttgttttgacaaggataaactacttacctgcatctgtttaagaatagattaacttattttgagaagaaattctgggcaccatttttgaccattgaagacttatttgtaatttaatttctactttacattgtgaatgttcattttctaataaacaagattattttgcatatgtacaaaaaaaaaactttat

SEQ ID NO: 382121 - DNA, 1501 bp, Homo sapiens
tcaacccccttaaactggagaaaaacatttaattagtaaaacattaattaatttactttaatttttcccatctctcagtagtggcggggaggaacacaacagttttcaatctatgtctgcatagttgtgtagagctgcagaattttagttggatttttaatttggatgatccctgacagccccaaactagtcaggctaataagtatttgaggcaaaatggctttaatctaacaatttactgagtttacctgaagttggctaaataacactgtatgtttaacttctacctctacataagttgaatgctgataaaaggaactagtagataactatgtatattgataagcactgttaagaaaatgcaaaaatatttctaaacacttttccaaatgttttctactttaagttagaaatagtttcaaatctgagaataaacactatataatctgcactttataggttgggtgcagtgtctcatgcctgtaatcccagcactttggaaggccaaggcaggaggattgcttgaggccaggaattcaagaccagcctgggaaacaaagtgagaccctgtctttacaaaaaataaaaacaaaaatttaaaactgtataatctgcactttatgctaaactagctgtgctcttaaactcaattttttcagctctaataaagggcttaatttgatagaattattctacgattaaattttgaagactgttttcactctcctctgccgcccatagcaagactgcttccatagatttctcagaaccgtagccagttctggctatttggtcaagtctgggatccctcttacctgctattctgcagctgctttctctgtcttacattttttgggccacgtctaatcttaaagagtaaactctacccttggtttgcatagtgtgcatgacaaaaataacaagaataatggtaatgatgaaaatgataagagcaaaatttgtggagtgctttccacattccaggtaatgtgtaacatacaatttaattcttacagcagtcttatggagtgaaaatactattatgattcccgttttacagatgaaagaatggaggcacagaaaagttacttgtctaagtaacagtctatccttaaagtccacagtcttaaccacttgatttttcatagtgaggaaaatatcccagaaagttgcagtttcaattaatcactaattgtagggtaatttaactataccagtgagtcctactagcagaaatatttgggcaacataagcccactgactggagctttggtttacctatatcctggtcccggcgaattttccgcaaaggttcccctttcaggtttcattgcttactttattcgttgcttacaggacccatcccctagggaacctccggacatccggggcccgccccttccagagaagactcggggtgcccgaatgtgacacccttttcttcccgtagccacgttatgttaccactatggtgtacctttatcgtagtattatttgttcc

SEQ ID NO: 382122 - DNA, 803 bp, Homo sapiens
accttggggaaatcaatttcccaaaatacagtgggaagatttgcacaataattcaatccctaataccacatttggggaaattattattggtctttggaagtctccaatggaagatgacaatgaaagaccaactggttgctcgattgaacaagcctggtgcctctacaccccggtgattcatctggcccagttccttacatcagctgtgctaataggattaggctatccagtctgcaatcttatgtcctatactctatattcaaaaattctaggaccaaaacctcagggtgtatacatgggctggttaacagcatctggaagtggagcccggattcttgggcctatgttcatcagccaagtgtatgctcactggggaccacgatgggcattcagcctggtgtgtggaataatagtgctcaccatcaccctcctgggagtggtttacaaaagactcattgctctttctgtaagatatgggaggattcaggaataaactagctaagactgtgatggaaactacttgctgtgtggcacttcctggtctaaagctctgctagacaattgcggtgagccagtctccaagaatcagactacagatattgcagattttgaagaacaagaacatatgttgaataacagagagaattctacatgtcattgtgaatagtaggttatataaaaacatactagatgataatttccttacctcagaaatgaaatattattcttataatacctttttgtggttgcatgaactaatgagtgaatggacaatgatgaataaatgtgaagctgtattctta

SEQ ID NO: 382123 - DNA, 1255 bp, Homo sapiens
cttaggagttaagttgctttccaaaaaatttgcacaataattcaatccctaataccacatttggggaaattattattggtctttggaagtctccaatggaagatgacaatgaaagaccaactggttgctcgattgaacaagcctggtgcctctacaccccggtgattcatctggcccagttccttacatcagctgtgctaataggattaggctatccagtctgcaatcttatgtcctatactctatattcaaaaattctaggaccaaaacctcagggtgtatacatgggctggttaacagcatctggaagtggagcccggattcttgggcctatgttcatcagccaagtgtatgctcactggggaccacgatgggcattcagcctggtgtgtggaataatagtgctcaccatcaccctcctgggagtggtttacaaaagactcattgctctttctgtaagatatgggaggattcaggaataaactagctaagactgtgatggaaactacttgctgtgtggcacttcctggtctaaagctctgctagacaattgcggttgggtgcagtgtctcatgcctgtaatcccagcactttggaaggccaaggcaggaggattgcttgaggccaggaattcaagaccagcctgggaaacaaacattttctttggagcattttcttctttggaggattataccttgctcatcttggcacaaaagaaggcgaaaggaagtaacatgggattgggaaaagagcaaggagataaagtttgaggaaaaaaaatcaccatgttgatgtcttcttgagtaggccaagttgcgtataaagagaaaatgacaacaggagattttaaggtatgatatattgttaagagtagtacatatttaagaagagaaaatatgtttttgaaaacaaatttaaacttgaaaggatgattttcatattttgaagggatttataacttcacaaagcatctccattctatcttgttcagctttacatttaaaaataaactcttcttgttcatataaaccttatctcttacataaagtgaaatctgttaattttttgttttgacaaggataaactacttacctgcatctgtttaagaatagattaacttattttgagaagaaattctgggcaccatttttgaccattgaagacttatttgtaatttaatttctactttacattgtgaatgttcattttctaataaacaagattattttgcatatgtacaaaaaaaaaactttat

SEQ ID NO: 382124 - DNA, 1969 bp, Homo sapiens
  misc_feature (157)..(157): n is a, c, g, or t
  misc_feature (1969)..(1969): n is a, c, g, or t
cgggaggctgaggaggcgctctttcctgatacgaggttacaggctggggtctgatgtgggggtggggggcatggtggggtctgctttctctgctgtattcttctgcaagggcgaaagggcgtgtggttgcgcctgaggaagatacttttctgtgttnggggttgtacattgccattccatttctcatcaaactatgtcctggaatacaggccaaactgattttcttgaatttcgtaagagttccctatttcattgatttgaaaaaaccacaggatcaaggtttgaatcacacgtgtaactactacctgcagccagaggaagacgtgaccattggagtctggcacaccgtccctgcagtctggtggaagaacgcccaaggcaaagaccagatgtggtatgaggatgccttggcttccagccaccctatcattctgtacctgcatgggaacgcaggtaccagaggaggcgaccaccgcgtggagctttacaaggtgctgagttcccttggttaccatgtggtcacctttgactacagaggttggggtgactcagtgggaacgccatctgagcggggcatgacctatgacgcactccacgtttttgactggatcaaagcaagaagtggtgacaaccccgtgtacatctggggccactctctgggcactggcgtggcgacaaatctggtgcggcgcctctgtgagcgagagacgcctccagatgcccttatattggaatctccattcactaatatccgcgaagaagctaagagccatccattttcagtgatatatcgatacttccctgggtttgactggttcttccttgatcctattacaagtagtggaattaaatttgcaaatgatgaaaacgtgaagcacatctcctgtcccctgctcatcctgcacgctgaggacgacccggtggtgcccttccagcttggcagaaagctctatagcatcgccgcaccagctcgaagcttccgagacttcaaagttcagtttgtgccctttcattcagaccttggctacaggcacaaatacatttacaagagccctgagctgccacggatactgagggaattcctggggaagtcggagcctgagcaccagcactgagcctggccgtgggaaggaagcatgaagacctctgccctcctcccgttttcctccagtcagcagcccggtatcctgaagccccagggggccggcacctgcaatgctcaggagcccagctcgcacctggagagcacctcagatcccaggtggggaggcccctgcaggcctgcagtgcccggaggcctgagcatggctgtgtggaaagcgtgggtggcaggcatgtggctctccttgccgcccctcaacctgagatcttgttgggagacttaatggcagcaggcagccatcactgcctggttgatgctgcactgagctggacagggggagtccgggcaggggactcttggggctcgggaccatgctgagctttttggcaccacccacagagaacgtggggtccaggttctttctgcaccttcccagcacatgcagaatgactccagtggttccatcgtcccctcctgccctgtgtacctgcttgcctttctcagctgccccacctcccctgggctggcccactcacccacagtggaagtgcccgggatctgcacttcctcccctttcacctacctgtacacctaacctggccttagactgagctttatttaagaataaaatcgtggtggtggtcaaaaaaaaacaaaacaagaaaaaaaaaaacaaaaaaaagaaacagaaaagcacaaccacaaagacgaggcgcgaaaaacccccgggggacccaggacaacacagtggacaagggcaagagacaaaaagcgggggacacaacaccgggaagcaacggccagagaaacccgcggcaagccccacagcgcggcaaagcgggcaccccggggcgtacacacccgaan

SEQ ID NO: 382125 - DNA, 1342 bp, Homo sapiens
  misc_feature (338)..(338): n is a, c, g, or t
  misc_feature (1342)..(1342): n is a, c, g, or t
ggttcctgggctccgggctctgggtggcggcggctgtgagcggcggcactgcggcgcaggccagcgggcgccgtcggcggctggccctgtcggccgcgggatgaggaagcggaccgagcccgtcgccttggagcatgagcgctgcgccgccgcgggctcgtcctcctccggctcggccgccgcggcgctggacgccgactgccgcctgaagcagaacctacgcctgacgggcccggcggcggctgagccgcgctgcgcagccgacgcgggaatgaagcgggcgctgggcaggcgaaagggcgtgtggttgcgcctgaggaagatacttttctgtgttnggggttgtacattgccattccatttctcatcaaactatgccctttcattcagaccttggctacaggcacaaatacatttacaagagccctgagctgccacggatactgagggaattcctggggaagtcggagcctgagcaccagcactgagcctggccgtgggaaggaagcatgaagacctctgccctcctcccgttttcctccagtcagcagcccggtatcctgaagccccagggggccggcacctgcaatgctcaggagcccagctcgcacctggagagcacctcagatcccaggtggggaggcccctgcaggcctgcagtgcccggaggcctgagcatggctgtgtggaaagcgtgggtggcaggcatgtggctctccttgccgcccctcaacctgagatcttgttgggagacttaatggcagcaggcagccatcactgcctggttgatgctgcactgagctggacagggggagtccgggcaggggactcttggggctcgggaccatgctgagctttttggcaccacccacagagaacgtggggtccaggttctttctgcaccttcccagcacatgcagaatgactccagtggttccatcgtcccctcctgccctgtgtacctgcttgcctttctcagctgccccacctcccctgggctggcccactcacccacagtggaagtgcccgggatctgcacttcctcccctttcacctacctgtacacctaacctggccttagactgagctttatttaagaataaaatcgtggtggtggtcaaaaaaaaacaaaacaagaaaaaaaaaaacaaaaaaaagaaacagaaaagcacaaccacaaagacgaggcgcgaaaaacccccgggggacccaggacaacacagtggacaagggcaagagacaaaaagcgggggacacaacaccgggaagcaacggccagagaaacccgcggcaagccccacagcgcggcaaagcgggcaccccggggcgtacacacccgaan

SEQ ID NO: 382126 - DNA, 1982 bp, Homo sapiens
  misc_feature (157)..(157): n is a, c, g, or t
cgggaggctgaggaggcgctctttcctgatacgaggttacaggctggggtctgatgtgggggtggggggcatggtggggtctgctttctctgctgtattcttctgcaagggcgaaagggcgtgtggttgcgcctgaggaagatacttttctgtgttnggggttgtacattgccattccatttctcatcaaactatgtcctggaatacaggccaaactgattttcttgaatttcgtaagagttccctatttcattgatttgaaaaaaccacaggatcaaggtttgaatcacacgtgtaactactacctgcagccagaggaagacgtgaccattggagtctggcacaccgtccctgcagtctggtggaagaacgcccaaggcaaagaccagatgtggtatgaggatgccttggcttccagccaccctatcattctgtacctgcatgggaacgcaggtaccagaggaggcgaccaccgcgtggagctttacaaggtgctgagttcccttggttaccatgtggtcacctttgactacagaggttggggtgactcagtgggaacgccatctgagcggggcatgacctatgacgcactccacgtttttgactggatcaaagcaagaagtggtgacaaccccgtgtacatctggggccactctctgggcactggcgtggcgacaaatctggtgcggcgcctctgtgagcgagagacgcctccagatgcccttatattggaatctccattcactaatatccgcgaagaagctaagagccatccattttcagtgatatatcgatacttccctgggtttgactggttcttccttgatcctattacaagtagtggaattaaatttgcaaatgatgaaaacgtgaagcacatctcctgtcccctgctcatcctgcacgctgaggacgacccggtggtgcccttccagcttggcagaaagctctatagcatcgccgcaccagctcgaagcttccgagacttcaaagttcagtttgtgccctttcattcagaccttggctacaggcacaaatacatttacaagagccctgagctgccacggatactgagggaattcctggggaagtcggagcctgagcaccagcactgagcctggccgtgggaaggaagcatgaagacctctgccctcctcccgttttcctccagtcagcagcccggtatcctgaagccccagggggccggcacctgcaatgctcaggagcccagctcgcacctggagagcacctcagatcccagacctcagcagggcccaggttccagcccagatcccagcatgtggtcagagctggtgtgactgaagccaacaggtgacacggtcatcgaagagcagcagacaaaactaacccaaaggcagctgaaagtggagggcaggtgaattcccagccctcgccggattcaacttttgccaacggtgaagaactgccctgagctgcaaaccttacaaagtctgtaactctagataaaccataccatgtgctaactgcactgaaataaaacactaactacattataatgtcaaaacacccccaccaccacccccccccccccaccctcaccacccccacacacaccacacccccacccaacaccccaccccaccccaccccaacacactccacaagactcagctcctacctctcttcccctctccctaccgtacccactacccccctctctatcacctcaccaccaccaccaccctatccacacccgcccctacctaccctcccccaccagcctcatcacacccacatcaccctcatctcaggcaccagacagatctgctcatcctactgcagtcactctaacgcccactatctctctcctccccaccgcataactcctacatactacacccgcaccacccactcactcccactactttctcaccaaccccgccgccatgctcacccatctctcccgccacgcgtaccctactccccacccccctgcccca

SEQ ID NO: 382127 - DNA, 1746 bp, Homo sapiens
  misc_feature (157)..(157): n is a, c, g, or t
cgggaggctgaggaggcgctctttcctgatacgaggttacaggctggggtctgatgtgggggtggggggcatggtggggtctgctttctctgctgtattcttctgcaagggcgaaagggcgtgtggttgcgcctgaggaagatacttttctgtgttnggggttgtacattgccattccatttctcatcaaactatgtcctggaatacaggccaaactgattttcttgaatttcgtaagagttccctatttcattgatttgaaaaaaccacaggatcaaggtttgaatcacacgtgtaactactacctgcagccagaggaagacgtgaccattggagtctggcacaccgtccctgcagtctggtggaagaacgcccaaggcaaagaccagatgtggtatgaggatgccttggcttccagccaccctatcattctgtacctgcatgggaacgcaggtaccagaggaggcgaccaccgcgtggagctttacaaggtgctgagttcccttggttaccatgtggtcacctttgactacagaggttggggtgactcagtgggaacgccatctgagcggggcatgacctatgacgcactccacgtttttgactggatcaaagcaagaagtggtgacaaccccgtgtacatctggggccactctctgggcactggcgtggcgacaaatctggtgcggcgcctctgtgagcgagagacgcctccagatgcccttatattggaatctccattcactaatatccgcgaagaagctaagagccatccattttcagtgatatatcgatacttccctgggtttgactggttcttccttgatcctattacaagtagtggaattaaatttgcaaatgatgaaaacgtgaagcacatctcctgtcccctgctcatcctgcacgctgaggacgacccggtggtgcccttccagcttggcagaaagctctatagcatcgccgcaccagctcgaagcttccgagacttcaaagttcagtttgtgccctttcattcagaccttggctacaggcacaaatacatttacaagagccctgagctgccacggatactgagggaattcctggggaagtcggagcctgagcaccagcactgagcctggccgtgggaaggaagcatgaagacctctgccctcctcccgttttcctccagtcagcagcccggtatcctgaagccccagggggccggcacctgcaatgctcaggagcccagctcgcacctggagagcacctcagatcccaggtggggaggcccctgcaggcctgcagtgcccggaggcctgagcatggctgtgtggaaagcgtgggtggcaggcatgtggctctccttgccgcccctcaacctgagatcttgttgggagacttaatggcagcaggcagccatcactgcctggttgatgctgcactgagctggacagggggagtccgggcaggggactcttggggctcgggaccatgctgagctttttggcaccacccacagagaacgtggggtccaggttctttctgcaccttcccagcacatgcagaatgactccagtggttccatcgtcccctcctgccctgtgtacctgcttgcctttctcagctgccccacctcccctgggctggcccactcacccacagtggaagtgcccgggatctgcacttcctcccctttcacctacctgtacacctaacctggccttagactgagctttatttaagaataaaatcgtggtggtggtc

SEQ ID NO: 382128 - DNA, 1322 bp, Homo sapiens
  misc_feature (1322)..(1322): n is a, c, g, or t
gccacatgtatgtcgctggcttcctgcctacctctcagttccctgtttgtttatctagagacgcctccagatgcccttatattggaatctccattcactaatatccgcgaagaagctaagagccatccattttcagtgatatatcgatacttccctgggtttgactggttcttccttgatcctattacaagtagtggaattaaatttgcaaatgatgaaaacgtgaagcacatctcctgtcccctgctcatcctgcacgctgaggacgacccggtggtgcccttccagcttggcagaaagctctatagcatcgccgcaccagctcgaagcttccgagacttcaaagttcagtttgtgccctttcattcagaccttggctacaggcacaaatacatttacaagagccctgagctgccacggatactgagggaattcctggggaagtcggagcctgagcaccagcactgagcctggccgtgggaaggaagcatgaagacctctgccctcctcccgttttcctccagtcagcagcccggtatcctgaagccccagggggccggcacctgcaatgctcaggagcccagctcgcacctggagagcacctcagatcccaggtggggaggcccctgcaggcctgcagtgcccggaggcctgagcatggctgtgtggaaagcgtgggtggcaggcatgtggctctccttgccgcccctcaacctgagatcttgttgggagacttaatggcagcaggcagccatcactgcctggttgatgctgcactgagctggacagggggagtccgggcaggggactcttggggctcgggaccatgctgagctttttggcaccacccacagagaacgtggggtccaggttctttctgcaccttcccagcacatgcagaatgactccagtggttccatcgtcccctcctgccctgtgtacctgcttgcctttctcagctgccccacctcccctgggctggcccactcacccacagtggaagtgcccgggatctgcacttcctcccctttcacctacctgtacacctaacctggccttagactgagctttatttaagaataaaatcgtggtggtggtcaaaaaaaaacaaaacaagaaaaaaaaaaacaaaaaaaagaaacagaaaagcacaaccacaaagacgaggcgcgaaaaacccccgggggacccaggacaacacagtggacaagggcaagagacaaaaagcgggggacacaacaccgggaagcaacggccagagaaacccgcggcaagccccacagcgcggcaaagcgggcaccccggggcgtacacacccgaan

SEQ ID NO: 382129 - DNA, 1796 bp, Homo sapiens
  misc_feature (157)..(157): n is a, c, g, or t
cgggaggctgaggaggcgctctttcctgatacgaggttacaggctggggtctgatgtgggggtggggggcatggtggggtctgctttctctgctgtattcttctgcaagggcgaaagggcgtgtggttgcgcctgaggaagatacttttctgtgttnggggttgtacattgccattccatttctcatcaaactatgtcctggaatacaggccaaactgattttcttgaatttcgtaagagttccctatttcattgatttgaaaaaaccacaggatcaaggtttgaatcacacgtgtaactactacctgcagccagaggaagacgtgaccattggagtctggcacaccgtccctgcagtctggtggaagaacgcccaaggcaaagaccagatgtggtatgaggatgccttggcttccagccaccctatcattctgtacctgcatgggaacgcaggtaccagaggaggcgaccaccgcgtggagctttacaaggtgctgagttcccttggttaccatgtggtcacctttgactacagaggttggggtgactcagtgggaacgccatctgagcggggcatgacctatgacgcactccacgtttttgactggatcaaagcaagaagtggtgacaaccccgtgtacatctggggccactctctgggcactggcgtggcgacaaatctggtgcggcgcctctgtgagcgagagacgcctccagatgcccttatattggaatctccattcactaatatccgcgaagaagctaagagccatccattttcagtgatatatcgatacttccctgggtttgactggttcttccttgatcctattacaagtagtggaattaaatttgcaaatgatgaaaacgtgaagcacatctcctgtcccctgctcatcctgcacgctgaggacgacccggtggtgcccttccagcttggcagaaagctctatagcatcgccgcaccagctcgaagcttccgagacttcaaagttcagtttgtgccctttcattcagaccttggctacaggcacaaatacatttacaagagccctgagctgccacggatactgagacctcagcagggcccaggttccagcccagatcccagcatgtggtcagagctggtgtgactgaagccaacaggtgacacggtcatcgaagagcagcagacaaaactaacccaaaggcagctgaaagtggagggcaggtgaattcccagccctcgccggattcaacttttgccaacggtgaagaactgccctgagctgcaaaccttacaaagtctgtaactctagataaaccataccatgtgctaactgcactgaaataaaacactaactacattataatgtcaaaacacccccaccaccacccccccccccccaccctcaccacccccacacacaccacacccccacccaacaccccaccccaccccaccccaacacactccacaagactcagctcctacctctcttcccctctccctaccgtacccactacccccctctctatcacctcaccaccaccaccaccctatccacacccgcccctacctaccctcccccaccagcctcatcacacccacatcaccctcatctcaggcaccagacagatctgctcatcctactgcagtcactctaacgcccactatctctctcctccccaccgcataactcctacatactacacccgcaccacccactcactcccactactttctcaccaaccccgccgccatgctcacccatctctcccgccacgcgtaccctactccccacccccctgcccca

SEQ ID NO: 382130 - DNA, 461 bp, Homo sapiens
accttaccttcctaaatagctagaactacaagcgtgtgccaccatacctggctagtattttcattttttgtagatacaaggtctcaatatgttccccaggcttgaaataagtgcattttaaaatacatgcgttggaaagatattagagttataaagagtcaatttgcaaatttcgtctgcttgacaatgtcatacaggtcaaaatcctcaaatcatgagatttatgtgtcctacatgtactggacaaagaaaacaaattcttttcaagctattctcattaatggaattaactatcagaaggaaaatccaattatcagataattttttaggtggggctttggaagattattctgtgcttacatgtgaacatgaaattatgtcaggttctctaggcgtggtggctcacgcctgtagtcccagtgctttgggaggccaaggcgggcagatcacgaggtcaggag

SEQ ID NO: 382131 - DNA, 114 bp, Homo sapiens
ctgcagaagtcattttcagttgttctctgactcccgtaaacaacaattcctgtcgccttatccttttgatgcctggttccacttctatattttcacttggacatgattctcact

SEQ ID NO: 382132 - DNA, 862 bp, Homo sapiens
ctagacatgtggagaagatcaaatgaggtattgagtgtgtgagctgtgttaggctggctcctactctctccccttgcactagcagaaccagtgcccagtcagatacttgggaagggctgaaggagggtctcacctgtgcccagaaataagtccagacagctgagagatgggtgccactcttcctgggtaatgccatacttgaaaggtagtgtgccccttctcatggatcctgcaccctcctaaggccccagctgctgctggtgggctgaagaccatgatggactaagcaacactgtcccaacagaaaagtggagaattccctctctacctacaatagaattatcctaactcaggttgttagtacccaattgtcacttgggccttgatgttttatgaagtttttacaaaacactgctttccatgttttttgttgatttgtgtatatttttgcatatagccgtttccaccggatttagatagtggagattgagccaggaggaaaagctgagtgacgagatggtgtgctattctcatttgttaatctctagtctgctaacacttttttcttaggaattgtctcccaggaaatttctgttaagccctgctttactatttcaacagacccatctacctatgtgattttttccccctggctcttgagtagctttttatttccttacagtatttttttttaataaacttttaggatggttttagatctacacaattattgcaaagatagtacagagtatcccatatgcactgtcccctattattaacatcttacattagtatggtacatttgtcactgttaaccaatattgatacattattattaactaaagtacgtactttatttgga

SEQ ID NO: 382133 - DNA, 2103 bp, Homo sapiens
ggtgcagaagtctgggcagctgcgggaggagaggtttgggaggcgcgggagatgtccaccctgggctggtggcgccgccgggcgccgggcgccatgagggtgcgctaggcggctgttcgtgcccgaggctgcgcagcactgaggtgagctttgccttcttgatcttccgtccttcttggagacgactggcgagaggaagagggactaggtccaaacgctaggtggctgggtccagccggagacccgcaccaaggaggagatcatcgagctcttggtccttgagcagtacctgaccatcatccctgaaaagctcaagccttgggtgcgagcaaaaaagccggagaactgtgagaagctcgtcactctgctggagaattacaaggagatgtaccaaccagaagacgacaacaacagtgacgtgaccagcgacgacgacatgacccggaacagaagagagtcctcaccacctcactcagtccattctttcagtgaccgggactgggaccggaggggcagaagcagagacatggagccacgagaccgctggtcccacaccaggaacccaagaagcaggatgcctccgcgggatctttcccttcctgtggtggcgaaaacaagctttgaaatggacagagaggacgacagggactccagggcttatgagtcccgatctcaggatgctgaatcataccaaaatgtggtggacctcgctgaggacaggaaacctcacaacacaatccaggacaacatggaaaactacaggaagctgctctccctcggtttccttgctcaggactctgtccctgcagaaaagaggaacacagagatgttagacaatctgccatctgctgggtcccagttcccggacttcaaacacttaggaacatttctggtgtttgaggagttggtgaccttcgaggatgtgcttgtggacttcagcccagaggaacttagttcccttagtgctgctcagagaaacctctacagggaggtgatgctggagaattaccggaacctggtctccctggggcaccagttctctaaacctgacattatctcacgcctggaagaggaggaatcatatgcaatggagacagacagcagacatacagtgatttgtcaaggagagtctcatgatgatccattggaaccacaccagggcaaccaagagaaacttttgactcctataacaatgaatgaccccaagaccctcactccggaaagaagctatggcagtgatgaatttgagagaagctctaatcttagtaaacaatcaaaggatcctctaggaaaggatccccaggaaggcactgctcctggaatatgtacgagtccccagtcagcatcccaagagaacaaacacaacagatgtgaattttgcaaacgaacctttagtacgcaagtagcccttaggagacacgaacggatccatactgggaagaaaccctatgaatgtaaacagtgtgctgaagccttctatctcatgccacacctcaacagacatcagaagacccattctggtaggaagacttctggctgcaatgaaggtagaaagccttccgtccagtgtgcgaatctctgtgaacgtgtaagaattcacagtcaggaggactactttgaatgttttcagtgcggcaaagcttttctccagaatgtgcatcttcttcaacatctcaaagcccatgaggcagcaagagtccttcctcctgggttgtcccacagcaagacatacttaattcgttatcagcggaaacatgactacgttggagagagagcctgccagtgttgtgactgtggcagagtcttcagtcggaattcatatctcattcagcattatagaactcacactcaagagaggccttaccagtgtcagctatgtgggaaatgtttcggccgaccctcatacctcactcaacattatcaactccattctcaagagaaaactgttgagtgcgatcactgttgagaaacctttagtcacagcacacacttttctcaacattattggcttcctcctagagtgttgtgagtgtgagaaggcctttcactagccccaccttgttaacaacttgaacattcatcaaagtgtggtaaaaaaaaaaa

SEQ ID NO: 382134 - DNA, 523 bp, Homo sapiens
  misc_feature (485)..(485): n is a, c, g, or t
accagcctggccaacatggtgaaactccatcgctactaaaaatacaaaaattagctgggcatgatggcaaatgattgtaatcccagctacccaggaggctgagggaggagaattgcttgaacccgggaggtggaggttgcagtgagctgagattgagccattgcatcgccagcctgggcgacacagccggactctgtctcaaaagaacaccgagtactgaccgacttaccaaaataatagaataaaatgtctagggccaggcgctaggtggctgggttcagccggagacccgcaccaaggaggagatcatcgagctcttggtccttgagcagtacctgaccatcatccctgaaaagctcaagccttgggtgcgagcaaaaaagccggagaactgtgagaagctcgtcactctgctggagaattacaaggagatgtaccaaccagaagacgacaacaacagtgacgtgaccgcgacgacgaagganctccaggggcttatgagtcccgatctccgatgctgaca

SEQ ID NO: 382135 - DNA, 8312 bp, Homo sapiens
ggtgcagaagtctgggcagctgcgggaggagaggtttgggaggcgcgggagatgtccaccctgggctggtggcgccgccgggcgccgggcgccatgagggtgcgctaggcggctgttcgtgcccgaggctgcgcagcactgaggtgagctttgccttcttgatcttccgtccttcttggagacgactggcgagaggaagagggactaggtccaaacgctaggtggctgggtccagccggagacccgcaccaaggaggagatcatcgagctcttggtccttgagcagtacctgaccatcatccctgaaaagctcaagccttgggtgcgagcaaaaaagccggagaactgtgagaagctcgtcactctgctggagaattacaaggagatgtaccaaccagaagacgacaacaacagtgacgtgaccagcgacgacgacatgacccggaacagaagagagtcctcaccacctcactcagtccattctttcagtgaccgggactgggaccggaggggcagaagcagagacatggagccacgagaccgctggtcccacaccaggaacccaagaagcaggatgcctccgcgggatctttcccttcctgtggtggcgaaaacaagctttgaaatggacagagaggacgacagggactccagggcttatgagtcccgatctcaggatgctgaatcataccaaaatgtggtggacctcgctgaggacaggaaacctcacaacacaatccaggacaacatggaaaactacaggaagctgctctccctcggtgcagcttgctgaagacgatggccactcccacatgacgcagggccactcatcaagatccaagagaagtgcctacccaagcaccagtcgaggtctaaaaactatgcctgaagccaaaaaatcaacccaccggcgggggatttgtgaagatgaatcttcccacggagtgataatggaaaaattcatcaaggatgtgtcacgcagttccaaatcgggaagagcaagggagtcaagcgaccggtcacagagattccccagaatgtcagatgataactggaaggacatttcattgaacaagagggagtcagtgatccagcagcgggtttatgaagggaatgcatttaggggaggctttaggtttaattcaacccttgtttccagaaagagagttcttgaaagaaagaggcgctatcattttgacacagatgggaagggctcgattcacgatcaaaaaggctgtcccaggaagaagccctttgaatgtggtagtgagatgagaaaagccatgagcgtgagcagcctgagcagcctcagctccccctcctttaccgagtcacagccaattgattttggggcaatgccatatgtatgtgatgagtgtgggaggtcgttcagtgtcatctcagaatttgttgagcaccagatcatgcatactagagagaacctctatgagtatggtgagtcctttatccacagtgtggctgtcagtgaagttcagaaaagtcaggttggagggaaacgttttgaatgtaaggactgtggagagaccttcaataagagtgccgccttggctgaacatcggaagattcatgctagaggttatcttgtggaatgtaagaatcaggaatgtgaggaagccttcatgcctagccccacctttagtgagcttcagaaaatatatggcaaagacaaattctacgagtgcagggtgtgtaaggaaaccttccttcatagttctgccctgattgagcaccagaaaatccactttggggatgacaaagataatgagcgtgaacatgaacgtgaacgtgaacgtgagcgcggggaaacctttaggcccagcccagcccttaatgagtttcagaaaatgtatggtaaagagaaaatgtacgaatgtaaggtgtgtggggagactttccttcatagctcatccctgaaagaacatcagaaaatccatactagagggaacccatttgaaaacaagggtaaagtgtgtgaggaaacctttattcctggtcagtcccttaaaaggcgtcagaaaacttacaataaggagaagctctgtgactttacagatggccgggatgccttcatgcaaagctcagagctcagtgagcatcagaaaattcattctcgaaagaacctctttgaaggcagagggtatgagaaatctgtcattcatagtgggccattcactgaatctcagaagagtcatactataacaagacctcttgaaagtgatgaggacgaaaaggcgttcaccattagctctaacccctatgaaaaccagaagattcccactaaggaaaatgtctatgaggcaaaatcatatgagaggtctgttattcatagcttagcctctgtggaagctcagaaaagtcacagtgtagcagggcccagtaaaccaaaagtaatggcagagtctaccattcagagcttcgatgctatcaaccatcagagagttcgtgctggagggaacacctctgaaggaagggaatacagtaggtctgttatccatagcttagtggcttccaaacctccaagaagtcacaatggaaatgaattggtggaatctaatgagaagggagaatcctccatttatatctcagaccttaatgataagcgacagaagattcctgccagagagaacccttgtgaagggggcagtaagaatcgcaactatgaagactctgtcatacagagtgtattccgtgccaaacctcagaaaagtgttcctggagagggatctggtgagtttaagaaggatggcgaattctctgttcccagctcaaatgtccgtgaataccagaaggctcgtgctaaaaagaaatacattgagcataggagcaatgagacctctgtaattcactctctgccttttggtgaacaaacatttcgccctcgagggatgctctatgaatgtcaggagtgtggggagtgctttgctcatagctctgacctcactgagcaccagaagattcatgatagggagaagccctctggaagcagaaactatgaatggtctgtcattcgcagcttggcccctactgaccctcaaacaagttacgcccaagagcagtatgctaaagagcaagcgcggaacaaatgtaaggacttcagacaattttttgctaccagcgaagacctcaacacaaaccagaaaatctatgaccaagagaagtctcatggcgaggagtctcaaggcgagaatactgatggggaggagacccacagcgaggagacccatggtcaggagacaattgaagaccctgtcattcaaggctcagacatggaagaccctcagaaggatgaccctgatgacaaaatctatgaatgtgaggactgtggcctgggctttgtggatctcacagacctcacagaccatcagaaagtccacagcaggaagtgcctggttgacagtcgggagtacacacattctgtaattcacacccattccatcagcgagtatcagagagattacactggagagcagctgtatgaatgtccaaagtgtggggaatcttttattcatagctcattccttttcgagcatcagagaatccatgaacaagaccagttgtattccatgaaggggtgtgatgatggttttattgccctcttgcccatgaagccacggaggaatcgtgctgcagagaggaatcctgctcttgctgggtcggccattcgatgccttttgtgtggacaaggcttcattcatagctctgcccttaatgagcatatgagacttcatagggaagatgatttactggagcagagccagatggctgaggaagctatcattccaggcttagccctcactgagtttcagagaagtcagaccgaagagagactctttgaatgtgcagtctgtggagaatctttcgtcaacccagcagaacttgcagatcacgtaactgttcataagaatgagccctatgagtacgggtcctcctatactcacacctcatttcttactgagcccctcaaaggagctataccattctatgaatgcaaggattgtggtaagtcctttattcatagcacagtcctcactaaacataaggagcttcatctggaagaagaagaagaagatgaagcagcagcagctgcagcagcagcagcccaggaagttgaagccaatgtccatgttccacaagtagttctgaggattcagggcttaaacgtagaggctgctgagccagaagtggaggctgccgagccagaagtggaggctgctgagccagaagtggaggctgctgagccaaacggagaggctgaagggccagatggagaggctgcagagcccattggagaggctggacagccaaatggagaggccgagcagccaaatggggatgctgatgagccagatggtgcaggtattgaagacccagaagaaagagctgaagagccagagggaaaagctgaagagccagagggagatgccgacgagcctgacggtgtgggaattgaagacccagaagaaggtgaagatcaagagattcaggtagaagaaccatactatgactgccatgaatgcacagaaaccttcacttccagcacagcattcagtgaacacctgaaaactcatgccagcatgatcatatttgagcctgcaaatgcctttggggagtgctcaggctacatcgaacgtgccagcaccagcacaggtggtgccaatcaagctgatgagaagtacttcaaatgtgacgtctgtgggcagctcttcaatgaccgcctgtccctcgccagacaccagaatacccacactggctgagggcatggggtaaaggttagaaaaccttcacctaggacttgacccttaccaaaccacagagaatccaaaccaatccatgataatgtcagtaggagacttaaccttagtgtgttacacacctgacttaacatctctaaactcagattgaaaagagaccgaatgtgcagattccacagtcttaagctttccccttcagatgtcagtgtctgcatgtgggaaagccatagcacacatcttacctttccaagtaatcagattgagaaaaccctatgagtattccagactacagagtttgcccaaatcaactgtaaatgacacttgtgtaacgtatatatagtgtttcatgaggtgtatataaaatagcaaattatgacagaacagtgatcacatatatttggatttatatgatatacagttacagtttactctgcagaggtaccttacctggtattctttgaattttttttttttttggaggaggaagagagcaacaaatttgattatatttttaagtgtcttagatcctgagaaagatttattgtgcattatttgaaccctgtcaatatctttttgagtaattgttttgtttcttacccttaaatagtcttgtgaagctgtaggcatgatagataacatggcttttactccttactgtttgaaaagataagtactttagcttctttctgcagccatttcatctgcgccaacactttggaacctaatactgtgtaaggctttacaatatacggattggctttttgtgacccagattgattggttgccacatgttatgtttgttgaagtggttctcatgcaaaaatattacacatttgtgttctgggtttttttttttttttaaccaactcaatatgtgtttgatgatagtgaattgataaaacccgaagcttttccctgtaaatcttacatctttgcctttaaagaatgggttacaaccatcactagatcacagtagtgcctaatgaaggttgagaaccgtaggagaggctctcatgctgtaaataatgttgcaggctaataacctttcatcacttcctttgtgcgcttcctgccttaagtgacaagtagcaacatggcttgggtcccctgtgcagcatcagcttatgctgccacaagtcagtttgcaccctaggtgcccaggagctagtatccttagatctttctatcgctaacttaattctcttcgttatttatctgaccctctaactccatgtctaacttgcattaaaaaaaaaaaaattctttacagtcaacccaagcttaacatggactcaggttccccagcagccttaatttgttttgttaacatctgttccttctttttcagctctcctagagtatttctgagtgttgtgttcatctaatcttagtattcttttaattacaaattgacctcacagcttgaggtttcttgtgtcctattctgtggactacctgtgctcctttgcttcccctcccctcgcataataactatattaagaaattttttttggccttgagttggctggaaaaaaaatataaaatttaaaatacccactgggggaaatgtgtctgaatcttactcttctggatctgcaggattagggcttggaagtatgtcaaagatgcagggagtgtcaaagtttaggaagattgtagagctgagagcaagaagcagaaatgagtgagtcaaagaagggagtcctaatacatcaccagatctaggaggggagaggagacagacagaagaaaacaccagaggcaagaactgtagaaggccaggtttctgagaatgaattgagcggggtgtcctgagcagtttggaaaaggagtttttgatggtatggtgtaggtgagggctggctgcataggaaggactgaggttggaacggacatcgggaaagctgaggggcagtgaggtttactacatgggaaaaggactcttgaaacgagaatcagtgttgatgtcggggtgaactttgtgggtacattacttggtgttaacattgttggcagtggtagccccttttcagaaagcaacttgctgtaagtcagggtgtccgttccaaccttcagctagtgaaaaggtagtaacaaatggtaaacaagagaatgattgtttaaacctatctgtggacacttaatgcaactgtttaaaaatgataatcacgagttatgtagcaacgtggaaatatatttacagaacattaagtggagaaagcaggacacgaaagtatatttatactacagttataactcaacagttcatttatatgctgttcatttaacagttcatttaaacagttcattataactgtttaaaaatatatatgcttatagtcaaaagctgttgtggtgttgttgttgtaggcttatagttgagcattattttcttaaatttcttgaatgttctttatggtagtgttactaaaaagtttatgatcacattttcattgtgaacataatttgaactcattatcacacacttggaaaatacagaaaagtggaggaaaaaaaatcatatccccaccatccaaagacatatactctcctcttatcttgttcattcttgtttctgtgcacaggtttatgattataactgtgtcaaaatgtatattcaaaatagctgttacattacctttgtggaattatggttaaatactttcactttaattttttcaaatgttccctataataatgtcctgataacagtgtattatgtgtgtctccattggtgtgcataatacatacccagaggaaaaattagaaaataaagtaaattattttaaaaaattacctatattcccaacacctaacaactactgctaacatcttgatctgtttcctctatcttgtttcagtgcacacgcttgtgataacagtgttaaatatgtgtgcataaagtcttaaatgaaaagatgtggaaaataactaaaatagtgttgtcattgtgggaatttggttaaatattttgtctcaaattccttaaataatctttggtgttttggtaataaattttatgtatgtattttccattacaaatataatacatactcatacaaaactttggaaattcagtaaagaaaattcacacatattcccaacacccaacaacaattaactgttaacatcttgatctgtgcactagtctgtgattattagggtgttagtgataagtatgcataaatgtcaaagatgggaagaaagatgaaaaacaagaaatagttgtgtggttgttgtgggattatggttattttgtttcggtttccttgaaaggtcatcattctagtgttttggtagtccacctttactacatatatttccattatatatgaaatgtgttcattatagaaactttgaagttacagaaatgtagaagagaaactcacccatgttttcaccatccaaagagtgtggttaacatcttgatatattttcttcatcttgtttctgtgcacaggtttttggtttgttaatatggttgtggtcattctatctgtaatagtgtcaacaataaaaataaagttaaaaataaatatt

SEQ ID NO: 382136 - DNA, 8270 bp, Homo sapiens
ggtgcagaagtctgggcagctgcgggaggagaggtttgggaggcgcgggagatgtccaccctgggctggtggcgccgccgggcgccgggcgccatgagggtgcgctaggcggctgttcgtgcccgaggctgcgcagcactgaggtgagctttgccttcttgatcttccgtccttcttggagacgactggcgagaggaagagggactaggtccaaacgctaggtggctgggtccagccggagacccgcaccaaggaggagatcatcgagctcttggtccttgagcagtacctgaccatcatccctgaaaagctcaagccttgggtgcgagcaaaaaagccggagaactgtgagaagctcgtcactctgctggagaattacaaggagatgtaccaaccagaagacgacaacaacagtgacgtgaccagcgacgacgacatgacccggaacagaagagagtcctcaccacctcactcagtccattctttcagtgaccgggactgggaccggaggggcagaagcagagacatggagccacgagaccgctggtcccacaccaggaacccaagaagcaggatgcctccgcgggatctttcccttcctgtggtggcgaaaacaagctttgaaatggacagagaggacgacagggactccagggcttatgagtcccgatctcaggatgctgaatcataccaaaatgtggtggacctcgctgaggacaggaaacctcacaacacaatccaggacaacatggaaaactacaggaagctgctctccctcggtgcagcttgctgaagacgatggccactcccacatgacgcagggccactcatcaagatccaagagaagtgcctacccaagcaccagtcgaggtctaaaaactatgcctgaagccaaaaaatcaacccaccggcgggggatttgtgaagatgaatcttcccacggagtgataatggaaaaattcatcaaggatgtgtcacgcagttccaaatcgggaagagcaagggagtcaagcgaccggtcacagagattccccagaatgtcagatgataactggaaggacatttcattgaacaagagggagtcagtgatccagcagcgggtttatgaagggaatgcatttaggggaggctttaggtttaattcaacccttgtttccagaaagagagttcttgaaagaaagaggcgctatcattttgacacagatgggaagggctcgattcacgatcaaaaaggctgtcccaggaagaagccctttgaatgtggtagtgagatgagaaaagccatgagcgtgagcagcctgagcagcctcagctccccctcctttaccgagtcacagccaattgattttggggcaatgccatatgtatgtgatgagtgtgggaggtcgttcagtgtcatctcagaatttgttgagcaccagatcatgcatactagagagaacctctatgagtatggtgagtcctttatccacagtgtggctgtcagtgaagttcagaaaagtcaggttggagggaaacgttttgaatgtaaggactgtggagagaccttcaataagagtgccgccttggctgaacatcggaagattcatgctagaggttatcttgtggaatgtaagaatcaggaatgtgaggaagccttcatgcctagccccacctttagtgagcttcagaaaatatatggcaaagacaaattctacgagtgcagggtgtgtaaggaaaccttccttcatagttctgccctgattgagcaccagaaaatccactttggggatgacaaagataatgagcgtgaacatgaacgtgaacgtgaacgtgagcgcggggaaacctttaggcccagcccagcccttaatgagtttcagaaaatgtatggtaaagagaaaatgtacgaatgtaaggtgtgtggggagactttccttcatagctcatccctgaaagaacatcagaaaatccatactagagggaacccatttgaaaacaagggtaaagtgtgtgaggaaacctttattcctggtcagtcccttaaaaggcgtcagaaaacttacaataaggagaagctctgtgactttacagatggccgggatgccttcatgcaaagctcagagctcagtgagcatcagaaaattcattctcgaaagaacctctttgaaggcagagggtatgagaaatctgtcattcatagtgggccattcactgaatctcagaagagtcatactataacaagacctcttgaaagtgatgaggacgaaaaggcgttcaccattagctctaacccctatgaaaaccagaagattcccactaaggaaaatgtctatgaggcaaaatcatatgagaggtctgttattcatagcttagcctctgtggaagctcagaaaagtcacagtgtagcagggcccagtaaaccaaaagtaatggcagagtctaccattcagagcttcgatgctatcaaccatcagagagttcgtgctggagggaacacctctgaaggaagggaatacagtaggtctgttatccatagcttagtggcttccaaacctccaagaagtcacaatggaaatgaattggtggaatctaatgagaagggagaatcctccatttatatctcagaccttaatgataagcgacagaagattcctgccagagagaacccttgtgaagggggcagtaagaatcgcaactatgaagactctgtcatacagagtgtattccgtgccaaacctcagaaaagtgttcctggagagggatctggtgagtttaagaaggatggcgaattctctgttcccagctcaaatgtccgtgaataccagaaggctcgtgctaaaaagaaatacattgagcataggagcaatgagacctctgtaattcactctctgccttttggtgaacaaacatttcgccctcgagggatgctctatgaatgtcaggagtgtggggagtgctttgctcatagctctgacctcactgagcaccagaagattcatgatagggagaagccctctggaagcagaaactatgaatggtctgtcattcgcagcttggcccctactgaccctcaaacaagttacgcccaagagcagtatgctaaagagcaagcgcggaacaaatgtaaggacttcagacaattttttgctaccagcgaagacctcaacacaaaccagaaaatctatgaccaagagaagtctcatggcgaggagtctcaaggcgagaatactgatggggaggagacccacagcgaggagacccatggtcaggagacaattgaagaccctgtcattcaaggctcagacatggaagaccctcagaaggatgaccctgatgacaaaatctatgaatgtgaggactgtggcctgggctttgtggatctcacagacctcacagaccatcagaaagtccacagcaggaagtgcctggttgacagtcgggagtacacacattctgtaattcacacccattccatcagcgagtatcagagagattacactggagagcagctgtatgaatgtccaaagtgtggggaatcttttattcatagctcattccttttcgagcatcagagaatccatgaacaagaccagttgtattccatgaaggggtgtgatgatggttttattgccctcttgcccatgaagccacggaggaatcgtgctgcagagaggaatcctgctcttgctgggtcggccattcgatgccttttgtgtggacaaggcttcattcatagctctgcccttaatgagcatatgagacttcatagggaagatgatttactggagcagagccagatggctgaggaagctatcattccaggcttagccctcactgagtttcagagaagtcagaccgaagagagactctttgaatgtgcagtctgtggagaatctttcgtcaacccagcagaacttgcagatcacgtaactgttcataagaatgagccctatgagtacgggtcctcctatactcacacctcatttcttactgagcccctcaaaggagctataccattctatgaatgcaaggattgtggtaagtcctttattcatagcacagtcctcactaaacataaggagcttcatctggaagaagaagaagaagatgaagcagcagcagctgcagcagcagcagcccaggaagttgaagccaatgtccatgttccacaagtagttctgaggattcagggcttaaacgtagaggctgctgagccagaagtggaggctgccgagccagaagtggaggctgctgagccagaagtggaggctgctgagccaaacggagaggctgaagggccagatggagaggctgcagagcccattggagaggctggacagccaaatggagaggccgagcagccaaatggggatgctgatgagccagatggtgcaggtattgaagacccagaagaaagagctgaagagccagagggaaaagctgaagagccagagggagatgccgacgagcctgacggtgtgggaattgaagacccagaagaaggtgaagatcaagagattcaggtagaagaaccatactatgactgccatgaatgcacagaaaccttcacttccagcacagcattcagtgaacacctgaaaactcatgccagcatgatcatatttgagcctgcaaatgcctttggggagtgctcaggctacatcgaacgtgccagcaccagcacaggtggtgccaatcaagctgatgagaagtacttcaaatgtgacgtctgtgggcagctcttcaatgaccgcctgtccctcgccagacaccagaatacccacactggctgagggcatggggtaaaggttagaaaaccttcacctaggacttgacccttaccaaaccacagagaatccaaaccaatccatgataatgtcagtaggagacttaaccttagtgtgttacacacctgacttaacatctctaaactcagattgaaaagagaccgaatgtgcagattccacagtcttaagctttccccttcagatgtcagtgtctgcatgtgggaaagccatagcacacatcttacctttccaagtaatcagattgagaaaaccctatgagtattccagactacagagtttgcccaaatcaactgtaaatgacacttgtgtaacgtatatatagtgtttcatgaggtgtatataaaatagcaaattatgacagaacagtgatcacatatatttggatttatatgatatacagttacagtttactctgcagaggtaccttacctggtattctttgaattttttttttttttggaggaggaagagagcaacaaatttgattatatttttaagtgtcttagatcctgagaaagatttattgtgcattatttgaaccctgtcaatatctttttgagtaattgttttgtttcttacccttaaatagtcttgtgaagctgtaggcatgatagataacatggcttttactccttactgtttgaaaagataagtactttagcttctttctgcagccatttcatctgcgccaacactttggaacctaatactgtgtaaggctttacaatatacggattggctttttgtgacccagattgattggttgccacatgttatgtttgttgaagtggttctcatgcaaaaatattacacatttgtgttctgggtttttttttttttttaaccaactcaatatgtgtttgatgatagtgaattgataaaacccgaagcttttccctgtaaatcttacatctttgcctttaaagaatgggttacaaccatcactagatcacagtagtgcctaatgaaggttgagaaccgtaggagaggctctcatgctgtaaataatgttgcaggctaataacctttcatcacttcctttgtgcgcttcctgccttaagtgacaagtagcaacatggcttgggtcccctgtgcagcatcagcttatgctgccacaagtcagtttgcaccctaggtgcccaggagctagtatccttagatctttctatcgctaacttaattctcttcgttatttatctgaccctctaactccatgtctaacttgcattaaaaaaaaaaaaattctttacagtcaacccaagcttaacatggactcaggttccccagcagccttaatttgttttgttaacatctgttccttctttttcagctctcctagagtatttctgagtgttgtgttcatctaatcttagtattcttttaattacaaattgacctcacagcttgaggtttcttgtgtcctattctgtggactacctgtgctcctttgcttcccctcccctcgcataataactatattaagaaattttttttggccttgagttggctggaaaaaatcttactcttctggatctgcaggattagggcttggaagtatgtcaaagatgcagggagtgtcaaagtttaggaagattgtagagctgagagcaagaagcagaaatgagtgagtcaaagaagggagtcctaatacatcaccagatctaggaggggagaggagacagacagaagaaaacaccagaggcaagaactgtagaaggccaggtttctgagaatgaattgagcggggtgtcctgagcagtttggaaaaggagtttttgatggtatggtgtaggtgagggctggctgcataggaaggactgaggttggaacggacatcgggaaagctgaggggcagtgaggtttactacatgggaaaaggactcttgaaacgagaatcagtgttgatgtcggggtgaactttgtgggtacattacttggtgttaacattgttggcagtggtagccccttttcagaaagcaacttgctgtaagtcagggtgtccgttccaaccttcagctagtgaaaaggtagtaacaaatggtaaacaagagaatgattgtttaaacctatctgtggacacttaatgcaactgtttaaaaatgataatcacgagttatgtagcaacgtggaaatatatttacagaacattaagtggagaaagcaggacacgaaagtatatttatactacagttataactcaacagttcatttatatgctgttcatttaacagttcatttaaacagttcattataactgtttaaaaatatatatgcttatagtcaaaagctgttgtggtgttgttgttgtaggcttatagttgagcattattttcttaaatttcttgaatgttctttatggtagtgttactaaaaagtttatgatcacattttcattgtgaacataatttgaactcattatcacacacttggaaaatacagaaaagtggaggaaaaaaaatcatatccccaccatccaaagacatatactctcctcttatcttgttcattcttgtttctgtgcacaggtttatgattataactgtgtcaaaatgtatattcaaaatagctgttacattacctttgtggaattatggttaaatactttcactttaattttttcaaatgttccctataataatgtcctgataacagtgtattatgtgtgtctccattggtgtgcataatacatacccagaggaaaaattagaaaataaagtaaattattttaaaaaattacctatattcccaacacctaacaactactgctaacatcttgatctgtttcctctatcttgtttcagtgcacacgcttgtgataacagtgttaaatatgtgtgcataaagtcttaaatgaaaagatgtggaaaataactaaaatagtgttgtcattgtgggaatttggttaaatattttgtctcaaattccttaaataatctttggtgttttggtaataaattttatgtatgtattttccattacaaatataatacatactcatacaaaactttggaaattcagtaaagaaaattcacacatattcccaacacccaacaacaattaactgttaacatcttgatctgtgcactagtctgtgattattagggtgttagtgataagtatgcataaatgtcaaagatgggaagaaagatgaaaaacaagaaatagttgtgtggttgttgtgggattatggttattttgtttcggtttccttgaaaggtcatcattctagtgttttggtagtccacctttactacatatatttccattatatatgaaatgtgttcattatagaaactttgaagttacagaaatgtagaagagaaactcacccatgttttcaccatccaaagagtgtggttaacatcttgatatattttcttcatcttgtttctgtgcacaggtttttggtttgttaatatggttgtggtcattctatctgtaatagtgtcaacaataaaaataaagttaaaaataaatatt

SEQ ID NO: 382137 - DNA, 8809 bp, Homo sapiens
ggtgcagaagtctgggcagctgcgggaggagaggtttgggaggcgcgggagatgtccaccctgggctggtggcgccgccgggcgccgggcgccatgagggtgcgctaggcggctgttcgtgcccgaggctgcgcagcactgaggtgagctttgccttcttgatcttccgtccttcttggagacgactggcgagaggaagagggactaggtccaaacgctaggtggctgggtccagccggagacccgcaccaaggaggagatcatcgagctcttggtccttgagcagtacctgaccatcatccctgaaaagctcaagccttgggtgcgagcaaaaaagccggagaactgtgagaagctcgtcactctgctggagaattacaaggagatgtaccaaccagaagacgacaacaacagtgacgtgaccagcgacgacgacatgacccggaacagaagagagtcctcaccacctcactcagtccattctttcagtgaccgggactgggaccggaggggcagaagcagagacatggagccacgagaccgctggtcccacaccaggaacccaagaagcaggatgcctccgcgggatctttcccttcctgtggtggcgaaaacaagctttgaaatggacagagaggacgacagggactccagggcttatgagtcccgatctcaggatgctgaatcataccaaaatgtggtggacctcgctgaggacaggaaacctcacaacacaatccaggacaacatggaaaactacaggaagctgctctccctcggtgcagcttgctgaagacgatggccactcccacatgacgcagggccactcatcaagatccaagagaagtgcctacccaagcaccagtcgaggtctaaaaactatgcctgaagccaaaaaatcaacccaccggcgggggatttgtgaagatgaatcttcccacggagtgataatggaaaaattcatcaaggatgtgtcacgcagttccaaatcgggaagagcaagggagtcaagcgaccggtcacagagattccccagaatgtcagatgataactggaaggacatttcattgaacaagagggagtcagtgatccagcagcgggtttatgaagggaatgcatttaggggaggctttaggtttaattcaacccttgtttccagaaagagagttcttgaaagaaagaggcgctatcattttgacacagatgggaagggctcgattcacgatcaaaaaggctgtcccaggaagaagccctttgaatgtggtagtgagatgagaaaagccatgagcgtgagcagcctgagcagcctcagctccccctcctttaccgagtcacagccaattgattttggggcaatgccatatgtatgtgatgagtgtgggaggtcgttcagtgtcatctcagaatttgttgagcaccagatcatgcatactagagagaacctctatgagtatggtgagtcctttatccacagtgtggctgtcagtgaagttcagaaaagtcaggttggagggaaacgttttgaatgtaaggactgtggagagaccttcaataagagtgccgccttggctgaacatcggaagattcatgctagaggttatcttgtggaatgtaagaatcaggaatgtgaggaagccttcatgcctagccccacctttagtgagcttcagaaaatatatggcaaagacaaattctacgagtgcagggtgtgtaaggaaaccttccttcatagttctgccctgattgagcaccagaaaatccactttggggatgacaaagataatgagcgtgaacatgaacgtgaacgtgaacgtgagcgcggggaaacctttaggcccagcccagcccttaatgagtttcagaaaatgtatggtaaagagaaaatgtacgaatgtaaggtgtgtggggagactttccttcatagctcatccctgaaagaacatcagaaaatccatactagagggaacccatttgaaaacaagggtaaagtgtgtgaggaaacctttattcctggtcagtcccttaaaaggcgtcagaaaacttacaataaggagaagctctgtgactttacagatggccgggatgccttcatgcaaagctcagagctcagtgagcatcagaaaattcattctcgaaagaacctctttgaaggcagagggtatgagaaatctgtcattcatagtgggccattcactgaatctcagaagagtcatactataacaagacctcttgaaagtgatgaggacgaaaaggcgttcaccattagctctaacccctatgaaaaccagaagattcccactaaggaaaatgtctatgaggcaaaatcatatgagaggtctgttattcatagcttagcctctgtggaagctcagaaaagtcacagtgtagcagggcccagtaaaccaaaagtaatggcagagtctaccattcagagcttcgatgctatcaaccatcagagagttcgtgctggagggaacacctctgaaggaagggaatacagtaggtctgttatccatagcttagtggcttccaaacctccaagaagtcacaatggaaatgaattggtggaatctaatgagaagggagaatcctccatttatatctcagaccttaatgataagcgacagaagattcctgccagagagaacccttgtgaagggggcagtaagaatcgcaactatgaagactctgtcatacagagtgtattccgtgccaaacctcagaaaagtgttcctggagagggatctggtgagtttaagaaggatggcgaattctctgttcccagctcaaatgtccgtgaataccagaaggctcgtgctaaaaagaaatacattgagcataggagcaatgagacctctgtaattcactctctgccttttggtgaacaaacatttcgccctcgagggatgctctatgaatgtcaggagtgtggggagtgctttgctcatagctctgacctcactgagcaccagaagattcatgatagggagaagccctctggaagcagaaactatgaatggtctgtcattcgcagcttggcccctactgaccctcaaacaagttacgcccaagagcagtatgctaaagagcaagcgcggaacaaatgtaaggacttcagacaattttttgctaccagcgaagacctcaacacaaaccagaaaatctatgaccaagagaagtctcatggcgaggagtctcaaggcgagaatactgatggggaggagacccacagcgaggagacccatggtcaggagacaattgaagaccctgtcattcaaggctcagacatggaagaccctcagaaggatgaccctgatgacaaaatctatgaatgtgaggactgtggcctgggctttgtggatctcacagacctcacagaccatcagaaagtccacagcaggaagtgcctggttgacagtcgggagtacacacattctgtaattcacacccattccatcagcgagtatcagagagattacactggagagcagctgtatgaatgtccaaagtgtggggaatcttttattcatagctcattccttttcgagcatcagagaatccatgaacaagaccagttgtattccatgaaggggtgtgatgatggttttattgccctcttgcccatgaagccacggaggaatcgtgctgcagagaggaatcctgctcttgctgggtcggccattcgatgccttttgtgtggacaaggcttcattcatagctctgcccttaatgagcatatgagacttcatagggaagatgatttactggagcagagccagatggctgaggaagctatcattccaggcttagccctcactgagtttcagagaagtcagaccgaagagagactctttgaatgtgcagtctgtggagaatctttcgtcaacccagcagaacttgcagatcacgtaactgttcataagaatgagccctatgagtacgggtcctcctatactcacacctcatttcttactgagcccctcaaaggagctataccattctatgaatgcaaggattgtggtaagtcctttattcatagcacagtcctcactaaacataaggagcttcatctggaagaagaagaagaagatgaagcagcagcagctgcagcagcagcagcccaggaagttgaagccaatgtccatgttccacaagtagttctgaggattcagggcttaaacgtagaggctgctgagccagaagtggaggctgccgagccagaagtggaggctgctgagccagaagtggaggctgctgagccaaacggagaggctgaagggccagatggagaggctgcagagcccattggagaggctggacagccaaatggagaggccgagcagccaaatggggatgctgatgagccagatggtgcaggtattgaagacccagaagaaagagctgaagagccagagggaaaagctgaagagccagagggagatgccgacgagcctgacggtgtgggaattgaagacccagaagaaggtgaagatcaagagattcaggtagaagaaccatactatgactgccatgaatgcacagaaaccttcacttccagcacagcattcagtgaacacctgaaaactcatgccagcatgatcatatttgagcctgcaaatgcctttggggagtgctcaggctacatcgaacgtgccagcaccagcacaggtggtgccaatcaagctgatgagaagtacttcaaatgtgacgtctgtgggcagctcttcaatgaccgcctgtccctcgccagacaccagaatacccacactggctgagggcatggggtaaaggttagaaaaccttcacctaggacttgacccttaccaaaccacagagaatccaaaccaatccatgataatgtcagtaggagacttaaccttagtgtgttacacacctgacttaacatctctaaactcagattgaaaagagaccgaatgtgcagattccacagtcttaagctttccccttcagatgtcagtgtctgcatgtgggaaagccatagcacacatcttacctttccaagtaatcagattgagaaaaccctatgagtattccagactacagagtttgcccaaatcaactgtaaatgacacttgtgtaacgtatatatagtgtttcatgaggtgtatataaaatagcaaattatgacagaacagtgatcacatatatttggatttatatgatatacagttacagtttactctgcagaggtaccttacctggtattctttgaattttttttttttttggaggaggaagagagcaacaaatttgattatatttttaagtgtcttagatcctgagaaagatttattgtgcattatttgaaccctgtcaatatctttttgagtaattgttttgtttcttacccttaaatagtcttgtgaagctgtaggcatgatagataacatggcttttactccttactgtttgaaaagataagtactttagcttctttctgcagccatttcatctgcgccaacactttggaacctaatactgtgtaaggctttacaatatacggattggctttttgtgacccagattgattggttgccacatgttatgtttgttgaagtggttctcatgcaaaaatattacacatttgtgttctgggtttttttttttttttaaccaactcaatatgtgtttgatgatagtgaattgataaaacccgaagcttttccctgtaaatcttacatctttgcctttaaagaatgggttacaaccatcactagatcacagtagtgcctaatgaaggttgagaaccgtaggagaggctctcatgctgtaaataatgttgcaggctaataacctttcatcacttcctttgtgcgcttcctgccttaagtgacaagtagcaacatggcttgggtcccctgtgcagcatcagcttatgctgccacaagtcagtttgcaccctaggtgcccaggagctagtatccttagatctttctatcgctaacttaattctcttcgttatttatctgaccctctaactccatgtctaacttgcattaaaaaaaaaaaaattctttacagtcaacccaagcttaacatggactcaggttccccagcagccttaatttgttttgttaacatctgttccttctttttcagctctcctagagtatttctgagtgttgtgttcatctaatcttagtattcttttaattacaaattgacctcacagcttgaggtttcttgtgtcctattctgtggactacctgtgctcctttgcttcccctcccctcgcataataactatattaagaaattttttttggccttgagttggctggaaaaaaaatataaaatttaaaaaatttaaaaaaaaagatttgcaaaatgtaagtgtagatcatttgaacaagcaaaattaaagtacccactgggggaaatgtgtctgaatcttactcttctggatctgcaggattagggcttggaagtatgtcaaagatgcagggagtgtcaaagtttaggaagattgtagagctgagagcaagaagcagaaatgagtgagtcaaagaagggagtcctaatacatcaccagatctaggaggggagaggagacagacagaagaaaacaccagaggcaagaactgtagaaggccaggtttctgagaatgaattgagcggggtgtcctgagcagtttggaaaaggagtttttgatggtatggtgtaggtgagggctggctgcataggaaggactgaggttggaacggacatcgggaaagctgaggggcagtgaggtttactacatgggaaaaggactcttgaaacgagaatcagtgttgatgtcggggtgaactttgtgggtacattacttggtgttaacattgttggcagtggtagccccttttcagaaagcaacttgctgtaagtcagggtgtccgttccaaccttcagctagtgaaaaggtagtaacaaatggtaaacaagagaatgattgtttaaacctatctgtggacacttaatgcaactgtttaaaaatgataatcacgagttatgtagcaacgtggaaatatatttacagaacattaagtggagaaagcaggacacgaaagtatatttatactacagttataactcaacagttcatttatatgctgttcatttaacagttcatttaaacagttcattataactgtttaaaaatatatatgcttatagtcaaaagctgttgtggtgttgttgttgtaggcttatagttgagcattattttcttaaatttcttgaatgttctttatggtagtgttactaaaaagtttatgatcacattttcattgtgaacataatttgaactcattatcacacacttggaaaatacagaaaagtggaggaaaaaaaatcatatccccaccatccaaagacatatactctcctcttatcttgttcattcttgtttctgtgcacaggtttatgattataactgtgtcaaaatgtatattcaaaatagctgttacattacctttgtggaattatggttaaatactttcactttaattttttcaaatgttccctataataatgtcctgataacagtgtattatgtgtgtctccattggtgtgcataatacatacccagaggaaaaattagaaaataaagtaaattattttaaaaaattacctatattcccaacacctaacaactactgctaacatcttgatctgtttcctctatcttgtttcagtgcacacgcttgtgataacagtgttaaatatgtgtgcataaagtcttaaatgaaaagatgtggaaaataactaaaatagtgttgtcattgtgggaatttggttaaatattttgtctcaaattccttaaataatctttggtgttttggtaataaattttatgtatgtattttccattacaaatataatacatactcatacaaaactttggaaattcagtaaagaaaattcacacatattcccaacacccaacaacaattaactgttaacatcttgatctgtgcactagtctgtgattattagggtgttagtgataagtatgcataaatgtcaaagatgggaagaaagatgaaaaacaagaaatagttgtgtggttgttgtgggattatggttattttgtttcggtttccttgaaaggtcatcattctagtgttttggtagtccacctttactacatatatttccattatatatgaaatgtgttcattatagaaactttgaagttacagaaatgtagaagagaaactcacccatgttttcaccatccaaagagtgtggttaacatcttgatatattttcttcatcttgtttctgtgcacaggtttttggtttgttaatatggttgtggtcattctatctgtaatagtgtcaacaataaaaataaagttaaaaataaatattaaaaaaaaaaaaaaaaaaaaaaaaaaaaaaaaaaaaaaaaaaaaaaaaaaaaaaaaaaaaaaaaaaaaaaaaaaaaaaaaaaaaaaagaaaaaaaaagaaaaaaaaaataaaaaccaaaaaagaaaaaaaagaagggcggcgctgcccgatacccactgacgcctacggagcggggccagaggcgagagaccggcacagccggtgcccgagagcaaagaggaaggcgagacacgtagggcacgtagataacgaaaagagagcagaggcaaggggcaaagaaccgacaaggcaaacaagcggagagcaaacagaccgcgcgccaccagacgccaacacacgagaacaaccacacacggtaaggggaagaggacaacgacaaccccaagacatgacgtcggcgccgacacgaaaacaaccaggcgccgggtcgcacga

SEQ ID NO: 382138 - DNA, 8763 bp, Homo sapiens
ggtgcagaagtctgggcagctgcgggaggagaggtttgggaggcgcgggagatgtccaccctgggctggtggcgccgccgggcgccgggcgccatgagggtgcgctaggcggctgttcgtgcccgaggctgcgcagcactgaggtgagctttgccttcttgatcttccgtccttcttggagacgactggcgagaggaagagggactaggtccaaacgctaggtggctgggtccagatacctgtgttttgactctgttcctgtggatagctgcttggtctgaagttccagaaaggatcctgttcccagacaggtccctgagtactgacggtcacaggctgccgcgtctttcctgttgactcatgtttggttcctccagtgaaaattttacttagagaaatgctgcctccaaagcacttgtctgccaccaaacctaagaagtcctgggccccaaatctgtatgagctagacagtgacttgactaaggagccggatgtcatcataggagaaggtccaactgactctgagttttttcatcagaggtttcggaacctaatctatgtggaatttgttgggcctcggaagaccctgatcaaactccgaaacctctgcctcgattggttgcagccggagacccgcaccaaggaggagatcatcgagctcttggtccttgagcagtacctgaccatcatccctgaaaagctcaagccttgggtgcgagcaaaaaagccggagaactgtgagaagctcgtcactctgctggagaattacaaggagatgtaccaaccagaagacgacaacaacagtgacgtgaccagcgacgacgacatgacccggaacagaagagagtcctcaccacctcactcagtccattctttcagtgaccgggactgggaccggaggggcagaagcagagacatggagccacgagaccgctggtcccacaccaggaacccaagaagcaggatgcctccgcgggatctttcccttcctgtggtggcgaaaacaagctttgaaatggacagagaggacgacagggactccagggcttatgagtcccgatctcaggatgctgaatcataccaaaatgtggtggacctcgctgaggacaggaaacctcacaacacaatccaggacaacatggaaaactacaggaagctgctctccctcggtgcagcttgctgaagacgatggccactcccacatgacgcagggccactcatcaagatccaagagaagtgcctacccaagcaccagtcgaggtctaaaaactatgcctgaagccaaaaaatcaacccaccggcgggggatttgtgaagatgaatcttcccacggagtgataatggaaaaattcatcaaggatgtgtcacgcagttccaaatcgggaagagcaagggagtcaagcgaccggtcacagagattccccagaatgtcagatgataactggaaggacatttcattgaacaagagggagtcagtgatccagcagcgggtttatgaagggaatgcatttaggggaggctttaggtttaattcaacccttgtttccagaaagagagttcttgaaagaaagaggcgctatcattttgacacagatgggaagggctcgattcacgatcaaaaaggctgtcccaggaagaagccctttgaatgtggtagtgagatgagaaaagccatgagcgtgagcagcctgagcagcctcagctccccctcctttaccgagtcacagccaattgattttggggcaatgccatatgtatgtgatgagtgtgggaggtcgttcagtgtcatctcagaatttgttgagcaccagatcatgcatactagagagaacctctatgagtatggtgagtcctttatccacagtgtggctgtcagtgaagttcagaaaagtcaggttggagggaaacgttttgaatgtaaggactgtggagagaccttcaataagagtgccgccttggctgaacatcggaagattcatgctagaggttatcttgtggaatgtaagaatcaggaatgtgaggaagccttcatgcctagccccacctttagtgagcttcagaaaatatatggcaaagacaaattctacgagtgcagggtgtgtaaggaaaccttccttcatagttctgccctgattgagcaccagaaaatccactttggggatgacaaagataatgagcgtgaacatgaacgtgaacgtgaacgtgagcgcggggaaacctttaggcccagcccagcccttaatgagtttcagaaaatgtatggtaaagagaaaatgtacgaatgtaaggtgtgtggggagactttccttcatagctcatccctgaaagaacatcagaaaatccatactagagggaacccatttgaaaacaagggtaaagtgtgtgaggaaacctttattcctggtcagtcccttaaaaggcgtcagaaaacttacaataaggagaagctctgtgactttacagatggccgggatgccttcatgcaaagctcagagctcagtgagcatcagaaaattcattctcgaaagaacctctttgaaggcagagggtatgagaaatctgtcattcatagtgggccattcactgaatctcagaagagtcatactataacaagacctcttgaaagtgatgaggacgaaaaggcgttcaccattagctctaacccctatgaaaaccagaagattcccactaaggaaaatgtctatgaggcaaaatcatatgagaggtctgttattcatagcttagcctctgtggaagctcagaaaagtcacagtgtagcagggcccagtaaaccaaaagtaatggcagagtctaccattcagagcttcgatgctatcaaccatcagagagttcgtgctggagggaacacctctgaaggaagggaatacagtaggtctgttatccatagcttagtggcttccaaacctccaagaagtcacaatggaaatgaattggtggaatctaatgagaagggagaatcctccatttatatctcagaccttaatgataagcgacagaagattcctgccagagagaacccttgtgaagggggcagtaagaatcgcaactatgaagactctgtcatacagagtgtattccgtgccaaacctcagaaaagtgttcctggagagggatctggtgagtttaagaaggatggcgaattctctgttcccagctcaaatgtccgtgaataccagaaggctcgtgctaaaaagaaatacattgagcataggagcaatgagacctctgtaattcactctctgccttttggtgaacaaacatttcgccctcgagggatgctctatgaatgtcaggagtgtggggagtgctttgctcatagctctgacctcactgagcaccagaagattcatgatagggagaagccctctggaagcagaaactatgaatggtctgtcattcgcagcttggcccctactgaccctcaaacaagttacgcccaagagcagtatgctaaagagcaagcgcggaacaaatgtaaggacttcagacaattttttgctaccagcgaagacctcaacacaaaccagaaaatctatgaccaagagaagtctcatggcgaggagtctcaaggcgagaatactgatggggaggagacccacagcgaggagacccatggtcaggagacaattgaagaccctgtcattcaaggctcagacatggaagaccctcagaaggatgaccctgatgacaaaatctatgaatgtgaggactgtggcctgggctttgtggatctcacagacctcacagaccatcagaaagtccacagcaggaagtgcctggttgacagtcgggagtacacacattctgtaattcacacccattccatcagcgagtatcagagagattacactggagagcagctgtatgaatgtccaaagtgtggggaatcttttattcatagctcattccttttcgagcatcagagaatccatgaacaagaccagttgtattccatgaaggggtgtgatgatggttttattgccctcttgcccatgaagccacggaggaatcgtgctgcagagaggaatcctgctcttgctgggtcggccattcgatgccttttgtgtggacaaggcttcattcatagctctgcccttaatgagcatatgagacttcatagggaagatgatttactggagcagagccagatggctgaggaagctatcattccaggcttagccctcactgagtttcagagaagtcagaccgaagagagactctttgaatgtgcagtctgtggagaatctttcgtcaacccagcagaacttgcagatcacgtaactgttcataagaatgagccctatgagtacgggtcctcctatactcacacctcatttcttactgagcccctcaaaggagctataccattctatgaatgcaaggattgtggtaagtcctttattcatagcacagtcctcactaaacataaggagcttcatctggaagaagaagaagaagatgaagcagcagcagctgcagcagcagcagcccaggaagttgaagccaatgtccatgttccacaagtagttctgaggattcagggcttaaacgtagaggctgctgagccagaagtggaggctgccgagccagaagtggaggctgctgagccagaagtggaggctgctgagccaaacggagaggctgaagggccagatggagaggctgcagagcccattggagaggctggacagccaaatggagaggccgagcagccaaatggggatgctgatgagccagatggtgcaggtattgaagacccagaagaaagagctgaagagccagagggaaaagctgaagagccagagggagatgccgacgagcctgacggtgtgggaattgaagacccagaagaaggtgaagatcaagagattcaggtagaagaaccatactatgactgccatgaatgcacagaaaccttcacttccagcacagcattcagtgaacacctgaaaactcatgccagcatgatcatatttgagcctgcaaatgcctttggggagtgctcaggctacatcgaacgtgccagcaccagcacaggtggtgccaatcaagctgatgagaagtacttcaaatgtgacgtctgtgggcagctcttcaatgaccgcctgtccctcgccagacaccagaatacccacactggctgagggcatggggtaaaggttagaaaaccttcacctaggacttgacccttaccaaaccacagagaatccaaaccaatccatgataatgtcagtaggagacttaaccttagtgtgttacacacctgacttaacatctctaaactcagattgaaaagagaccgaatgtgcagattccacagtcttaagctttccccttcagatgtcagtgtctgcatgtgggaaagccatagcacacatcttacctttccaagtaatcagattgagaaaaccctatgagtattccagactacagagtttgcccaaatcaactgtaaatgacacttgtgtaacgtatatatagtgtttcatgaggtgtatataaaatagcaaattatgacagaacagtgatcacatatatttggatttatatgatatacagttacagtttactctgcagaggtaccttacctggtattctttgaattttttttttttttggaggaggaagagagcaacaaatttgattatatttttaagtgtcttagatcctgagaaagatttattgtgcattatttgaaccctgtcaatatctttttgagtaattgttttgtttcttacccttaaatagtcttgtgaagctgtaggcatgatagataacatggcttttactccttactgtttgaaaagataagtactttagcttctttctgcagccatttcatctgcgccaacactttggaacctaatactgtgtaaggctttacaatatacggattggctttttgtgacccagattgattggttgccacatgttatgtttgttgaagtggttctcatgcaaaaatattacacatttgtgttctgggtttttttttttttttaaccaactcaatatgtgtttgatgatagtgaattgataaaacccgaagcttttccctgtaaatcttacatctttgcctttaaagaatgggttacaaccatcactagatcacagtagtgcctaatgaaggttgagaaccgtaggagaggctctcatgctgtaaataatgttgcaggctaataacctttcatcacttcctttgtgcgcttcctgccttaagtgacaagtagcaacatggcttgggtcccctgtgcagcatcagcttatgctgccacaagtcagtttgcaccctaggtgcccaggagctagtatccttagatctttctatcgctaacttaattctcttcgttatttatctgaccctctaactccatgtctaacttgcattaaaaaaaaaaaaattctttacagtcaacccaagcttaacatggactcaggttccccagcagccttaatttgttttgttaacatctgttccttctttttcagctctcctagagtatttctgagtgttgtgttcatctaatcttagtattcttttaattacaaattgacctcacagcttgaggtttcttgtgtcctattctgtggactacctgtgctcctttgcttcccctcccctcgcataataactatattaagaaattttttttggccttgagttggctggaaaaaaaatataaaatttaaaaaatttaaaaaaaaagatttgcaaaatgtaagtgtagatcatttgaacaagcaaaattaaagtacccactgggggaaatgtgtctgaatcttactcttctggatctgcaggattagggcttggaagtatgtcaaagatgcagggagtgtcaaagtttaggaagattgtagagctgagagcaagaagcagaaatgagtgagtcaaagaagggagtcctaatacatcaccagatctaggaggggagaggagacagacagaagaaaacaccagaggcaagaactgtagaaggccaggtttctgagaatgaattgagcggggtgtcctgagcagtttggaaaaggagtttttgatggtatggtgtaggtgagggctggctgcataggaaggactgaggttggaacggacatcgggaaagctgaggggcagtgaggtttactacatgggaaaaggactcttgaaacgagaatcagtgttgatgtcggggtgaactttgtgggtacattacttggtgttaacattgttggcagtggtagccccttttcagaaagcaacttgctgtaagtcagggtgtccgttccaaccttcagctagtgaaaaggtagtaacaaatggtaaacaagagaatgattgtttaaacctatctgtggacacttaatgcaactgtttaaaaatgataatcacgagttatgtagcaacgtggaaatatatttacagaacattaagtggagaaagcaggacacgaaagtatatttatactacagttataactcaacagttcatttatatgctgttcatttaacagttcatttaaacagttcattataactgtttaaaaatatatatgcttatagtcaaaagctgttgtggtgttgttgttgtaggcttatagttgagcattattttcttaaatttcttgaatgttctttatggtagtgttactaaaaagtttatgatcacattttcattgtgaacataatttgaactcattatcacacacttggaaaatacagaaaagtggaggaaaaaaaatcatatccccaccatccaaagacatatactctcctcttatcttgttcattcttgtttctgtgcacaggtttatgattataactgtgtcaaaatgtatattcaaaatagctgttacattacctttgtggaattatggttaaatactttcactttaattttttcaaatgttccctataataatgtcctgataacagtgtattatgtgtgtctccattggtgtgcataatacatacccagaggaaaaattagaaaataaagtaaattattttaaaaaattacctatattcccaacacctaacaactactgctaacatcttgatctgtttcctctatcttgtttcagtgcacacgcttgtgataacagtgttaaatatgtgtgcataaagtcttaaatgaaaagatgtggaaaataactaaaatagtgttgtcattgtgggaatttggttaaatattttgtctcaaattccttaaataatctttggtgttttggtaataaattttatgtatgtattttccattacaaatataatacatactcatacaaaactttggaaattcagtaaagaaaattcacacatattcccaacacccaacaacaattaactgttaacatcttgatctgtgcactagtctgtgattattagggtgttagtgataagtatgcataaatgtcaaagatgggaagaaagatgaaaaacaagaaatagttgtgtggttgttgtgggattatggttattttgtttcggtttccttgaaaggtcatcattctagtgttttggtagtccacctttactacatatatttccattatatatgaaatgtgttcattatagaaactttgaagttacagaaatgtagaagagaaactcacccatgttttcaccatccaaagagtgtggttaacatcttgatatattttcttcatcttgtttctgtgcacaggtttttggtttgttaatatggttgtggtcattctatctgtaatagtgtcaacaataaaaataaagttaaaaataaatatt

SEQ ID NO: 382139 - DNA, 8687 bp, Homo sapiens
ggtgcagaagtctgggcagctgcgggaggagaggtttgggaggcgcgggagatgtccaccctgggctggtggcgccgccgggcgccgggcgccatgagggtgcgctaggcggctgttcgtgcccgaggctgcgcagcactgaggtgagctttgccttcttgatcttccgtccttcttggagacgactggcgagaggaagagggactaggtccaaacgctaggtggctgggtccaggtccctgagtactgacggtcacaggctgccgcgtctttcctgttgactcatgtttggttcctccagtgaaaattttacttagagaaatgctgcctccaaagcacttgtctgccaccaaacctaagaagtcctgggccccaaatctgtatgagctagacagtgacttgactaaggagccggatgtcatcataggagaaggtccaactgactctgagttttttcatcagaggtttcggaacctaatctatgtggaatttgttgggcctcggaagaccctgatcaaactccgaaacctctgcctcgattggttgcagccggagacccgcaccaaggaggagatcatcgagctcttggtccttgagcagtacctgaccatcatccctgaaaagctcaagccttgggtgcgagcaaaaaagccggagaactgtgagaagctcgtcactctgctggagaattacaaggagatgtaccaaccagaagacgacaacaacagtgacgtgaccagcgacgacgacatgacccggaacagaagagagtcctcaccacctcactcagtccattctttcagtgaccgggactgggaccggaggggcagaagcagagacatggagccacgagaccgctggtcccacaccaggaacccaagaagcaggatgcctccgcgggatctttcccttcctgtggtggcgaaaacaagctttgaaatggacagagaggacgacagggactccagggcttatgagtcccgatctcaggatgctgaatcataccaaaatgtggtggacctcgctgaggacaggaaacctcacaacacaatccaggacaacatggaaaactacaggaagctgctctccctcggtgcagcttgctgaagacgatggccactcccacatgacgcagggccactcatcaagatccaagagaagtgcctacccaagcaccagtcgaggtctaaaaactatgcctgaagccaaaaaatcaacccaccggcgggggatttgtgaagatgaatcttcccacggagtgataatggaaaaattcatcaaggatgtgtcacgcagttccaaatcgggaagagcaagggagtcaagcgaccggtcacagagattccccagaatgtcagatgataactggaaggacatttcattgaacaagagggagtcagtgatccagcagcgggtttatgaagggaatgcatttaggggaggctttaggtttaattcaacccttgtttccagaaagagagttcttgaaagaaagaggcgctatcattttgacacagatgggaagggctcgattcacgatcaaaaaggctgtcccaggaagaagccctttgaatgtggtagtgagatgagaaaagccatgagcgtgagcagcctgagcagcctcagctccccctcctttaccgagtcacagccaattgattttggggcaatgccatatgtatgtgatgagtgtgggaggtcgttcagtgtcatctcagaatttgttgagcaccagatcatgcatactagagagaacctctatgagtatggtgagtcctttatccacagtgtggctgtcagtgaagttcagaaaagtcaggttggagggaaacgttttgaatgtaaggactgtggagagaccttcaataagagtgccgccttggctgaacatcggaagattcatgctagaggttatcttgtggaatgtaagaatcaggaatgtgaggaagccttcatgcctagccccacctttagtgagcttcagaaaatatatggcaaagacaaattctacgagtgcagggtgtgtaaggaaaccttccttcatagttctgccctgattgagcaccagaaaatccactttggggatgacaaagataatgagcgtgaacatgaacgtgaacgtgaacgtgagcgcggggaaacctttaggcccagcccagcccttaatgagtttcagaaaatgtatggtaaagagaaaatgtacgaatgtaaggtgtgtggggagactttccttcatagctcatccctgaaagaacatcagaaaatccatactagagggaacccatttgaaaacaagggtaaagtgtgtgaggaaacctttattcctggtcagtcccttaaaaggcgtcagaaaacttacaataaggagaagctctgtgactttacagatggccgggatgccttcatgcaaagctcagagctcagtgagcatcagaaaattcattctcgaaagaacctctttgaaggcagagggtatgagaaatctgtcattcatagtgggccattcactgaatctcagaagagtcatactataacaagacctcttgaaagtgatgaggacgaaaaggcgttcaccattagctctaacccctatgaaaaccagaagattcccactaaggaaaatgtctatgaggcaaaatcatatgagaggtctgttattcatagcttagcctctgtggaagctcagaaaagtcacagtgtagcagggcccagtaaaccaaaagtaatggcagagtctaccattcagagcttcgatgctatcaaccatcagagagttcgtgctggagggaacacctctgaaggaagggaatacagtaggtctgttatccatagcttagtggcttccaaacctccaagaagtcacaatggaaatgaattggtggaatctaatgagaagggagaatcctccatttatatctcagaccttaatgataagcgacagaagattcctgccagagagaacccttgtgaagggggcagtaagaatcgcaactatgaagactctgtcatacagagtgtattccgtgccaaacctcagaaaagtgttcctggagagggatctggtgagtttaagaaggatggcgaattctctgttcccagctcaaatgtccgtgaataccagaaggctcgtgctaaaaagaaatacattgagcataggagcaatgagacctctgtaattcactctctgccttttggtgaacaaacatttcgccctcgagggatgctctatgaatgtcaggagtgtggggagtgctttgctcatagctctgacctcactgagcaccagaagattcatgatagggagaagccctctggaagcagaaactatgaatggtctgtcattcgcagcttggcccctactgaccctcaaacaagttacgcccaagagcagtatgctaaagagcaagcgcggaacaaatgtaaggacttcagacaattttttgctaccagcgaagacctcaacacaaaccagaaaatctatgaccaagagaagtctcatggcgaggagtctcaaggcgagaatactgatggggaggagacccacagcgaggagacccatggtcaggagacaattgaagaccctgtcattcaaggctcagacatggaagaccctcagaaggatgaccctgatgacaaaatctatgaatgtgaggactgtggcctgggctttgtggatctcacagacctcacagaccatcagaaagtccacagcaggaagtgcctggttgacagtcgggagtacacacattctgtaattcacacccattccatcagcgagtatcagagagattacactggagagcagctgtatgaatgtccaaagtgtggggaatcttttattcatagctcattccttttcgagcatcagagaatccatgaacaagaccagttgtattccatgaaggggtgtgatgatggttttattgccctcttgcccatgaagccacggaggaatcgtgctgcagagaggaatcctgctcttgctgggtcggccattcgatgccttttgtgtggacaaggcttcattcatagctctgcccttaatgagcatatgagacttcatagggaagatgatttactggagcagagccagatggctgaggaagctatcattccaggcttagccctcactgagtttcagagaagtcagaccgaagagagactctttgaatgtgcagtctgtggagaatctttcgtcaacccagcagaacttgcagatcacgtaactgttcataagaatgagccctatgagtacgggtcctcctatactcacacctcatttcttactgagcccctcaaaggagctataccattctatgaatgcaaggattgtggtaagtcctttattcatagcacagtcctcactaaacataaggagcttcatctggaagaagaagaagaagatgaagcagcagcagctgcagcagcagcagcccaggaagttgaagccaatgtccatgttccacaagtagttctgaggattcagggcttaaacgtagaggctgctgagccagaagtggaggctgccgagccagaagtggaggctgctgagccagaagtggaggctgctgagccaaacggagaggctgaagggccagatggagaggctgcagagcccattggagaggctggacagccaaatggagaggccgagcagccaaatggggatgctgatgagccagatggtgcaggtattgaagacccagaagaaagagctgaagagccagagggaaaagctgaagagccagagggagatgccgacgagcctgacggtgtgggaattgaagacccagaagaaggtgaagatcaagagattcaggtagaagaaccatactatgactgccatgaatgcacagaaaccttcacttccagcacagcattcagtgaacacctgaaaactcatgccagcatgatcatatttgagcctgcaaatgcctttggggagtgctcaggctacatcgaacgtgccagcaccagcacaggtggtgccaatcaagctgatgagaagtacttcaaatgtgacgtctgtgggcagctcttcaatgaccgcctgtccctcgccagacaccagaatacccacactggctgagggcatggggtaaaggttagaaaaccttcacctaggacttgacccttaccaaaccacagagaatccaaaccaatccatgataatgtcagtaggagacttaaccttagtgtgttacacacctgacttaacatctctaaactcagattgaaaagagaccgaatgtgcagattccacagtcttaagctttccccttcagatgtcagtgtctgcatgtgggaaagccatagcacacatcttacctttccaagtaatcagattgagaaaaccctatgagtattccagactacagagtttgcccaaatcaactgtaaatgacacttgtgtaacgtatatatagtgtttcatgaggtgtatataaaatagcaaattatgacagaacagtgatcacatatatttggatttatatgatatacagttacagtttactctgcagaggtaccttacctggtattctttgaattttttttttttttggaggaggaagagagcaacaaatttgattatatttttaagtgtcttagatcctgagaaagatttattgtgcattatttgaaccctgtcaatatctttttgagtaattgttttgtttcttacccttaaatagtcttgtgaagctgtaggcatgatagataacatggcttttactccttactgtttgaaaagataagtactttagcttctttctgcagccatttcatctgcgccaacactttggaacctaatactgtgtaaggctttacaatatacggattggctttttgtgacccagattgattggttgccacatgttatgtttgttgaagtggttctcatgcaaaaatattacacatttgtgttctgggtttttttttttttttaaccaactcaatatgtgtttgatgatagtgaattgataaaacccgaagcttttccctgtaaatcttacatctttgcctttaaagaatgggttacaaccatcactagatcacagtagtgcctaatgaaggttgagaaccgtaggagaggctctcatgctgtaaataatgttgcaggctaataacctttcatcacttcctttgtgcgcttcctgccttaagtgacaagtagcaacatggcttgggtcccctgtgcagcatcagcttatgctgccacaagtcagtttgcaccctaggtgcccaggagctagtatccttagatctttctatcgctaacttaattctcttcgttatttatctgaccctctaactccatgtctaacttgcattaaaaaaaaaaaaattctttacagtcaacccaagcttaacatggactcaggttccccagcagccttaatttgttttgttaacatctgttccttctttttcagctctcctagagtatttctgagtgttgtgttcatctaatcttagtattcttttaattacaaattgacctcacagcttgaggtttcttgtgtcctattctgtggactacctgtgctcctttgcttcccctcccctcgcataataactatattaagaaattttttttggccttgagttggctggaaaaaaaatataaaatttaaaaaatttaaaaaaaaagatttgcaaaatgtaagtgtagatcatttgaacaagcaaaattaaagtacccactgggggaaatgtgtctgaatcttactcttctggatctgcaggattagggcttggaagtatgtcaaagatgcagggagtgtcaaagtttaggaagattgtagagctgagagcaagaagcagaaatgagtgagtcaaagaagggagtcctaatacatcaccagatctaggaggggagaggagacagacagaagaaaacaccagaggcaagaactgtagaaggccaggtttctgagaatgaattgagcggggtgtcctgagcagtttggaaaaggagtttttgatggtatggtgtaggtgagggctggctgcataggaaggactgaggttggaacggacatcgggaaagctgaggggcagtgaggtttactacatgggaaaaggactcttgaaacgagaatcagtgttgatgtcggggtgaactttgtgggtacattacttggtgttaacattgttggcagtggtagccccttttcagaaagcaacttgctgtaagtcagggtgtccgttccaaccttcagctagtgaaaaggtagtaacaaatggtaaacaagagaatgattgtttaaacctatctgtggacacttaatgcaactgtttaaaaatgataatcacgagttatgtagcaacgtggaaatatatttacagaacattaagtggagaaagcaggacacgaaagtatatttatactacagttataactcaacagttcatttatatgctgttcatttaacagttcatttaaacagttcattataactgtttaaaaatatatatgcttatagtcaaaagctgttgtggtgttgttgttgtaggcttatagttgagcattattttcttaaatttcttgaatgttctttatggtagtgttactaaaaagtttatgatcacattttcattgtgaacataatttgaactcattatcacacacttggaaaatacagaaaagtggaggaaaaaaaatcatatccccaccatccaaagacatatactctcctcttatcttgttcattcttgtttctgtgcacaggtttatgattataactgtgtcaaaatgtatattcaaaatagctgttacattacctttgtggaattatggttaaatactttcactttaattttttcaaatgttccctataataatgtcctgataacagtgtattatgtgtgtctccattggtgtgcataatacatacccagaggaaaaattagaaaataaagtaaattattttaaaaaattacctatattcccaacacctaacaactactgctaacatcttgatctgtttcctctatcttgtttcagtgcacacgcttgtgataacagtgttaaatatgtgtgcataaagtcttaaatgaaaagatgtggaaaataactaaaatagtgttgtcattgtgggaatttggttaaatattttgtctcaaattccttaaataatctttggtgttttggtaataaattttatgtatgtattttccattacaaatataatacatactcatacaaaactttggaaattcagtaaagaaaattcacacatattcccaacacccaacaacaattaactgttaacatcttgatctgtgcactagtctgtgattattagggtgttagtgataagtatgcataaatgtcaaagatgggaagaaagatgaaaaacaagaaatagttgtgtggttgttgtgggattatggttattttgtttcggtttccttgaaaggtcatcattctagtgttttggtagtccacctttactacatatatttccattatatatgaaatgtgttcattatagaaactttgaagttacagaaatgtagaagagaaactcacccatgttttcaccatccaaagagtgtggttaacatcttgatatattttcttcatcttgtttctgtgcacaggtttttggtttgttaatatggttgtggtcattctatctgtaatagtgtcaacaataaaaataaagttaaaaataaatatt

SEQ ID NO: 382140 - DNA, 7498 bp, Homo sapiens
ggtgcagaagtctgggcagctgcgggaggagaggtttgggaggcgcgggagatgtccaccctgggctggtggcgccgccgggcgccgggcgccatgagggtgcgctaggcggctgttcgtgcccgaggctgcgcagcactgaggtgagctttgccttcttgatcttccgtccttcttggagacgactggcgagaggaagagggactaggtccaaacgctaggtggctgggtccagccggagacccgcaccaaggaggagatcatcgagctcttggtccttgagcagtacctgaccatcatccctgaaaagctcaagccttgggtgcgagcaaaaaagccggagaactgtgagaagctcgtcactctgctggagaattacaaggagatgtaccaaccagaagacgacaacaacagtgacgtgaccagcgacgacgacatgacccggaacagaagagagtcctcaccacctcactcagtccattctttcagtgaccgggactgggaccggaggggcagaagcagagacatggagccacgagaccgctggtcccacaccaggaacccaagaagcaggatgcctccgcgggatctttcccttcctgtggtggcgaaaacaagctttgaaatggacagagaggacgacagggactccagggcttatgagtcccgatctcaggatgctgaatcataccaaaatgtggtggacctcgctgaggacaggaaacctcacaacacaatccaggacaacatggaaaactacaggaagctgctctccctcggtgcagcttgctgaagacgatggccactcccacatgacgcagggccactcatcaagatccaagagaagtgcctacccaagcaccagtcgaggtctaaaaactatgcctgaagccaaaaaatcaacccaccggcgggggatttgtgaagatgaatcttcccacggagtgataatggaaaaattcatcaaggatgtgtcacgcagttccaaatcgggaagagcaagggagtcaagcgaccggtcacagagattccccagaatgtcagatgataactggaaggacatttcattgaacaagagggagtcagtgatccagcagcgggtttatgaagggaatgcatttaggggaggctttaggtttaattcaacccttgtttccagaaagagagttcttgaaagaaagaggcgctatcattttgacacagatgggaagggctcgattcacgatcaaaaaggctgtcccaggaagaagccctttgaatgtggtagtgagatgagaaaagccatgagcgtgagcagcctgagcagcctcagctccccctcctttaccgagtcacagccaattgattttggggcaatgccatatgtatgtgatgagtgtgggaggtcgttcagtgtcatctcagaatttgttgagcaccagatcatgcatactagagagaacctctatgagtatggtgagtcctttatccacagtgtggctgtcagtgaagttcagaaaagtcaggttggagggaaacgttttgaatgtaaggactgtggagagaccttcaataagagtgccgccttggctgaacatcggaagattcatgctagaggttatcttgtggaatgtaagaatcaggaatgtgaggaagccttcatgcctagccccacctttagtgagcttcagaaaatatatggcaaagacaaattctacgagtgcagggtgtgtaaggaaaccttccttcatagttctgccctgattgagcaccagaaaatccactttggggatgacaaagataatgagcgtgaacatgaacgtgaacgtgaacgtgagcgcggggaaacctttaggcccagcccagcccttaatgagtttcagaaaatgtatggtaaagagaaaatgtacgaatgtaaggtgtgtggggagactttccttcatagctcatccctgaaagaacatcagaaaatccatactagagggaacccatttgaaaacaagggtaaagtgtgtgaggaaacctttattcctggtcagtcccttaaaaggcgtcagaaaacttacaataaggagaagctctgtgactttacagatggccgggatgccttcatgcaaagctcagagctcagtgagcatcagaaaattcattctcgaaagaacctctttgaaggcagagggtatgagaaatctgtcattcatagtgggccattcactgaatctcagaagagtcatactataacaagacctcttgaaagtgatgaggacgaaaaggcgttcaccattagctctaacccctatgaaaaccagaagattcccactaaggaaaatgtctatgaggcaaaatcatatgagaggtctgttattcatagcttagcctctgtggaagctcagaaaagtcacagtgtagcagggcccagtaaaccaaaagtaatggcagagtctaccattcagagcttcgatgctatcaaccatcagagagttcgtgctggagggaacacctctgaaggaagggaatacagtaggtctgttatccatagcttagtggcttccaaacctccaagaagtcacaatggaaatgaattggtggaatctaatgagaagggagaatcctccatttatatctcagaccttaatgataagcgacagaagattcctgccagagagaacccttgtgaagggggcagtaagaatcgcaactatgaagactctgtcatacagagtgtattccgtgccaaacctcagaaaagtgttcctggagagggatctggtgagtttaagaaggatggcgaattctctgttcccagctcaaatgtccgtgaataccagaaggctcgtgctaaaaagaaatacattgagcataggagcaatgagacctctgtaattcactctctgccttttggtgaacaaacatttcgccctcgagggatgctctatgaatgtcaggagtgtggggagtgctttgctcatagctctgacctcactgagcaccagaagattcatgatagggagaagccctctggaagcagaaactatgaatggtctgtcattcgcagcttggcccctactgaccctcaaacaagttacgcccaagagcagtatgctaaagagcaagcgcggaacaaatgtaaggacttcagacaattttttgctaccagcgaagacctcaacacaaaccagaaaatctatgaccaagagaagtctcatggcgaggagtctcaaggcgagaatactgatggggaggagacccacagcgaggagacccatggtcaggagacaattgaagaccctgtcattcaaggctcagacatggaagaccctcagaaggatgaccctgatgacaaaatctatgaatgtgaggactgtggcctgggctttgtggatctcacagacctcacagaccatcagaaagtccacagcaggaagtgcctggttgacagtcgggagtacacacattctgtaattcacacccattccatcagcgagtatcagagagattacactggagagcagctgtatgaatgtccaaagtgtggggaatcttttattcatagctcattccttttcgagcatcagagaatccatgaacaagaccagttgtattccatgaaggggtgtgatgatggttttattgccctcttgcccatgaagccacggaggaatcgtgctgcagagaggaatcctgctcttgctgggtcggccattcgatgccttttgtgtggacaaggcttcattcatagctctgcccttaatgagcatatgagacttcatagggaagatgatttactggagcagagccagatggctgaggaagctatcattccaggcttagccctcactgagtttcagagaagtcagaccgaagagagactctttgaatgtgcagtctgtggagaatctttcgtcaacccagcagaacttgcagatcacgtaactgttcataagaatgagccctatgagtacgggtcctcctatactcacacctcatttcttactgagcccctcaaaggagctataccattctatgaatgcaaggattgtggtaagtcctttattcatagcacagtcctcactaaacataaggagcttcatctggaagaagaagaagaagatgaagcagcagcagctgcagcagcagcagcccaggaagttgaagccaatgtccatgttccacaagtagttctgaggattcagggcttaaacgtagaggctgctgagccagaagtggaggctgccgagccagaagtggaggctgctgagccagaagtggaggctgctgagccaaacggagaggctgaagggccagatggagaggctgcagagcccattggagaggctggacagccaaatggagaggccgagcagccaaatggggatgctgatgagccagatggtgcaggtattgaagacccagaagaaagagctgaagagccagagggaaaagctgaagagccagagggagatgccgacgagcctgacggtgtgggaattgaagacccagaagaaggtgaagatcaagagattcaggtagaagaaccatactatgactgccatgaatgcacagaaaccttcacttccagcacagcattcagtgaacacctgaaaactcatgccagcatgatcatatttgagcctgcaaatgcctttggggagtgctcaggctacatcgaacgtgccagcaccagcacaggtggtgccaatcaagctgatgagaagtacttcaaatgtgacgtctgtgggcagctcttcaatgaccgcctgtccctcgccagacaccagaatacccacactggctgagggcatggggtaaaggttagaaaaccttcacctaggacttgacccttaccaaaccacagagaatccaaaccaatccatgataatgtcagtaggagacttaaccttagtgtgttacacacctgacttaacatctctaaactcagattgaaaagagaccgaatgtgcagattccacagtcttaagctttccccttcagatgtcagtgtctgcatgtgggaaagccatagcacacatcttacctttccaagtaatcagattgagaaaaccctatgagtattccagactacagagtttgcccaaatcaactgtaaatgacacttgtgtaacgtatatatagtgtttcatgaggtgtatataaaatagcaaattatgacagaacagtgatcacatatatttggatttatatgatatacagttacagtttactctgcagaggtaccttacctggtattctttgaattttttttttttttggaggaggaagagagcaacaaatttgattatatttttaagtgtcttagatcctgagaaagatttattgtgcattatttgaaccctgtcaatatctttttgagtaattgttttgtttcttacccttaaatagtcttgtgaagctgtaggcatgatagataacatggcttttactccttactgtttgaaaagataagtactttagcttctttctgcagccatttcatctgcgccaacactttggaacctaatactgtgtaaggctttacaatatacggattggctttttgtgacccagattgattggttgccacatgttatgtttgttgaagtggttctcatgcaaaaatattacacatttgtgttctgggtttttttttttttttaaccaactcaatatgtgtttgatgatagtgaattgataaaacccgaagcttttccctgtaaatcttacatctttgcctttaaagaatgggttacaaccatcactagatcacagtagtgcctaatgaaggttgagaaccgtaggagaggctctcatgctgtaaataatgttgcaggctaataacctttcatcacttcctttgtgcgcttcctgccttaagtgacaagtagcaacatggcttgggtcccctgtgcagcatcagcttatgctgccacaagtcagtttgcaccctaggtgcccaggagctagtatccttagatctttctatcgctaacttaattctcttcgttatttatctgaccctctaactccatgtctaacttgcattaaaaaaaaaaaaattctttacagtcaacccaagcttaacatggactcaggttccccagcagccttaatttgttttgttaacatctgttccttctttttcagctctcctagagtatttctgagtgttgtgttcatctaatcttagtattcttttaattacaaattgacctcacagcttgaggtttcttgtgtcctattctgtggactacctgtgctcctttgcttcccctcccctcgcataataactatattaagaaattttttttggccttgagttggctggaaaaaaaatataaaatttaaaaaatttaaaaaaaaagatttgcaaaatgtaagtgtagatcatttgaacaagcaaaattaaagtacccactgggggaaatgtgtctgaatcttactcttctggatctgcaggattagggcttggaagtatgtcaaagatgcagggagtgtcaaagtttaggaagattgtagagctgagagcaagaagcagaaatgagtgagtcaaagaagggagtcctaatacatcaccagatctaggaggggagaggagacagacagaagaaaacaccagaggcaagaactgtagaaggccaggtttctgagaatgaattgagcggggtgtcctgagcagtttggaaaaggagtttttgatggtatggtgtaggtgagggctggctgcataggaaggactgaggttggaacggacatcgggaaagctgaggggcagtgaggtttactacatgggaaaaggactcttgaaacgagaatcagtgttgatgtcggggtgaactttgtgggtacattacttggtgttaacattgttggcagtggtagccccttttcagaaagcaacttgctgtaagtcagggtgtccgttccaaccttcagctagtgaaaaggtagtaacaaatggtaaacaagagaatgattgtttaaacctatctgtggacacttaatgcaactgtttaaaaatgataatcacgagttatgtagcaacgtggaaatatatttacagaacattaagtggagaaagcaggacacgaaagtatatttatactacagttataactcaacagttcatttatatgctgttcatttaacagttcatttaaacagttcattataactgtttaaaaatatatatgcttatagtcaaaagctgttgtggtgttgttgttgtaggcttatagttgagcattattttcttaaatttcttgaatgttctttatggtagtgttactaaaaagtttatgatcacattttcattgtgaacataatttgaactcattatcacacacttggaaaatacagaaaagtggaggaaaaaaaatcatatccccaccatccaaagacatatactctcctcttatcttgttcattcttgtttctgtgcacaggtttttggtttgttaatatggttgtggtcattctatctgtaatagtgtcaacaataaaaataaagttaaaaataaatatt

SEQ ID NO: 382141 - DNA, 8653 bp, Homo sapiens
acttctagggcattagacaagttgcccacagtcccaagttagtagcccaagttagtagccgagctaactcctcgagtaggtctctgtgaagcccagaggtcatgcttgtaactgctgtgctgaggccaactttgtgcggttgtttgcctatttactggggactcccatatcccaaaagcattgtcgatgcctctggtaaggtggcctccactgctgcctggtcttcaacttctgggacatgtgtatatctccttacgatccacaggtccctgagtactgacggtcacaggctgccgcgtctttcctgttgactcatgtttggttcctccagtgaaaattttacttagagaaatgctgcctccaaagcacttgtctgccaccaaacctaagaagtcctgggccccaaatctgtatgagctagacagtgacttgactaaggagccggatgtcatcataggagaaggtccaactgactctgagttttttcatcagaggtttcggaacctaatctatgtggaatttgttgggcctcggaagaccctgatcaaactccgaaacctctgcctcgattggttgcagccggagacccgcaccaaggaggagatcatcgagctcttggtccttgagcagtacctgaccatcatccctgaaaagctcaagccttgggtgcgagcaaaaaagccggagaactgtgagaagctcgtcactctgctggagaattacaaggagatgtaccaaccagaagacgacaacaacagtgacgtgaccagcgacgacgacatgacccggaacagaagagagtcctcaccacctcactcagtccattctttcagtgaccgggactgggaccggaggggcagaagcagagacatggagccacgagaccgctggtcccacaccaggaacccaagaagcaggatgcctccgcgggatctttcccttcctgtggtggcgaaaacaagctttgaaatggacagagaggacgacagggactccagggcttatgagtcccgatctcaggatgctgaatcataccaaaatgtggtggacctcgctgaggacaggaaacctcacaacacaatccaggacaacatggaaaactacaggaagctgctctccctcggtgcagcttgctgaagacgatggccactcccacatgacgcagggccactcatcaagatccaagagaagtgcctacccaagcaccagtcgaggtctaaaaactatgcctgaagccaaaaaatcaacccaccggcgggggatttgtgaagatgaatcttcccacggagtgataatggaaaaattcatcaaggatgtgtcacgcagttccaaatcgggaagagcaagggagtcaagcgaccggtcacagagattccccagaatgtcagatgataactggaaggacatttcattgaacaagagggagtcagtgatccagcagcgggtttatgaagggaatgcatttaggggaggctttaggtttaattcaacccttgtttccagaaagagagttcttgaaagaaagaggcgctatcattttgacacagatgggaagggctcgattcacgatcaaaaaggctgtcccaggaagaagccctttgaatgtggtagtgagatgagaaaagccatgagcgtgagcagcctgagcagcctcagctccccctcctttaccgagtcacagccaattgattttggggcaatgccatatgtatgtgatgagtgtgggaggtcgttcagtgtcatctcagaatttgttgagcaccagatcatgcatactagagagaacctctatgagtatggtgagtcctttatccacagtgtggctgtcagtgaagttcagaaaagtcaggttggagggaaacgttttgaatgtaaggactgtggagagaccttcaataagagtgccgccttggctgaacatcggaagattcatgctagaggttatcttgtggaatgtaagaatcaggaatgtgaggaagccttcatgcctagccccacctttagtgagcttcagaaaatatatggcaaagacaaattctacgagtgcagggtgtgtaaggaaaccttccttcatagttctgccctgattgagcaccagaaaatccactttggggatgacaaagataatgagcgtgaacatgaacgtgaacgtgaacgtgagcgcggggaaacctttaggcccagcccagcccttaatgagtttcagaaaatgtatggtaaagagaaaatgtacgaatgtaaggtgtgtggggagactttccttcatagctcatccctgaaagaacatcagaaaatccatactagagggaacccatttgaaaacaagggtaaagtgtgtgaggaaacctttattcctggtcagtcccttaaaaggcgtcagaaaacttacaataaggagaagctctgtgactttacagatggccgggatgccttcatgcaaagctcagagctcagtgagcatcagaaaattcattctcgaaagaacctctttgaaggcagagggtatgagaaatctgtcattcatagtgggccattcactgaatctcagaagagtcatactataacaagacctcttgaaagtgatgaggacgaaaaggcgttcaccattagctctaacccctatgaaaaccagaagattcccactaaggaaaatgtctatgaggcaaaatcatatgagaggtctgttattcatagcttagcctctgtggaagctcagaaaagtcacagtgtagcagggcccagtaaaccaaaagtaatggcagagtctaccattcagagcttcgatgctatcaaccatcagagagttcgtgctggagggaacacctctgaaggaagggaatacagtaggtctgttatccatagcttagtggcttccaaacctccaagaagtcacaatggaaatgaattggtggaatctaatgagaagggagaatcctccatttatatctcagaccttaatgataagcgacagaagattcctgccagagagaacccttgtgaagggggcagtaagaatcgcaactatgaagactctgtcatacagagtgtattccgtgccaaacctcagaaaagtgttcctggagagggatctggtgagtttaagaaggatggcgaattctctgttcccagctcaaatgtccgtgaataccagaaggctcgtgctaaaaagaaatacattgagcataggagcaatgagacctctgtaattcactctctgccttttggtgaacaaacatttcgccctcgagggatgctctatgaatgtcaggagtgtggggagtgctttgctcatagctctgacctcactgagcaccagaagattcatgatagggagaagccctctggaagcagaaactatgaatggtctgtcattcgcagcttggcccctactgaccctcaaacaagttacgcccaagagcagtatgctaaagagcaagcgcggaacaaatgtaaggacttcagacaattttttgctaccagcgaagacctcaacacaaaccagaaaatctatgaccaagagaagtctcatggcgaggagtctcaaggcgagaatactgatggggaggagacccacagcgaggagacccatggtcaggagacaattgaagaccctgtcattcaaggctcagacatggaagaccctcagaaggatgaccctgatgacaaaatctatgaatgtgaggactgtggcctgggctttgtggatctcacagacctcacagaccatcagaaagtccacagcaggaagtgcctggttgacagtcgggagtacacacattctgtaattcacacccattccatcagcgagtatcagagagattacactggagagcagctgtatgaatgtccaaagtgtggggaatcttttattcatagctcattccttttcgagcatcagagaatccatgaacaagaccagttgtattccatgaaggggtgtgatgatggttttattgccctcttgcccatgaagccacggaggaatcgtgctgcagagaggaatcctgctcttgctgggtcggccattcgatgccttttgtgtggacaaggcttcattcatagctctgcccttaatgagcatatgagacttcatagggaagatgatttactggagcagagccagatggctgaggaagctatcattccaggcttagccctcactgagtttcagagaagtcagaccgaagagagactctttgaatgtgcagtctgtggagaatctttcgtcaacccagcagaacttgcagatcacgtaactgttcataagaatgagccctatgagtacgggtcctcctatactcacacctcatttcttactgagcccctcaaaggagctataccattctatgaatgcaaggattgtggtaagtcctttattcatagcacagtcctcactaaacataaggagcttcatctggaagaagaagaagaagatgaagcagcagcagctgcagcagcagcagcccaggaagttgaagccaatgtccatgttccacaagtagttctgaggattcagggcttaaacgtagaggctgctgagccagaagtggaggctgccgagccagaagtggaggctgctgagccagaagtggaggctgctgagccaaacggagaggctgaaggccaaatggggatgctgatgagccagatggtgcaggtattgaagacccagaagaaagagctgaagagccagagggaaaagctgaagagccagagggagatgccgacgagcctgacggtgtgggaattgaagacccagaagaaggtgaagatcaagagattcaggtagaagaaccatactatgactgccatgaatgcacagaaaccttcacttccagcacagcattcagtgaacacctgaaaactcatgccagcatgatcatatttgagcctgcaaatgcctttggggagtgctcaggctacatcgaacgtgccagcaccagcacaggtggtgccaatcaagctgatgagaagtacttcaaatgtgacgtctgtgggcagctcttcaatgaccgcctgtccctcgccagacaccagaatacccacactggctgagggcatggggtaaaggttagaaaaccttcacctaggacttgacccttaccaaaccacagagaatccaaaccaatccatgataatgtcagtaggagacttaaccttagtgtgttacacacctgacttaacatctctaaactcagattgaaaagagaccgaatgtgcagattccacagtcttaagctttccccttcagatgtcagtgtctgcatgtgggaaagccatagcacacatcttacctttccaagtaatcagattgagaaaaccctatgagtattccagactacagagtttgcccaaatcaactgtaaatgacacttgtgtaacgtatatatagtgtttcatgaggtgtatataaaatagcaaattatgacagaacagtgatcacatatatttggatttatatgatatacagttacagtttactctgcagaggtaccttacctggtattctttgaattttttttttttttggaggaggaagagagcaacaaatttgattatatttttaagtgtcttagatcctgagaaagatttattgtgcattatttgaaccctgtcaatatctttttgagtaattgttttgtttcttacccttaaatagtcttgtgaagctgtaggcatgatagataacatggcttttactccttactgtttgaaaagataagtactttagcttctttctgcagccatttcatctgcgccaacactttggaacctaatactgtgtaaggctttacaatatacggattggctttttgtgacccagattgattggttgccacatgttatgtttgttgaagtggttctcatgcaaaaatattacacatttgtgttctgggtttttttttttttttaaccaactcaatatgtgtttgatgatagtgaattgataaaacccgaagcttttccctgtaaatcttacatctttgcctttaaagaatgggttacaaccatcactagatcacagtagtgcctaatgaaggttgagaaccgtaggagaggctctcatgctgtaaataatgttgcaggctaataacctttcatcacttcctttgtgcgcttcctgccttaagtgacaagtagcaacatggcttgggtcccctgtgcagcatcagcttatgctgccacaagtcagtttgcaccctaggtgcccaggagctagtatccttagatctttctatcgctaacttaattctcttcgttatttatctgaccctctaactccatgtctaacttgcattaaaaaaaaaaaaattctttacagtcaacccaagcttaacatggactcaggttccccagcagccttaatttgttttgttaacatctgttccttctttttcagctctcctagagtatttctgagtgttgtgttcatctaatcttagtattcttttaattacaaattgacctcacagcttgaggtttcttgtgtcctattctgtggactacctgtgctcctttgcttcccctcccctcgcataataactatattaagaaattttttttggccttgagttggctggaaaaaaaatataaaatttaaaaaatttaaaaaaaaagatttgcaaaatgtaagtgtagatcatttgaacaagcaaaattaaagtacccactgggggaaatgtgtctgaatcttactcttctggatctgcaggattagggcttggaagtatgtcaaagatgcagggagtgtcaaagtttaggaagattgtagagctgagagcaagaagcagaaatgagtgagtcaaagaagggagtcctaatacatcaccagatctaggaggggagaggagacagacagaagaaaacaccagaggcaagaactgtagaaggccaggtttctgagaatgaattgagcggggtgtcctgagcagtttggaaaaggagtttttgatggtatggtgtaggtgagggctggctgcataggaaggactgaggttggaacggacatcgggaaagctgaggggcagtgaggtttactacatgggaaaaggactcttgaaacgagaatcagtgttgatgtcggggtgaactttgtgggtacattacttggtgttaacattgttggcagtggtagccccttttcagaaagcaacttgctgtaagtcagggtgtccgttccaaccttcagctagtgaaaaggtagtaacaaatggtaaacaagagaatgattgtttaaacctatctgtggacacttaatgcaactgtttaaaaatgataatcacgagttatgtagcaacgtggaaatatatttacagaacattaagtggagaaagcaggacacgaaagtatatttatactacagttataactcaacagttcatttatatgctgttcatttaacagttcatttaaacagttcattataactgtttaaaaatatatatgcttatagtcaaaagctgttgtggtgttgttgttgtaggcttatagttgagcattattttcttaaatttcttgaatgttctttatggtagtgttactaaaaagtttatgatcacattttcattgtgaacataatttgaactcattatcacacacttggaaaatacagaaaagtggaggaaaaaaaatcatatccccaccatccaaagacatatactctcctcttatcttgttcattcttgtttctgtgcacaggtttatgattataactgtgtcaaaatgtatattcaaaatagctgttacattacctttgtggaattatggttaaatactttcactttaattttttcaaatgttccctataataatgtcctgataacagtgtattatgtgtgtctccattggtgtgcataatacatacccagaggaaaaattagaaaataaagtaaattattttaaaaaattacctatattcccaacacctaacaactactgctaacatcttgatctgtttcctctatcttgtttcagtgcacacgcttgtgataacagtgttaaatatgtgtgcataaagtcttaaatgaaaagatgtggaaaataactaaaatagtgttgtcattgtgggaatttggttaaatattttgtctcaaattccttaaataatctttggtgttttggtaataaattttatgtatgtattttccattacaaatataatacatactcatacaaaactttggaaattcagtaaagaaaattcacacatattcccaacacccaacaacaattaactgttaacatcttgatctgtgcactagtctgtgattattagggtgttagtgataagtatgcataaatgtcaaagatgggaagaaagatgaaaaacaagaaatagttgtgtggttgttgtgggattatggttattttgtttcggtttccttgaaaggtcatcattctagtgttttggtagtccacctttactacatatatttccattatatatgaaatgtgttcattatagaaactttgaagttacagaaatgtagaagagaaactcacccatgttttcaccatccaaagagtgtggttaacatcttgatatattttcttcatcttgtttctgtgcacaggtttttggtttgttaatatggttgtggtcattctatctgtaatagtgtcaacaataaaaataaagttaaaaataaatatt

SEQ ID NO: 382142 - DNA, 3651 bp, Homo sapiens
caaatggtaaacaagagaatgattgtttaaacctatctgtggacacttaatgcaactgtttaaaaatgataatcacgagttatgtagcaacgtggaaatatatttacagaacattaagtggagaaagcaggacacgaaagtatatttatactacagttataactcaacagttcatttatatgctgttcatttaacagttcatttaaacagttcattataactgtttaaaaatatatatgcttatagtcaaaagctgttgtggtgttgttgttgtaggcttatagttgagcattattttcttaaatttcttgaatgttctttatggtagtgttactaaaaagtttatgatcacattttcattgtgaacataatttgaactcattatcacacacttggaaaatacagaaaagtggaggaaaaaaaatcatatccccaccatccaaagacatatactctcctcttatcttgttcattcttgtttctgtgcacaggtttatgattataactgtgtcaaaatgtatattcaaaatagctgttacattacctttgtggaattatggttaaatactttcactttaattttttcaaatgttccctataataatgtcctgataacagtgtattatgtgtgtctccattggtgtgcataatacatacccagaggaaaaattagaaaataaagtaaattattttaaaaaattacctatattcccaacacctaacaactactgctaacatcttgatctgtttcctctatcttgtttcagtgcacacgcttgtgataacagtgttaaatatgtgtgccataaagtcttaaatgaaaagatgtggaaaataactaaaatagtgttgtcattgtgggaatttggttaaatattttgtctcaaattccttaaatttttttttttttaaccaactcaatatgtgtttgatgatagtgaattgataaaacccgaagcttttccctgtaaatcttacatctttgcctttaaagaatgggttacaaccatcactagatcacagtagtgcctaatgaaggttgagaaccgtaggagaggctctcatgctgtaaataatgttgcaggctaataacctttcatcacttcctttgtgcgcttcctgccttaagtgacaagtagcaacatggcttgggtcccctgtgcagcatcagcttatgctgccacaagtcagtttgcaccctaggtgcccaggagctagtatccttagatctttctatcgctaacttaattctcttcgttatttatctgaccctctaactccatgtctaacttgcattaaaaaaaaaaaaattctttacagtcaacccaagcttaacatggactcaggttccccagcagccttaatttgttttgttaacatctgttccttctttttcagctctcctagagtatttctgagtgttgtgttcatctaatcttagtattcttttaattacaaattgacctcacagcttgaggtttcttgtgtcctattctgtggactacctgtgctcctttgcttcccctcccctcgcataataactatattaagaaattttttttggccttgagttggctggaaaaaaaatataaaatttaaaaaatttaaaaaaaaagatttgcaaaatgtaagtgtagatcatttgaacaagcaaaattaaagtacccactgggggaaatgtgtctgaatcttactcttctggatctgcaggattagggcttggaagtatgtcaaagatgcagggagtgtcaaagtttaggaagattgtagagctgagagcaagaagcagaaatgagtgagtcaaagaagggagtcctaatacatcaccagatctaggaggggagaggagacagacagaagaaaacaccagaggcaagaactgtagaaggccaggtttctgagaatgaattgagcggggtgtcctgagcagtttggaaaaggagtttttgatggtatggtgtaggtgagggctggctgcataggaaggactgaggttggaacggacatcgggaaagctgaggggcagtgaggtttactacatgggaaaaggactcttgaaacgagaatcagtgttgatgtcggggtgaactttgtgggtacattacttggtgttaacattgttggcagtggtagccccttttcagaaagcaacttgctgtaagtcagggtgtccgttccaaccttcagctagtgaaaaggtagtaacaaatggtaaacaagagaatgattgtttaaacctatctgtggacacttaatgcaactgtttaaaaatgataatcacgagttatgtagcaacgtggaaatatatttacagaacattaagtggagaaagcaggacacgaaagtatatttatactacagttataactcaacagttcatttatatgctgttcatttaacagttcatttaaacagttcattataactgtttaaaaatatatatgcttatagtcaaaagctgttgtggtgttgttgttgtaggcttatagttgagcattattttcttaaatttcttgaatgttctttatggtagtgttactaaaaagtttatgatcacattttcattgtgaacataatttgaactcattatcacacacttggaaaatacagaaaagtggaggaaaaaaaatcatatccccaccatccaaagacatatactctcctcttatcttgttcattcttgtttctgtgcacaggtttatgattataactgtgtcaaaatgtatattcaaaatagctgttacattacctttgtggaattatggttaaatactttcactttaattttttcaaatgttccctataataatgtcctgataacagtgtattatgtgtgtctccattggtgtgcataatacatacccagaggaaaaattagaaaataaagtaaattattttaaaaaattacctatattcccaacacctaacaactactgctaacatcttgatctgtttcctctatcttgtttcagtgcacacgcttgtgataacagtgttaaatatgtgtgcataaagtcttaaatgaaaagatgtggaaaataactaaaatagtgttgtcattgtgggaatttggttaaatattttgtctcaaattccttaaataatctttggtgttttggtaataaattttatgtatgtattttccattacaaatataatacatactcatacaaaactttggaaattcagtaaagaaaattcacacatattcccaacacccaacaacaattaactgttaacatcttgatctgtgcactagtctgtgattattagggtgttagtgataagtatgcataaatgtcaaagatgggaagaaagatgaaaaacaagaaatagttgtgtggttgttgtgggattatggttattttgtttcggtttccttgaaaggtcatcattctagtgttttggtagtccacctttactacatatatttccattatatatgaaatgtgttcattatagaaactttgaagttacagaaatgtagaagagaaactcacccatgttttcaccatccaaagagtgtggttaacatcttgatatattttcttcatcttgtttctgtgcacaggtttttggtttgttaatatggttgtggtcattctatctgtaatagtgtcaacaataaaaataaagttaaaaataaatatt

SEQ ID NO: 382143 - DNA, 2576 bp, Homo sapiens
ccttaagtgacaagtagcacaggggacccaagccatgttgctacttgtcacttaaggcaggaagcaacatggcttgggtcccctgtgcagcatcagcttatgctgccacaagtcagtttgcaccctaggtgcccaggagctagtatccttagatctttctatcgctaacttaattctcttcgttatttatctgaccctctaactccatgtctaacttgcattaaaaaaaaaaaaattctttacagtcaacccaagcttaacatggactcaggttccccagcagccttaatttgttttgttaacatctgttccttctttttcagctctcctagagtatttctgagtgttgtgttcatctaatcttagtattcttttaattacaaattgacctcacagcttgaggtttcttgtgtcctattctgtggactacctgtgctcctttgcttcccctcccctcgcataataactatattaagaaattttttttggccttgagttggctggaaaaaaaatataaaatttaaaaaatttaaaaaaaaagatttgcaaaatgtaagtgtagatcatttgaacaagcaaaattaaagtacccactgggggaaatgtgtctgaatcttactcttctggatctgcaggattagggcttggaagtatgtcaaagatgcagggagtgtcaaagtttaggaagattgtagagctgagagcaagaagcagaaatgagtgagtcaaagaagggagtcctaatacatcaccagatctaggaggggagaggagacagacagaagaaaacaccagaggcaagaactgtagaaggccaggtttctgagaatgaattgagcggggtgtcctgagcagtttggaaaaggagtttttgatggtatggtgtaggtgagggctggctgcataggaaggactgaggttggaacggacatcgggaaagctgaggggcagtgaggtttactacatgggaaaaggactcttgaaacgagaatcagtgttgatgtcggggtgaactttgtgggtacattacttggtgttaacattgttggcagtggtagccccttttcagaaagcaacttgctgtaagtcagggtgtccgttccaaccttcagctagtgaaaaggtagtaacaaatggtaaacaagagaatgattgtttaaacctatctgtggacacttaatgcaactgtttaaaaatgataatcacgagttatgtagcaacgtggaaatatatttacagaacattaagtggagaaagcaggacacgaaagtatatttatactacagttataactcaacagttcatttatatgctgttcatttaacagttcatttaaacagttcattataactgtttaaaaatatatatgcttatagtcaaaagctgttgtggtgttgttgttgtaggcttatagttgagcattattttcttaaatttcttgaatgttctttatggtagtgttactaaaaagtttatgatcacattttcattgtgaacataatttgaactcattatcacacacttggaaaatacagaaaagtggaggaaaaaaaatcatatccccaccatccaaagacatatactctcctcttatcttgttcattcttgtttctgtgcacaggtttatgattataactgtgtcaaaatgtatattcaaaatagctgttacattacctttgtggaattatggttaaatactttcactttaattttttcaaatgttccctataataatgtcctgataacagtgtattatgtgtgtctccattggtgtgcataatacatacccagaggaaaaattagaaaataaagtaaattattttaaaaaattacctatattcccaacacctaacaactactgctaacatcttgatctgtttcctctatcttgtttcagtgcacacgcttgtgataacagtgttaaatatgtgtgcataaagtcttaaatgaaaagatgtggaaaataactaaaatagtgttgtcattgtgggaatttggttaaatattttgtctcaaattccttaaataatctttggtgttttggtaataaattttatgtatgtattttccattacaaatataatacatactcatacaaaactttggaaattcagtaaagaaaattcacacatattcccaacacccaacaacaattaactgttaacatcttgatctgtgcactagtctgtgattattagggtgttagtgataagtatgcataaatgtcaaagatgggaagaaagatgaaaaacaagaaatagttgtgtggttgttgtgggattatggttattttgtttcggtttccttgaaaggtcatcattctagtgttttggtagtccacctttactacatatatttccattatatatgaaatgtgttcattatagaaactttgaagttacagaaatgtagaagagaaactcacccatgttttcaccatccaaagagtgtggttaacatcttgatatattttcttcatcttgtttctgtgcacaggtttttggtttgttaatatggttgtggtcattctatctgtaatagtgtcaacaataaaaataaagttaaaaataaatatt

SEQ ID NO: 382144 - DNA, 2739 bp, Homo sapiens
gaccacagagaacgccgcagatgtatcactccttaggctatggtaccgcccccccgatctttttaccaaccaaaggcttaaaataaggaatttataacccagaacttttccctgtaaatcttacatctttgcctttaaagaatgggttacaaccatcactagatcacagtagtgcctaatgaaggttgagaaccgtaggagaggctctcatgctgtaaataatgttgcaggctaataacctttcatcacttcctttgtgcgcttcctgccttaagtgacaagtagcaacatggcttgggtcccctgtgcagcatcagcttatgctgccacaagtcagtttgcaccctaggtgcccaggagctagtatccttagatctttctatcgctaacttaattctcttcgttatttatctgaccctctaactccatgtctaacttgcattaaaaaaaaaaaaattctttacagtcaacccaagcttaacatggactcaggttccccagcagccttaatttgttttgttaacatctgttccttctttttcagctctcctagagtatttctgagtgttgtgttcatctaatcttagtattcttttaattacaaattgacctcacagcttgaggtttcttgtgtcctattctgtggactacctcttgagttggctggaaaaaaaatataaaatttaaaaaatttaaaaaaaaagatttgcaaaatgtaagtgtagatcatttgaacaagcaaaattaaagtacccactgggggaaatgtgtctgaatcttactcttctggatctgcaggattagggcttggaagtatgtcaaagatgcagggagtgtcaaagtttaggaagattgtagagctgagagcaagaagcagaaatgagtgagtcaaagaagggagtcctaatacatcaccagatctaggaggggagaggagacagacagaagaaaacaccagaggcaagaactgtagaaggccaggtttctgagaatgaattgagcggggtgtcctgagcagtttggaaaaggagtttttgatggtatggtgtaggtgagggctggctgcataggaaggactgaggttggaacggacatcgggaaagctgaggggcagtgaggtttactacatgggaaaaggactcttgaaacgagaatcagtgttgatgtcggggtgaactttgtgggtacattacttggtgttaacattgttggcagtggtagccccttttcagaaagcaacttgctgtaagtcagggtgtccgttccaaccttcagctagtgaaaaggtagtaacaaatggtaaacaagagaatgattgtttaaacctatctgtggacacttaatgcaactgtttaaaaatgataatcacgagttatgtagcaacgtggaaatatatttacagaacattaagtggagaaagcaggacacgaaagtatatttatactacagttataactcaacagttcatttatatgctgttcatttaacagttcatttaaacagttcattataactgtttaaaaatatatatgcttatagtcaaaagctgttgtggtgttgttgttgtaggcttatagttgagcattattttcttaaatttcttgaatgttctttatggtagtgttactaaaaagtttatgatcacattttcattgtgaacataatttgaactcattatcacacacttggaaaatacagaaaagtggaggaaaaaaaatcatatccccaccatccaaagacatatactctcctcttatcttgttcattcttgtttctgtgcacaggtttatgattataactgtgtcaaaatgtatattcaaaatagctgttacattacctttgtggaattatggttaaatactttcactttaattttttcaaatgttccctataataatgtcctgataacagtgtattatgtgtgtctccattggtgtgcataatacatacccagaggaaaaattagaaaataaagtaaattattttaaaaaattacctatattcccaacacctaacaactactgctaacatcttgatctgtttcctctatcttgtttcagtgcacacgcttgtgataacagtgttaaatatgtgtgcataaagtcttaaatgaaaagatgtggaaaataactaaaatagtgttgtcattgtgggaatttggttaaatattttgtctcaaattccttaaataatctttggtgttttggtaataaattttatgtatgtattttccattacaaatataatacatactcatacaaaactttggaaattcagtaaagaaaattcacacatattcccaacacccaacaacaattaactgttaacatcttgatctgtgcactagtctgtgattattagggtgttagtgataagtatgcataaatgtcaaagatgggaagaaagatgaaaaacaagaaatagttgtgtggttgttgtgggattatggttattttgtttcggtttccttgaaaggtcatcattctagtgttttggtagtccacctttactacatatatttccattatatatgaaatgtgttcattatagaaactttgaagttacagaaatgtagaagagaaactcacccatgttttcaccatccaaagagtgtggttaacatcttgatatattttcttcatcttgtttctgtgcacaggtttttggtttgttaatatggttgtggtcattctatctgtaatagtgtcaacaataaaaataaagttaaaaataaatatt

SEQ ID NO: 382145 - DNA, 1160 bp, Homo sapiens
acttctagggcattagacaagttgcccacagtcccaagttagtagcccaagttagtagccgagctaactcctcgagtaggtctctgtgaagcccagaggtcatgcttgtaactgctgtgctgaggccaactttgtgcggttgtttgcctatttactggggactcccatatcccaaaagcattgtcgatgcctctggtaaggtggcctccactgctgcctggtcttcaacttctgggacatgtgtatatctccttacgatccacaggtccctgagtactgacggtcacaggctgccgcgtctttcctgttgactcatgtttggttcctccagtgaaaattttacttagagaaatgctgcctccaaagcacttgtctgccaccaaacctaagaagtcctgggccccaaatctgtatgagctagacagtgacttgactaaggagccggatgtcatcataggagaaggtccaactgactctgagttttttcatcagaggtttcggaacctaatctatgtggaatttgttgggcctcggaagaccctgatcaaactccgaaacctctgcctcgattggttgcagccggagacccgcaccaaggaggagatcatcgagctcttggtccttgagcagtacctgaccatcatccctgaaaagctcaagccttgggtgcgagcaaaaaagccggagaactgtgagaagctcgtcactctgctggagaattacaaggagatgtaccaaccagaagacgacaacaacagtgacgtgaccagcgacgacgacatgacccggaacagaagagagtcctcaccacctcactcagtccattctttcagtgaccgggactgggaccggaggggcagaagcagagacatggagccacgagaccgctggtcccacaccaggaacccaagaagcagtgagtcttaaccactttctttcccagtaggagatatagagcatgtgctgtgcacaggttcaaggggaaagtgccagggcctcgaagtttctgctgctccatttggagtatattccgcttccccaaaagtttagtccaaggctcgtatttttgaagttccactcggtaccaccagcacaggtttcaccacatagacctgttgccacctaaactatttgctcagtattcttaagctggtgcatta

SEQ ID NO: 382146 - DNA, 211 bp, Homo sapiens
gtttccttgctcaggactctgtccctgcagaaaagaggaacacagagatgttagacaatctgccatctgctgggtcccaggtgagtcaggctttcctctgacatggttatcaaatatggggatcttatcttcctaatttgtggacttccttatttaattaaaccacatactcatttccattaagtttttatataaatatcactttactgag

SEQ ID NO: 382147 - DNA, 777 bp, Homo sapiens
ggtgcagaagtctgggcagctgcgggaggagaggtttgggaggcgcgggagatgtccaccctgggctggtggcgccgccgggcgccgggcgccatgagggtgcgctaggcggctgttcgtgcccgaggctgcgcagcactgaggtgagctttgccttcttgatcttccgtccttcttggagacgactggcgagaggaagagggactaggtccaaacgctaggtggctgggtccagccggagacccgcaccaaggaggagatcatcgagctcttggtccttgagcagtacctgaccatcatccctgaaaagctcaagccttgggtgcgagcaaaaaagccggagaactgtgagaagtggttgtgtggtccgcgtctcggaaaccggtagcgcttgcagcatggctgaccaactgactgaagagcagattgcagaattcaaagaagctttttcactatttgacaaagatggtgatggaactataacaacaaaggaattgggaactgtaatgagatctcttgggcagaatcccacagaagcagagttacaggacatgattaatgaagtagatgctgatggtaatggcacaattgacttccctgaatttctgacaatgatggcaagaaaaatgaaagacacagacagtgaaagaagaaattagagaagcattccgtgtgtttgataaggatggcaatggctatattagtgctgcagaacttcgccatgtgatgaccaaccttggagagaagttaccagatgaagaagttgatgacatgatc

SEQ ID NO: 382148 - DNA, 8373 bp, Homo sapiens
ggtgcagaagtctgggcagctgcgggaggagaggtttgggaggcgcgggagatgtccaccctgggctggtggcgccgccgggcgccgggcgccatgagggtgcgctaggcggctgttcgtgcccgaggctgcgcagcactgaggtgagctttgccttcttgatcttccgtccttcttggagacgactggcgagaggaagagggactaggtccaaacgctaggtggctgggtccagccggagacccgcaccaaggaggagatcatcgagctcttggtccttgagcagtacctgaccatcatccctgaaaagctcaagccttgggtgcgagcaaaaaagccggagaactgtgagaagctcgtcactctgctggagaattacaaggagatgtaccaaccagaagacgacaacaacagtgacgtgaccagcgacgacgacatgacccggaacagaagagagtcctcaccacctcactcagtccattctttcagtgaccgggactgggaccggaggggcagaagcagagacatggagccacgagaccgctggtcccacaccaggaacccaagaagcaggatgcctccgcgggatctttcccttcctgtggtggcgaaaacaagctttgaaatggacagagaggacgacagggactccagggcttatgagtcccgatctcaggatgctgaatcataccaaaatgtggtggacctcgctgaggacaggaaacctcacaacacaatccaggacaacatggaaaactacaggaagctgctctccctcggtgcagcttgctgaagacgatggccactcccacatgacgcagggccactcatcaagatccaagagaagtgcctacccaagcaccagtcgaggtctaaaaactatgcctgaagccaaaaaatcaacccaccggcgggggatttgtgaagatgaatcttcccacggagtgataatggaaaaattcatcaaggatgtgtcacgcagttccaaatcgggaagagcaagggagtcaagcgaccggtcacagagattccccagaatgtcagatgataactggaaggacatttcattgaacaagagggagtcagtgatccagcagcgggtttatgaagggaatgcatttaggggaggctttaggtttaattcaacccttgtttccagaaagagagttcttgaaagaaagaggcgctatcattttgacacagatgggaagggctcgattcacgatcaaaaaggctgtcccaggaagaagccctttgaatgtggtagtgagatgagaaaagccatgagcgtgagcagcctgagcagcctcagctccccctcctttaccgagtcacagccaattgattttggggcaatgccatatgtatgtgatgagtgtgggaggtcgttcagtgtcatctcagaatttgttgagcaccagatcatgcatactagagagaacctctatgagtatggtgagtcctttatccacagtgtggctgtcagtgaagttcagaaaagtcaggttggagggaaacgttttgaatgtaaggactgtggagagaccttcaataagagtgccgccttggctgaacatcggaagattcatgctagaggttatcttgtggaatgtaagaatcaggaatgtgaggaagccttcatgcctagccccacctttagtgagcttcagaaaatatatggcaaagacaaattctacgagtgcagggtgtgtaaggaaaccttccttcatagttctgccctgattgagcaccagaaaatccactttggggatgacaaagataatgagcgtgaacatgaacgtgaacgtgaacgtgagcgcggggaaacctttaggcccagcccagcccttaatgagtttcagaaaatgtatggtaaagagaaaatgtacgaatgtaaggtgtgtggggagactttccttcatagctcatccctgaaagaacatcagaaaatccatactagagggaacccatttgaaaacaagggtaaagtgtgtgaggaaacctttattcctggtcagtcccttaaaaggcgtcagaaaacttacaataaggagaagctctgtgactttacagatggccgggatgccttcatgcaaagctcagagctcagtgagcatcagaaaattcattctcgaaagaacctctttgaaggcagagggtatgagaaatctgtcattcatagtgggccattcactgaatctcagaagagtcatactataacaagacctcttgaaagtgatgaggacgaaaaggcgttcaccattagctctaacccctatgaaaaccagaagattcccactaaggaaaatgtctatgaggcaaaatcatatgagaggtctgttattcatagcttagcctctgtggaagctcagaaaagtcacagtgtagcagggcccagtaaaccaaaagtaatggcagagtctaccattcagagcttcgatgctatcaaccatcagagagttcgtgctggagggaacacctctgaaggaagggaatacagtaggtctgttatccatagcttagtggcttccaaacctccaagaagtcacaatggaaatgaattggtggaatctaatgagaagggagaatcctccatttatatctcagaccttaatgataagcgacagaagattcctgccagagagaacccttgtgaagggggcagtaagaatcgcaactatgaagactctgtcatacagagtgtattccgtgccaaacctcagaaaagtgttcctggagagggatctggtgagtttaagaaggatggcgaattctctgttcccagctcaaatgtccgtgaataccagaaggctcgtgctaaaaagaaatacattgagcataggagcaatgagacctctgtaattcactctctgccttttggtgaacaaacatttcgccctcgagggatgctctatgaatgtcaggagtgtggggagtgctttgctcatagctctgacctcactgagcaccagaagattcatgatagggagaagccctctggaagcagaaactatgaatggtctgtcattcgcagcttggcccctactgaccctcaaacaagttacgcccaagagcagtatgctaaagagcaagcgcggaacaaatgtaaggacttcagacaattttttgctaccagcgaagacctcaacacaaaccagaaaatctatgaccaagagaagtctcatggcgaggagtctcaaggcgagaatactgatggggaggagacccacagcgaggagacccatggtcaggagacaattgaagaccctgtcattcaaggctcagacatggaagaccctcagaaggatgaccctgatgacaaaatctatgaatgtgaggactgtggcctgggctttgtggatctcacagacctcacagaccatcagaaagtccacagcaggaagtgcctggttgacagtcgggagtacacacattctgtaattcacacccattccatcagcgagtatcagagagattacactggagagcagctgtatgaatgtccaaagtgtggggaatcttttattcatagctcattccttttcgagcatcagagaatccatgaacaagaccagttgtattccatgaaggggtgtgatgatggttttattgccctcttgcccatgaagccacggaggaatcgtgctgcagagaggaatcctgctcttgctgggtcggccattcgatgccttttgtgtggacaaggcttcattcatagctctgcccttaatgagcatatgagacttcatagggaagatgatttactggagcagagccagatggctgaggaagctatcattccaggcttagccctcactgagtttcagagaagtcagaccgaagagagactctttgaatgtgcagtctgtggagaatctttcgtcaacccagcagaacttgcagatcacgtaactgttcataagaatgagccctatgagtacgggtcctcctatactcacacctcatttcttactgagcccctcaaaggagctataccattctatgaatgcaaggattgtggtaagtcctttattcatagcacagtcctcactaaacataaggagcttcatctggaagaagaagaagaagatgaagcagcagcagctgcagcagcagcagcccaggaagttgaagccaatgtccatgttccacaagtagttctgaggattcagggcttaaacgtagaggctgctgagccagaagtggaggctgccgagccagaagtggaggctgctgagccagaagtggaggctgctgagccaaacggagaggctgaagggccagatggagaggctgcagagcccattggagaggctggacagccaaatggagaggccgagcagccaaatggggatgctgatgagccagatggtgcaggtattgaagacccagaagaaagagctgaagagccagagggaaaagctgaagagccagagggagatgccgacgagcctgacggtgtgggaattgaagacccagaagaaggtgaagatcaagagattcaggtagaagaaccatactatgactgccatgaatgcacagaaaccttcacttccagcacagcattcagtgaacacctgaaaactcatgccagcatgatcatatttgagcctgcaaatgcctttggggagtgctcaggctacatcgaacgtgccagcaccagcacaggtggtgccaatcaagctgatgagaagtacttcaaatgtgacgtctgtgggcagctcttcaatgaccgcctgtccctcgccagacaccagaatacccacactggctgagggcatggggtaaaggttagaaaaccttcacctaggacttgacccttaccaaaccacagagaatccaaaccaatccatgataatgtcagtaggagacttaaccttagtgtgttacacacctgacttaacatctctaaactcagattgaaaagagaccgaatgtgcagattccacagtcttaagctttccccttcagatgtcagtgtctgcatgtgggaaagccatagcacacatcttacctttccaagtaatcagattgagaaaaccctatgagtattccagactacagagtttgcccaaatcaactgtaaatgacacttgtgtaacgtatatatagtgtttcatgaggtgtatataaaatagcaaattatgacagaacagtgatcacatatatttggatttatatgatatacagttacagtttactctgcagaggtaccttacctggtattctttgaattttttttttttttggaggaggaagagagcaacaaatttgattatatttttaagtgtcttagatcctgagaaagatttattgtgcattatttgaaccctgtcaatatctttttgagtaattgttttgtttcttacccttaaatagtcttgtgaagctgtaggcatgatagataacatggcttttactccttactgtttgaaaagataagtactttagcttctttctgcagccatttcatctgcgccaacactttggaacctaatactgtgtaaggctttacaatatacggattggctttttgtgacccagattgattggttgccacatgttatgtttgttgaagtggttctcatgcaaaaatattacacatttgtgttctgggtttttttttttttttaaccaactcaatatgtgtttgatgatagtgaattgataaaacccgaagcttttccctgtaaatcttacatctttgcctttaaagaatgggttacaaccatcactagatcacagtagtgcctaatgaaggttgagaaccgtaggagaggctctcatgctgtaaataatgttgcaggctaataacctttcatcacttcctttgtgcgcttcctgccttaagtgacaagtagcaacatggcttgggtcccctgtgcagcatcagcttatgctgccacaagtcagtttgcaccctaggtgcccaggagctagtatccttagatctttctatcgctaacttaattctcttcgttatttatctgaccctctaactccatgtctaacttgcattaaaaaaaaaaaaattctttacagtcaacccaagcttaacatggactcaggttccccagcagccttaatttgttttgttaacatctgttccttctttttcagctctcctagagtatttctgagtgttgtgttcatctaatcttagtattcttttaattacaaattgacctcacagcttgaggtttcttgtgtcctattctgtggactacctgtgctcctttgcttcccctcccctcgcataataactatattaagaaattttttttggccttgagttggctggaaaaaaaatataaaatttaaaaaatttaaaaaaaaagatttgcaaaatgtaagtgtagatcatttgaacaagcaaaattaaagtacccactgggggaaatgtgtctgaatcttactcttctggatctgcaggattagggcttggaagtatgtcaaagatgcagggagtgtcaaagtttaggaagattgtagagctgagagcaagaagcagaaatgagtgagtcaaagaagggagtcctaatacatcaccagatctaggaggggagaggagacagacagaagaaaacaccagaggcaagaactgtagaaggccaggtttctgagaatgaattgagcggggtgtcctgagcagtttggaaaaggagtttttgatggtatggtgtaggtgagggctggctgcataggaaggactgaggttggaacggacatcgggaaagctgaggggcagtgaggtttactacatgggaaaaggactcttgaaacgagaatcagtgttgatgtcggggtgaactttgtgggtacattacttggtgttaacattgttggcagtggtagccccttttcagaaagcaacttgctgtaagtcagggtgtccgttccaaccttcagctagtgaaaaggtagtaacaaatggtaaacaagagaatgattgtttaaacctatctgtggacacttaatgcaactgtttaaaaatgataatcacgagttatgtagcaacgtggaaatatatttacagaacattaagtggagaaagcaggacacgaaagtatatttatactacagttataactcaacagttcatttatatgctgttcatttaacagttcatttaaacagttcattataactgtttaaaaatatatatgcttatagtcaaaagctgttgtggtgttgttgttgtaggcttatagttgagcattattttcttaaatttcttgaatgttctttatggtagtgttactaaaaagtttatgatcacattttcattgtgaacataatttgaactcattatcacacacttggaaaatacagaaaagtggaggaaaaaaaatcatatccccaccatccaaagacatatactctcctcttatcttgttcattcttgtttctgtgcacaggtttatgattataactgtgtcaaaatgtatattcaaaatagctgttacattacctttgtggaattatggttaaatactttcactttaattttttcaaatgttccctataataatgtcctgataacagtgtattatgtgtgtctccattggtgtgcataatacatacccagaggaaaaattagaaaataaagtaaattattttaaaaaattacctatattcccaacacctaacaactactgctaacatcttgatctgtttcctctatcttgtttcagtgcacacgcttgtgataacagtgttaaatatgtgtgcataaagtcttaaatgaaaagatgtggaaaataactaaaatagtgttgtcattgtgggaatttggttaaatattttgtctcaaattccttaaataatctttggtgttttggtaataaattttatgtatgtattttccattacaaatataatacatactcatacaaaactttggaaattcagtaaagaaaattcacacatattcccaacacccaacaacaattaactgttaacatcttgatctgtgcactagtctgtgattattagggtgttagtgataagtatgcataaatgtcaaagatgggaagaaagatgaaaaacaagaaatagttgtgtggttgttgtgggattatggttattttgtttcggtttccttgaaaggtcatcattctagtgttttggtagtccacctttactacatatatttccattatatatgaaatgtgttcattatagaaactttgaagttacagaaatgtagaagagaaactcacccatgttttcaccatccaaagagtgtggttaacatcttgatatattttcttcatcttgtttctgtgcacaggtttttggtttgttaatatggttgtggtcattctatctgtaatagtgtcaacaataaaaataaagttaaaaataaatatt

SEQ ID NO: 382149 - DNA, 8315 bp, Homo sapiens
ggtgcagaagtctgggcagctgcgggaggagaggtttgggaggcgcgggagatgtccaccctgggctggtggcgccgccgggcgccgggcgccatgagggtgcgctaggcggctgttcgtgcccgaggctgcgcagcactgaggtgagctttgccttcttgatcttccgtccttcttggagacgactggcgagaggaagagggactaggtccaaacgctaggtggctgggtccagccggagacccgcaccaaggaggagatcatcgagctcttggtccttgagcagtacctgaccatcatccctgaaaagctcaagccttgggtgcgagcaaaaaagccggagaactgtgagaagctcgtcactctgctggagaattacaaggagatgtaccaaccagaagacgacaacaacagtgacgtgaccagcgacgacgacatgacccggaacagaagagagtcctcaccacctcactcagtccattctttcagtgaccgggactgggaccggaggggcagaagcagagacatggagccacgagaccgctggtcccacaccaggaacccaagaagcaggatgcctccgcgggatctttcccttcctgtggtggcgaaaacaagctttgaaatggacagagaggacgacagggactccagggcttatgagtcccgatctcaggatgctgaatcataccaaaatgtggtggacctcgctgaggacaggaaacctcacaacacaatccaggacaacatggaaaactacaggaagctgctctccctcggtgcagcttgctgaagacgatggccactcccacatgacgcagggccactcatcaagatccaagagaagtgcctacccaagcaccagtcgaggtctaaaaactatgcctgaagccaaaaaatcaacccaccggcgggggatttgtgaagatgaatcttcccacggagtgataatggaaaaattcatcaaggatgtgtcacgcagttccaaatcgggaagagcaagggagtcaagcgaccggtcacagagattccccagaatgtcagatgataactggaaggacatttcattgaacaagagggagtcagtgatccagcagcgggtttatgaagggaatgcatttaggggaggctttaggtttaattcaacccttgtttccagaaagagagttcttgaaagaaagaggcgctatcattttgacacagatgggaagggctcgattcacgatcaaaaaggctgtcccaggaagaagccctttgaatgtggtagtgagatgagaaaagccatgagcgtgagcagcctgagcagcctcagctccccctcctttaccgagtcacagccaattgattttggggcaatgccatatgtatgtgatgagtgtgggaggtcgttcagtgtcatctcagaatttgttgagcaccagatcatgcatactagagagaacctctatgagtatggtgagtcctttatccacagtgtggctgtcagtgaagttcagaaaagtcaggttggagggaaacgttttgaatgtaaggactgtggagagaccttcaataagagtgccgccttggctgaacatcggaagattcatgctagaggttatcttgtggaatgtaagaatcaggaatgtgaggaagccttcatgcctagccccacctttagtgagcttcagaaaatatatggcaaagacaaattctacgagtgcagggtgtgtaaggaaaccttccttcatagttctgccctgattgagcaccagaaaatccactttggggatgacaaagataatgagcgtgaacatgaacgtgaacgtgaacgtgagcgcggggaaacctttaggcccagcccagcccttaatgagtttcagaaaatgtatggtaaagagaaaatgtacgaatgtaaggtgtgtggggagactttccttcatagctcatccctgaaagaacatcagaaaatccatactagagggaacccatttgaaaacaagggtaaagtgtgtgaggaaacctttattcctggtcagtcccttaaaaggcgtcagaaaacttacaataaggagaagctctgtgactttacagatggccgggatgccttcatgcaaagctcagagctcagtgagcatcagaaaattcattctcgaaagaacctctttgaaggcagagggtatgagaaatctgtcattcatagtgggccattcactgaatctcagaagagtcatactataacaagacctcttgaaagtgatgaggacgaaaaggcgttcaccattagctctaacccctatgaaaaccagaagattcccactaaggaaaatgtctatgaggcaaaatcatatgagaggtctgttattcatagcttagcctctgtggaagctcagaaaagtcacagtgtagcagggcccagtaaaccaaaagtaatggcagagtctaccattcagagcttcgatgctatcaaccatcagagagttcgtgctggagggaacacctctgaaggaagggaatacagtaggtctgttatccatagcttagtggcttccaaacctccaagaagtcacaatggaaatgaattggtggaatctaatgagaagggagaatcctccatttatatctcagaccttaatgataagcgacagaagattcctgccagagagaacccttgtgaagggggcagtaagaatcgcaactatgaagactctgtcatacagagtgtattccgtgccaaacctcagaaaagtgttcctggagagggatctggtgagtttaagaaggatggcgaattctctgttcccagctcaaatgtccgtgaataccagaaggctcgtgctaaaaagaaatacattgagcataggagcaatgagacctctgtaattcactctctgccttttggtgaacaaacatttcgccctcgagggatgctctatgaatgtcaggagtgtggggagtgctttgctcatagctctgacctcactgagcaccagaagattcatgatagggagaagccctctggaagcagaaactatgaatggtctgtcattcgcagcttggcccctactgaccctcaaacaagttacgcccaagagcagtatgctaaagagcaagcgcggaacaaatgtaaggacttcagacaattttttgctaccagcgaagacctcaacacaaaccagaaaatctatgaccaagagaagtctcatggcgaggagtctcaaggcgagaatactgatggggaggagacccacagcgaggagacccatggtcaggagacaattgaagaccctgtcattcaaggctcagacatggaagaccctcagaaggatgaccctgatgacaaaatctatgaatgtgaggactgtggcctgggctttgtggatctcacagacctcacagaccatcagaaagtccacagcaggaagtgcctggttgacagtcgggagtacacacattctgtaattcacacccattccatcagcgagtatcagagagattacactggagagcagctgtatgaatgtccaaagtgtggggaatcttttattcatagctcattccttttcgagcatcagagaatccatgaacaagaccagttgtattccatgaaggggtgtgatgatggttttattgccctcttgcccatgaagccacggaggaatcgtgctgcagagaggaatcctgctcttgctgggtcggccattcgatgccttttgtgtggacaaggcttcattcatagctctgcccttaatgagcatatgagacttcatagggaagatgatttactggagcagagccagatggctgaggaagctatcattccaggcttagccctcactgagtttcagagaagtcagaccgaagagagactctttgaatgtgcagtctgtggagaatctttcgtcaacccagcagaacttgcagatcacgtaactgttcataagaatgagccctatgagtacgggtcctcctatactcacacctcatttcttactgagcccctcaaaggagctataccattctatgaatgcaaggattgtggtaagtcctttattcatagcacagtcctcactaaacataaggagcttcatctggaagaagaagaagaagatgaagcagcagcagctgcagcagcagcagcccaggaagttgaagccaatgtccatgttccacaagtagttctgaggattcagggcttaaacgtagaggctgctgagccagaagtggaggctgccgagccagaagtggaggctgctgagccagaagtggaggctgctgagccaaacggagaggctgaagggccagatggagaggctgcagagcccattggagaggctggacagccaaatggagaggccgagcagccaaatggggatgctgatgagccagatggtgcaggtattgaagacccagaagaaagagctgaagagccagagggaaaagctgaagagccagagggagatgccgacgagcctgacggtgtgggaattgaagacccagaagaaggtgaagatcaagagattcaggtagaagaaccatactatgactgccatgaatgcacagaaaccttcacttccagcacagcattcagtgaacacctgaaaactcatgccagcatgatcatatttgagcctgcaaatgcctttggggagtgctcaggctacatcgaacgtgccagcaccagcacaggtggtgccaatcaagctgatgagaagtacttcaaatgtgacgtctgtgggcagctcttcaatgaccgcctgtccctcgccagacaccagaatacccacactggctgagggcatggggtaaaggttagaaaaccttcacctaggacttgacccttaccaaaccacagagaatccaaaccaatccatgataatgtcagtaggagacttaaccttagtgtgttacacacctgacttaacatctctaaactcagattgaaaagagaccgaatgtgcagattccacagtcttaagctttccccttcagatgtcagtgtctgcatgtgggaaagccatagcacacatcttacctttccaagtaatcagattgagaaaaccctatgagtattccagactacagagtttgcccaaatcaactgtaaatgacacttgtgtaacgtatatatagtgtttcatgaggtgtatataaaatagcaaattatgacagaacagtgatcacatatatttggatttatatgatatacagttacagtttactctgcagaggtaccttacctggtattctttgaattttttttttttttggaggaggaagagagcaacaaatttgattatatttttaagtgtcttagatcctgagaaagatttattgtgcattatttgaaccctgtcaatatctttttgagtaattgttttgtttcttacccttaaatagtcttgtgaagctgtaggcatgatagataacatggcttttactccttactgtttgaaaagataagtactttagcttctttctgcagccatttcatctgcgccaacactttggaacctaatactgtgtaaggctttacaatatacggattggctttttgtgacccagattgattggttgccacatgttatgtttgttgaagtggttctcatgcaaaaatattacacatttgtgttctgggtttttttttttttttaaccaactcaatatgtgtttgatgatagtgaattgataaaacccgaagcttttccctgtaaatcttacatctttgcctttaaagaatgggttacaaccatcactagatcacagtagtgcctaatgaaggttgagaaccgtaggagaggctctcatgctgtaaataatgttgcaggctaataacctttcatcacttcctttgtgcgcttcctgccttaagtgacaagtagcaacatggcttgggtcccctgtgcagcatcagcttatgctgccacaagtcagtttgcaccctaggtgcccaggagctagtatccttagatctttctatcgctaacttaattctcttcgttatttatctgaccctctaactccatgtctaacttgcattaaaaattaatttgttttgttaacatctgttccttctttttcagctctcctagagtatttctgagtgttgtgttcatctaatcttagtattcttttaattacaaattgacctcacagcttgaggtttcttgtgtcctattctgtggactacctgtgctcctttgcttcccctcccctcgcataataactatattaagaaattttttttggccttgagttggctggaaaaaaaatataaaatttaaaaaatttaaaaaaaaagatttgcaaaatgtaagtgtagatcatttgaacaagcaaaattaaagtacccactgggggaaatgtgtctgaatcttactcttctggatctgcaggattagggcttggaagtatgtcaaagatgcagggagtgtcaaagtttaggaagattgtagagctgagagcaagaagcagaaatgagtgagtcaaagaagggagtcctaatacatcaccagatctaggaggggagaggagacagacagaagaaaacaccagaggcaagaactgtagaaggccaggtttctgagaatgaattgagcggggtgtcctgagcagtttggaaaaggagtttttgatggtatggtgtaggtgagggctggctgcataggaaggactgaggttggaacggacatcgggaaagctgaggggcagtgaggtttactacatgggaaaaggactcttgaaacgagaatcagtgttgatgtcggggtgaactttgtgggtacattacttggtgttaacattgttggcagtggtagccccttttcagaaagcaacttgctgtaagtcagggtgtccgttccaaccttcagctagtgaaaaggtagtaacaaatggtaaacaagagaatgattgtttaaacctatctgtggacacttaatgcaactgtttaaaaatgataatcacgagttatgtagcaacgtggaaatatatttacagaacattaagtggagaaagcaggacacgaaagtatatttatactacagttataactcaacagttcatttatatgctgttcatttaacagttcatttaaacagttcattataactgtttaaaaatatatatgcttatagtcaaaagctgttgtggtgttgttgttgtaggcttatagttgagcattattttcttaaatttcttgaatgttctttatggtagtgttactaaaaagtttatgatcacattttcattgtgaacataatttgaactcattatcacacacttggaaaatacagaaaagtggaggaaaaaaaatcatatccccaccatccaaagacatatactctcctcttatcttgttcattcttgtttctgtgcacaggtttatgattataactgtgtcaaaatgtatattcaaaatagctgttacattacctttgtggaattatggttaaatactttcactttaattttttcaaatgttccctataataatgtcctgataacagtgtattatgtgtgtctccattggtgtgcataatacatacccagaggaaaaattagaaaataaagtaaattattttaaaaaattacctatattcccaacacctaacaactactgctaacatcttgatctgtttcctctatcttgtttcagtgcacacgcttgtgataacagtgttaaatatgtgtgcataaagtcttaaatgaaaagatgtggaaaataactaaaatagtgttgtcattgtgggaatttggttaaatattttgtctcaaattccttaaataatctttggtgttttggtaataaattttatgtatgtattttccattacaaatataatacatactcatacaaaactttggaaattcagtaaagaaaattcacacatattcccaacacccaacaacaattaactgttaacatcttgatctgtgcactagtctgtgattattagggtgttagtgataagtatgcataaatgtcaaagatgggaagaaagatgaaaaacaagaaatagttgtgtggttgttgtgggattatggttattttgtttcggtttccttgaaaggtcatcattctagtgttttggtagtccacctttactacatatatttccattatatatgaaatgtgttcattatagaaactttgaagttacagaaatgtagaagagaaactcacccatgttttcaccatccaaagagtgtggttaacatcttgatatattttcttcatcttgtttctgtgcacaggtttttggtttgttaatatggttgtggtcattctatctgtaatagtgtcaacaataaaaataaagttaaaaataaatatt

SEQ ID NO: 382150 - DNA, 8717 bp, Homo sapiens
acttctagggcattagacaagttgcccacagtcccaagttagtagcccaagttagtagccgagctaactcctcgagtaggtctctgtgaagcccagaggtcatgcttgtaactgctgtgctgaggccaactttgtgcggttgtttgcctatttactggggactcccatatcccaaaagcattgtcgatgcctctggtaaggtggcctccactgctgcctggtcttcaacttctgggacatgtgtatatctccttacgatccacaggtccctgagtactgacggtcacaggctgccgcgtctttcctgttgactcatgtttggttcctccagtgaaaattttacttagagaaatgctgcctccaaagcacttgtctgccaccaaacctaagaagtcctgggccccaaatctgtatgagctagacagtgacttgactaaggagccggatgtcatcataggagaaggtccaactgactctgagttttttcatcagaggtttcggaacctaatctatgtggaatttgttgggcctcggaagaccctgatcaaactccgaaacctctgcctcgattggttgcagccggagacccgcaccaaggaggagatcatcgagctcttggtccttgagcagtacctgaccatcatccctgaaaagctcaagccttgggtgcgagcaaaaaagccggagaactgtgagaagctcgtcactctgctggagaattacaaggagatgtaccaaccagaagacgacaacaacagtgacgtgaccagcgacgacgacatgacccggaacagaagagagtcctcaccacctcactcagtccattctttcagtgaccgggactgggaccggaggggcagaagcagagacatggagccacgagaccgctggtcccacaccaggaacccaagaagcaggatgcctccgcgggatctttcccttcctgtggtggcgaaaacaagctttgaaatggacagagaggacgacagggactccagggcttatgagtcccgatctcaggatgctgaatcataccaaaatgtggtggacctcgctgaggacaggaaacctcacaacacaatccaggacaacatggaaaactacaggaagctgctctccctcggtgcagcttgctgaagacgatggccactcccacatgacgcagggccactcatcaagatccaagagaagtgcctacccaagcaccagtcgaggtctaaaaactatgcctgaagccaaaaaatcaacccaccggcgggggatttgtgaagatgaatcttcccacggagtgataatggaaaaattcatcaaggatgtgtcacgcagttccaaatcgggaagagcaagggagtcaagcgaccggtcacagagattccccagaatgtcagatgataactggaaggacatttcattgaacaagagggagtcagtgatccagcagcgggtttatgaagggaatgcatttaggggaggctttaggtttaattcaacccttgtttccagaaagagagttcttgaaagaaagaggcgctatcattttgacacagatgggaagggctcgattcacgatcaaaaaggctgtcccaggaagaagccctttgaatgtggtagtgagatgagaaaagccatgagcgtgagcagcctgagcagcctcagctccccctcctttaccgagtcacagccaattgattttggggcaatgccatatgtatgtgatgagtgtgggaggtcgttcagtgtcatctcagaatttgttgagcaccagatcatgcatactagagagaacctctatgagtatggtgagtcctttatccacagtgtggctgtcagtgaagttcagaaaagtcaggttggagggaaacgttttgaatgtaaggactgtggagagaccttcaataagagtgccgccttggctgaacatcggaagattcatgctagaggttatcttgtggaatgtaagaatcaggaatgtgaggaagccttcatgcctagccccacctttagtgagcttcagaaaatatatggcaaagacaaattctacgagtgcagggtgtgtaaggaaaccttccttcatagttctgccctgattgagcaccagaaaatccactttggggatgacaaagataatgagcgtgaacatgaacgtgaacgtgaacgtgagcgcggggaaacctttaggcccagcccagcccttaatgagtttcagaaaatgtatggtaaagagaaaatgtacgaatgtaaggtgtgtggggagactttccttcatagctcatccctgaaagaacatcagaaaatccatactagagggaacccatttgaaaacaagggtaaagtgtgtgaggaaacctttattcctggtcagtcccttaaaaggcgtcagaaaacttacaataaggagaagctctgtgactttacagatggccgggatgccttcatgcaaagctcagagctcagtgagcatcagaaaattcattctcgaaagaacctctttgaaggcagagggtatgagaaatctgtcattcatagtgggccattcactgaatctcagaagagtcatactataacaagacctcttgaaagtgatgaggacgaaaaggcgttcaccattagctctaacccctatgaaaaccagaagattcccactaaggaaaatgtctatgaggcaaaatcatatgagaggtctgttattcatagcttagcctctgtggaagctcagaaaagtcacagtgtagcagggcccagtaaaccaaaagtaatggcagagtctaccattcagagcttcgatgctatcaaccatcagagagttcgtgctggagggaacacctctgaaggaagggaatacagtaggtctgttatccatagcttagtggcttccaaacctccaagaagtcacaatggaaatgaattggtggaatctaatgagaagggagaatcctccatttatatctcagaccttaatgataagcgacagaagattcctgccagagagaacccttgtgaagggggcagtaagaatcgcaactatgaagactctgtcatacagagtgtattccgtgccaaacctcagaaaagtgttcctggagagggatctggtgagtttaagaaggatggcgaattctctgttcccagctcaaatgtccgtgaataccagaaggctcgtgctaaaaagaaatacattgagcataggagcaatgagacctctgtaattcactctctgccttttggtgaacaaacatttcgccctcgagggatgctctatgaatgtcaggagtgtggggagtgctttgctcatagctctgacctcactgagcaccagaagattcatgatagggagaagccctctggaagcagaaactatgaatggtctgtcattcgcagcttggcccctactgaccctcaaacaagttacgcccaagagcagtatgctaaagagcaagcgcggaacaaatgtaaggacttcagacaattttttgctaccagcgaagacctcaacacaaaccagaaaatctatgaccaagagaagtctcatggcgaggagtctcaaggcgagaatactgatggggaggagacccacagcgaggagacccatggtcaggagacaattgaagaccctgtcattcaaggctcagacatggaagaccctcagaaggatgaccctgatgacaaaatctatgaatgtgaggactgtggcctgggctttgtggatctcacagacctcacagaccatcagaaagtccacagcaggaagtgcctggttgacagtcgggagtacacacattctgtaattcacacccattccatcagcgagtatcagagagattacactggagagcagctgtatgaatgtccaaagtgtggggaatcttttattcatagctcattccttttcgagcatcagagaatccatgaacaagaccagttgtattccatgaaggggtgtgatgatggttttattgccctcttgcccatgaagccacggaggaatcgtgctgcagagaggaatcctgctcttgctgggtcggccattcgatgccttttgtgtggacaaggcttcattcatagctctgcccttaatgagcatatgagacttcatagggaagatgatttactggagcagagccagatggctgaggaagctatcattccaggcttagccctcactgagtttcagagaagtcagaccgaagagagactctttgaatgtgcagtctgtggagaatctttcgtcaacccagcagaacttgcagatcacgtaactgttcataagaatgagccctatgagtacgggtcctcctatactcacacctcatttcttactgagcccctcaaaggagctataccattctatgaatgcaaggattgtggtaagtcctttattcatagcacagtcctcactaaacataaggagcttcatctggaagaagaagaagaagatgaagcagcagcagctgcagcagcagcagcccaggaagttgaagccaatgtccatgttccacaagtagttctgaggattcagggcttaaacgtagaggctgctgagccagaagtggaggctgccgagccagaagtggaggctgctgagccagaagtggaggctgctgagccaaacggagaggctgaagggccagatggagaggctgcagagcccattggagaggctggacagccaaatggagaggccgagcagccaaatggggatgctgatgagccagatggtgcaggtattgaagacccagaagaaagagctgaagagccagagggaaaagctgaagagccagagggagatgccgacgagcctgacggtgtgggaattgaagacccagaagaaggtgaagatcaagagattcaggtagaagaaccatactatgactgccatgaatgcacagaaaccttcacttccagcacagcattcagtgaacacctgaaaactcatgccagcatgatcatatttgagcctgcaaatgcctttggggagtgctcaggctacatcgaacgtgccagcaccagcacaggtggtgccaatcaagctgatgagaagtacttcaaatgtgacgtctgtgggcagctcttcaatgaccgcctgtccctcgccagacaccagaatacccacactggctgagggcatggggtaaaggttagaaaaccttcacctaggacttgacccttaccaaaccacagagaatccaaaccaatccatgataatgtcagtaggagacttaaccttagtgtgttacacacctgacttaacatctctaaactcagattgaaaagagaccgaatgtgcagattccacagtcttaagctttccccttcagatgtcagtgtctgcatgtgggaaagccatagcacacatcttacctttccaagtaatcagattgagaaaaccctatgagtattccagactacagagtttgcccaaatcaactgtaaatgacacttgtgtaacgtatatatagtgtttcatgaggtgtatataaaatagcaaattatgacagaacagtgatcacatatatttggatttatatgatatacagttacagtttactctgcagaggtaccttacctggtattctttgaattttttttttttttggaggaggaagagagcaacaaatttgattatatttttaagtgtcttagatcctgagaaagatttattgtgcattatttgaaccctgtcaatatctttttgagtaattgttttgtttcttacccttaaatagtcttgtgaagctgtaggcatgatagataacatggcttttactccttactgtttgaaaagataagtactttagcttctttctgcagccatttcatctgcgccaacactttggaacctaatactgtgtaaggctttacaatatacggattggctttttgtgacccagattgattggttgccacatgttatgtttgttgaagtggttctcatgcaaaaatattacacatttgtgttctgggtttttttttttttttaaccaactcaatatgtgtttgatgatagtgaattgataaaacccgaagcttttccctgtaaatcttacatctttgcctttaaagaatgggttacaaccatcactagatcacagtagtgcctaatgaaggttgagaaccgtaggagaggctctcatgctgtaaataatgttgcaggctaataacctttcatcacttcctttgtgcgcttcctgccttaagtgacaagtagcaacatggcttgggtcccctgtgcagcatcagcttatgctgccacaagtcagtttgcaccctaggtgcccaggagctagtatccttagatctttctatcgctaacttaattctcttcgttatttatctgaccctctaactccatgtctaacttgcattaaaaaaaaaaaaattctttacagtcaacccaagcttaacatggactcaggttccccagcagccttaatttgttttgttaacatctgttccttctttttcagctctcctagagtatttctgagtgttgtgttcatctaatcttagtattcttttaattacaaattgacctcacagcttgaggtttcttgtgtcctattctgtggactacctgtgctcctttgcttcccctcccctcgcataataactatattaagaaattttttttggccttgagttggctggaaaaaaaatataaaatttaaaaaatttaaaaaaaaagatttgcaaaatgtaagtgtagatcatttgaacaagcaaaattaaagtacccactgggggaaatgtgtctgaatcttactcttctggatctgcaggattagggcttggaagtatgtcaaagatgcagggagtgtcaaagtttaggaagattgtagagctgagagcaagaagcagaaatgagtgagtcaaagaagggagtcctaatacatcaccagatctaggaggggagaggagacagacagaagaaaacaccagaggcaagaactgtagaaggccaggtttctgagaatgaattgagcggggtgtcctgagcagtttggaaaaggagtttttgatggtatggtgtaggtgagggctggctgcataggaaggactgaggttggaacggacatcgggaaagctgaggggcagtgaggtttactacatgggaaaaggactcttgaaacgagaatcagtgttgatgtcggggtgaactttgtgggtacattacttggtgttaacattgttggcagtggtagccccttttcagaaagcaacttgctgtaagtcagggtgtccgttccaaccttcagctagtgaaaaggtagtaacaaatggtaaacaagagaatgattgtttaaacctatctgtggacacttaatgcaactgtttaaaaatgataatcacgagttatgtagcaacgtggaaatatatttacagaacattaagtggagaaagcaggacacgaaagtatatttatactacagttataactcaacagttcatttatatgctgttcatttaacagttcatttaaacagttcattataactgtttaaaaatatatatgcttatagtcaaaagctgttgtggtgttgttgttgtaggcttatagttgagcattattttcttaaatttcttgaatgttctttatggtagtgttactaaaaagtttatgatcacattttcattgtgaacataatttgaactcattatcacacacttggaaaatacagaaaagtggaggaaaaaaaatcatatccccaccatccaaagacatatactctcctcttatcttgttcattcttgtttctgtgcacaggtttatgattataactgtgtcaaaatgtatattcaaaatagctgttacattacctttgtggaattatggttaaatactttcactttaattttttcaaatgttccctataataatgtcctgataacagtgtattatgtgtgtctccattggtgtgcataatacatacccagaggaaaaattagaaaataaagtaaattattttaaaaaattacctatattcccaacacctaacaactactgctaacatcttgatctgtttcctctatcttgtttcagtgcacacgcttgtgataacagtgttaaatatgtgtgcataaagtcttaaatgaaaagatgtggaaaataactaaaatagtgttgtcattgtgggaatttggttaaatattttgtctcaaattccttaaataatctttggtgttttggtaataaattttatgtatgtattttccattacaaatataatacatactcatacaaaactttggaaattcagtaaagaaaattcacacatattcccaacacccaacaacaattaactgttaacatcttgatctgtgcactagtctgtgattattagggtgttagtgataagtatgcataaatgtcaaagatgggaagaaagatgaaaaacaagaaatagttgtgtggttgttgtgggattatggttattttgtttcggtttccttgaaaggtcatcattctagtgttttggtagtccacctttactacatatatttccattatatatgaaatgtgttcattatagaaactttgaagttacagaaatgtagaagagaaactcacccatgttttcaccatccaaagagtgtggttaacatcttgatatattttcttcatcttgtttctgtgcacaggtttttggtttgttaatatggttgtggtcattctatctgtaatagtgtcaacaataaaaataaagttaaaaataaatatt

SEQ ID NO: 382151 - DNA, 5533 bp, Homo sapiens
ctcctcctccccatcgattgtatgtgtatgcaggttagaaatgcattcaaaatattcagccaatacttactgaatatcaactatgtgccaagacacatagacaatatacaagacccctgctcttatggagtttatactctagtaagggagaagccctctggaagcagaaactatgaatggtctgtcattcgcagcttggcccctactgaccctcaaacaagttacgcccaagagcagtatgctaaagagcaagcgcggaacaaatgtaaggacttcagacaattttttgctaccagcgaagacctcaacacaaaccagaaaatctatgaccaagagaagtctcatggcgaggagtctcaaggcgagaatactgatggggaggagacccacagcgaggagacccatggtcaggagacaattgaagaccctgtcattcaaggctcagacatggaagaccctcagaaggatgaccctgatgacaaaatctatgaatgtgaggactgtggcctgggctttgtggatctcacagacctcacagaccatcagaaagtccacagcaggaagtgcctggttgacagtcgggagtacacacattctgtaattcacacccattccatcagcgagtatcagagagattacactggagagcagctgtatgaatgtccaaagtgtggggaatcttttattcatagctcattccttttcgagcatcagagaatccatgaacaagaccagttgtattccatgaaggggtgtgatgatggttttattgccctcttgcccatgaagccacggaggaatcgtgctgcagagaggaatcctgctcttgctgggtcggccattcgatgccttttgtgtggacaaggcttcattcatagctctgcccttaatgagcatatgagacttcatagggaagatgatttactggagcagagccagatggctgaggaagctatcattccaggcttagccctcactgagtttcagagaagtcagaccgaagagagactctttgaatgtgcagtctgtggagaatctttcgtcaacccagcagaacttgcagatcacgtaactgttcataagaatgagccctatgagtacgggtcctcctatactcacacctcatttcttactgagcccctcaaaggagctataccattctatgaatgcaaggattgtggtaagtcctttattcatagcacagtcctcactaaacataaggagcttcatctggaagaagaagaagaagatgaagcagcagcagctgcagcagcagcagcccaggaagttgaagccaatgtccatgttccacaagtagttctgaggattcagggcttaaacgtagaggctgctgagccagaagtggaggctgccgagccagaagtggaggctgctgagccagaagtggaggctgctgagccaaacggagaggctgaagggccagatggagaggctgcagagcccattggagaggctggacagccaaatggagaggccgagcagccaaatggggatgctgatgagccagatggtgcaggtattgaagacccagaagaaagagctgaagagccagagggaaaagctgaagagccagagggagatgccgacgagcctgacggtgtgggaattgaagacccagaagaaggtgaagatcaagagattcaggtagaagaaccatactatgactgccatgaatgcacagaaaccttcacttccagcacagcattcagtgaacacctgaaaactcatgccagcatgatcatatttgagcctgcaaatgcctttggggagtgctcaggctacatcgaacgtgccagcaccagcacaggtggtgccaatcaagctgatgagaagtacttcaaatgtgacgtctgtgggcagctcttcaatgaccgcctgtccctcgccagacaccagaatacccacactggctgagggcatggggtaaaggttagaaaaccttcacctaggacttgacccttaccaaaccacagagaatccaaaccaatccatgataatgtcagtaggagacttaaccttagtgtgttacacacctgacttaacatctctaaactcagattgaaaagagaccgaatgtgcagattccacagtcttaagctttccccttcagatgtcagtgtctgcatgtgggaaagccatagcacacatcttacctttccaagtaatcagattgagaaaaccctatgagtattccagactacagagtttgcccaaatcaactgtaaatgacacttgtgtaacgtatatatagtgtttcatgaggtgtatataaaatagcaaattatgacagaacagtgatcacatatatttggatttatatgatatacagttacagtttactctgcagaggtaccttacctggtattctttgaattttttttttttttggaggaggaagagagcaacaaatttgattatatttttaagtgtcttagatcctgagaaagatttattgtgcattatttgaaccctgtcaatatctttttgagtaattgttttgtttcttacccttaaatagtcttgtgaagctgtaggcatgatagataacatggcttttactccttactgtttgaaaagataagtactttagcttctttctgcagccatttcatctgcgccaacactttggaacctaatactgtgtaaggctttacaatatacggattggctttttgtgacccagattgattggttgccacatgttatgtttgttgaagtggttctcatgcaaaaatattacacatttgtgttctgggtttttttttttttttaaccaactcaatatgtgtttgatgatagtgaattgataaaacccgaagcttttccctgtaaatcttacatctttgcctttaaagaatgggttacaaccatcactagatcacagtagtgcctaatgaaggttgagaaccgtaggagaggctctcatgctgtaaataatgttgcaggctaataacctttcatcacttcctttgtgcgcttcctgccttaagtgacaagtagcaacatggcttgggtcccctgtgcagcatcagcttatgctgccacaagtcagtttgcaccctaggtgcccaggagctagtatccttagatctttctatcgctaacttaattctcttcgttatttatctgaccctctaactccatgtctaacttgcattaaaaaaaaaaaaattctttacagtcaacccaagcttaacatggactcaggttccccagcagccttaatttgttttgttaacatctgttccttctttttcagctctcctagagtatttctgagtgttgtgttcatctaatcttagtattcttttaattacaaattgacctcacagcttgaggtttcttgtgtcctattctgtggactacctgtgctcctttgcttcccctcccctcgcataataactatattaagaaattttttttggccttgagttggctggaaaaaaaatataaaatttaaaaaatttaaaaaaaaagatttgcaaaatgtaagtgtagatcatttgaacaagcaaaattaaagtacccactgggggaaatgtgtctgaatcttactcttctggatctgcaggattagggcttggaagtatgtcaaagatgcagggagtgtcaaagtttaggaagattgtagagctgagagcaagaagcagaaatgagtgagtcaaagaagggagtcctaatacatcaccagatctaggaggggagaggagacagacagaagaaaacaccagaggcaagaactgtagaaggccaggtttctgagaatgaattgagcggggtgtcctgagcagtttggaaaaggagtttttgatggtatggtgtaggtgagggctggctgcataggaaggactgaggttggaacggacatcgggaaagctgaggggcagtgaggtttactacatgggaaaaggactcttgaaacgagaatcagtgttgatgtcggggtgaactttgtgggtacattacttggtgttaacattgttggcagtggtagccccttttcagaaagcaacttgctgtaagtcagggtgtccgttccaaccttcagctagtgaaaaggtagtaacaaatggtaaacaagagaatgattgtttaaacctatctgtggacacttaatgcaactgtttaaaaatgataatcacgagttatgtagcaacgtggaaatatatttacagaacattaagtggagaaagcaggacacgaaagtatatttatactacagttataactcaacagttcatttatatgctgttcatttaacagttcatttaaacagttcattataactgtttaaaaatatatatgcttatagtcaaaagctgttgtggtgttgttgttgtaggcttatagttgagcattattttcttaaatttcttgaatgttctttatggtagtgttactaaaaagtttatgatcacattttcattgtgaacataatttgaactcattatcacacacttggaaaatacagaaaagtggaggaaaaaaaatcatatccccaccatccaaagacatatactctcctcttatcttgttcattcttgtttctgtgcacaggtttatgattataactgtgtcaaaatgtatattcaaaatagctgttacattacctttgtggaattatggttaaatactttcactttaattttttcaaatgttccctataataatgtcctgataacagtgtattatgtgtgtctccattggtgtgcataatacatacccagaggaaaaattagaaaataaagtaaattattttaaaaaattacctatattcccaacacctaacaactactgctaacatcttgatctgtttcctctatcttgtttcagtgcacacgcttgtgataacagtgttaaatatgtgtgcataaagtcttaaatgaaaagatgtggaaaataactaaaatagtgttgtcattgtgggaatttggttaaatattttgtctcaaattccttaaataatctttggtgttttggtaataaattttatgtatgtattttccattacaaatataatacatactcatacaaaactttggaaattcagtaaagaaaattcacacatattcccaacacccaacaacaattaactgttaacatcttgatctgtgcactagtctgtgattattagggtgttagtgataagtatgcataaatgtcaaagatgggaagaaagatgaaaaacaagaaatagttgtgtggttgttgtgggattatggttattttgtttcggtttccttgaaaggtcatcattctagtgttttggtagtccacctttactacatatatttccattatatatgaaatgtgttcattatagaaactttgaagttacagaaatgtagaagagaaactcacccatgttttcaccatccaaagagtgtggttaacatcttgatatattttcttcatcttgtttctgtgcacaggtttttggtttgttaatatggttgtggtcattctatctgtaatagtgtcaacaataaaaataaagttaaaaataaatatt

SEQ ID NO: 382152 - DNA, 5690 bp, Homo sapiens
  misc_feature (5494)..(5495): n is a, c, g, or t
acttctagggcattagacaagttgcccacagtcccaagttagtagcccaagttagtagccgagctaactcctcgagtaggtctctgtgaagcccagaggtcatgcttgtaactgctgtgctgaggccaactttgtgcggttgtttgcctatttactggggactcccatatcccaaaagcattgtcgatgcctctggtaaggtggcctccactgctgcctggtcttcaacttctgggacatgtgtatatctccttacgatccacaggtccctgagtactgacggtcacaggctgccgcgtctttcctgttgactcatgtttggttcctccagtgaaaattttacttagagaaatgctgcctccaaagcacttgtctgccaccaaacctaagaagtcctgggccccaaatctgtatgagctagacagtgacttgactaaggagccggatgtcatcataggagaaggtccaactgactctgagttttttcatcagaggtttcggaacctaatctatgtggaatttgttgggcctcggaagaccctgatcaaactccgaaacctctgcctcgattggttgcagccggagacccgcaccaaggaggagatcatcgagctcttggtccttgagcagtacctgaccatcatccctgaaaagctcaagccttgggtgcgagcaaaaaagccggagaactgtgagaagctcgtcactctgctggagaattacaaggagatgtaccaaccagaagacgacaacaacagtgacgtgaccagcgacgacgacatgacccggaacagaagagagtcctcaccacctcactcagtccattctttcagtgaccgggactgggaccggaggggcagaagcagagacatggagccacgagaccgctggtcccacaccaggaacccaagaagcaggatgcctccgcgggatctttcccttcctgtggtggcgaaaacaagctttgaaatggacagagaggacgacagggactccagggcttatgagtcccgatctcaggatgctgaatcataccaaaatgtggtggacctcgctgaggacaggaaacctcacaacacaatccaggacaacatggaaaactacaggaagctgctctccctcggtgcagcttgctgaagacgatggccactcccacatgacgcagggccactcatcaagatccaagagaagtgcctacccaagcaccagtcgaggtctaaaaactatgcctgaagccaaaaaatcaacccaccggcgggggatttgtgaagatgaatcttcccacggagtgataatggaaaaattcatcaaggatgtgtcacgcagttccaaatcgggaagagcaagggagtcaagcgaccggtcacagagattccccagaatgtcagatgataactggaaggacatttcattgaacaagagggagtcagtgatccagcagcgggtttatgaagggaatgcatttaggggaggctttaggtttaattcaacccttgtttccagaaagagagttcttgaaagaaagaggcgctatcattttgacacagatgggaagggctcgattcacgatcaaaaaggctgtcccaggaagaagccctttgaatgtggtagtgagatgagaaaagccatgagcgtgagcagcctgagcagcctcagctccccctcctttaccgagtcacagccaattgattttggggcaatgccatatgtatgtgatgagtgtgggaggtcgttcagtgtcatctcagaatttgttgagcaccagatcatgcatactagagagaacctctatgagtatggtgagtcctttatccacagtgtggctgtcagtgaagttcagaaaagtcaggttggagggaaacgttttgaatgtaaggactgtggagagaccttcaataagagtgccgccttggctgaacatcggaagattcatgctagaggttatcttgtggaatgtaagaatcaggaatgtgaggaagccttcatgcctagccccacctttagtgagcttcagaaaatatatggcaaagacaaattctacgagtgcagggtgtgtaaggaaaccttccttcatagttctgccctgattgagcaccagaaaatccactttggggatgacaaagataatgagcgtgaacatgaacgtgaacgtgaacgtgagcgcggggaaacctttaggcccagcccagcccttaatgagtttcagaaaatgtatggtaaagagaaaatgtacgaatgtaaggtgtgtggggagactttccttcatagctcatccctgaaagaacatcagaaaatccatactagagggaacccatttgaaaacaagggtaaagtgtgtgaggaaacctttattcctggtcagtcccttaaaaggcgtcagaaaacttacaataaggagaagctctgtgactttacagatggccgggatgccttcatgcaaagctcagagctcagtgagcatcagaaaattcattctcgaaagaacctctttgaaggcagagggtatgagaaatctgtcattcatagtgggccattcactgaatctcagaagagtcatactataacaagacctcttgaaagtgatgaggacgaaaaggcgttcaccattagctctaacccctatgaaaaccagaagattcccactaaggaaaatgtctatgaggcaaaatcatatgagaggtctgttattcatagcttagcctctgtggaagctcagaaaagtcacagtgtagcagggcccagtaaaccaaaagtaatggcagagtctaccattcagagcttcgatgctatcaaccatcagagagttcgtgctggagggaacacctctgaaggaagggaatacagtaggtctgttatccatagcttagtggcttccaaacctccaagaagtcacaatggaaatgaattggtggaatctaatgagaagggagaatcctccatttatatctcagaccttaatgataagcgacagaagattcctgccagagagaacccttgtgaagggggcagtaagaatcgcaactatgaagactctgtcatacagagtgtattccgtgccaaacctcagaaaagtgttcctggagagggatctggtgagtttaagaaggatggcgaattctctgttcccagctcaaatgtccgtgaataccagaaggctcgtgctaaaaagaaatacattgagcataggagcaatgagacctctgtaattcactctctgccttttggtgaacaaacatttcgccctcgagggatgctctatgaatgtcaggagtgtggggagtgctttgctcatagctctgacctcactgagcaccagaagattcatgatagggagaagccctctggaagcagaaactatgaatggtctgtcattcgcagcttggcccctactgaccctcaaacaagttacgcccaagagcagtatgctaaagagcaagcgcggaacaaatgtaaggacttcagacaattttttgctaccagcgaagacctcaacacaaaccagaaaatctatgaccaagagaagtctcatggcgaggagtctcaaggcgagaatactgatggggaggagacccacagcgaggagacccatggtcaggagacaattgaagaccctgtcattcaaggctcagacatggaagaccctcagaaggatgaccctgatgacaaaatctatgaatgtgaggactgtggcctgggctttgtggatctcacagacctcacagaccatcagaaagtccacagcaggaagtgcctggttgacagtcgggagtacacacattctgtaattcacacccattccatcagcgagtatcagagagattacactggagagcagctgtatgaatgtccaaagtgtggggaatcttttattcatagctcattccttttcgagcatcagagaatccatgaacaagaccagttgtattccatgaaggggtgtgatgatggttttattgccctcttgcccatgaagccacggaggaatcgtgctgcagagaggaatcctgctcttgctgggtcggccattcgatgccttttgtgtggacaaggcttcattcatagctctgcccttaatgagcatatgagacttcatagggaagatgatttactggagcagagccagatggctgaggaagctatcattccaggcttagccctcactgagtttcagagaagtcagaccgaagagagactctttgaatgtgcagtctgtggagaatctttcgtcaacccagcagaacttgcagatcacgtaactgttcataagaatgagccctatgagtacgggtcctcctatactcacacctcatttcttactgagcccctcaaaggagctataccattctatgaatgcaaggattgtggtaagtcctttattcatagcacagtcctcactaaacataaggagcttcatctggaagaagaagaagaagatgaagcagcagcagctgcagcagcagcagcccaggaagttgaagccaatgtccatgttccacaagtagttctgaggattcagggcttaaacgtagaggctgctgagccagaagtggaggctgccgagccagaagtggaggctgctgagccagaagtggaggctgctgagccaaacggagaggctgaagggccagatggagaggctgcagagcccattggagaggctggacagccaaatggagaggccgagcagccaaatggggatgctgatgagccagatggtgcaggtattgaagacccagaagaaagagctgaagagccagagggaaaagctgaagagccagagggagatgccgacgagcctgacggtgtgggaattgaagacccagaagaaggtgaagatcaagagattcaggtagaagaaccatactatgactgccatgaatgcacagaaaccttcacttccagcacagcattcagtgaacacctgaaaactcatgccagcatgatcatatttgagcctgcaaatgcctttggggagtgctcaggctacatcgaacgtgccagcaccagcacaggtggtgccaatcaagctgatgagaagtacttcaaatgtgacgtctgtgggcagctcttcaatgaccgcctgtccctcgccagacaccagaatacccacactggctgagggcatggggtaaaggttagaaaaccttcacctaggacttgacccttaccaaaccacagagaatccaaaccaatccatgataatgtcagtaggagacttaaccttagtgtgttacacacctgacttaacatctctaaactcagattgaaaagagaccgaatgtgcagattccacagtcttaagctttccctcgatgttgggtcgtatgtgggaggcatgcacatttactttcataatgatggaaacattgtttcgataggtgccaacagtatgagtgtagtttgggggaggttaatggtggaaggacatggataaaggagcggagaaggtggattgggggaaagtttgtcagttcttggttgttaagtaggtctnnaggccaggagaagagaagggcgaaggaacaagatacgagagcacggcacgcgaaaccgacggagcagaaccgaaacaaggagccgacacacggagggcagcaagcgcaagcaagcacggcaagcgaagagcagagcggccaacaaccgacggacaagaggccagcgcgagagagcaaggacagagcacggaccgg

SEQ ID NO: 382153 - DNA, 2502 bp, Homo sapiens
ctctttggccaagccctgcctctgtacagcctcgagtggacagccagaggctgcagctggagcccagagcccaagatggagccccagctggggcctgaggctgccgccctccgccctggctggctggccctgctgctgtgggtctcagccctgagctgttctttctccttgccagcttcttccctttcttctctggtgccccaagtcagaaccagctacaattttggaaggactttcctcggtcttgataaatgcaatgcctgcatcgggacatctatttgcaagaagttctttaaagaagaaataagatctgacaactggctggcttcccaccttggactgcctcccgattccttgctttcttatcctgcaaattactcagatgattccaaaatctggcgccctgtggagatctttagactggtcagcaaatatcaaaacgagatctcagacaggagaatctgtgcctctgcatcagccccaaagacctgcagcattgagcgtgtcctgcggaaaacagagaggttccagaaatggctgcaggccaagcgcctcacgccggacctggtgcaggactgtcaccagggccagagagaactaaagttcctgtgtatgctgagataacaccagtgaaaaagcctggcatggagcccagcactgagaacttccagaaagtgttagccttctcccaactgtgttataccaaccacattttcaaatagtaatcattaaagaggcttctgcatcaaaccttcacatgcagctcccatgccaccctccagaattcaccaacacacaggcccaccagcaacaggctacctttgcacaatattctctgatgacaactccaaagccccggctctttccaccacactgtggtcccctagatggggctgttgctgagcccaccccaatccagatgtgatccccctgtgatctacttctggcaagattctcagtctggacaggtcttccctatgagatagaacctgataaggagctagggcaattctgacaacattaccaaaggcccacataacttctaaattttggtctggtctgaaggaaaacctgttctcgccctagtgatggatgaactctcttatctctggcttctagagggaaaaaaaaagcatacctcttttactttttaagtacctccatcagagtcatgaaatcacctgtcaagactatctatcttttatgtttccattctggtaagaactctttaaatgaggacactgctgattgctggtgatgttttttgagcaaacactcgggggtatggatgaaagccaatcgcaggtcaaatgactccttggggaagctacttctcctctattcagatttcactaaaatcttccaagatgaaagcaaatctagatttcggtcttcattgctgtccatttttgtaatgaacgagtgtttttcctttagctagtgtatcaggcagggttctaccagagaaacagaaccagtaggagatacatatacatgtccagatttatttcaaagaattgatttacatgattgtggggattggcaagtccaaaatccatatggtaggcctgcaatctgtaaacctttgggcaggagctgatgctgtagtttgcagatagaattccttgttccttaaaaaaatctgtttttgttcttaagggctttgaatgattggatcaggcccacccagattacctagataatctcttttacttaaagtaaactgattgtaggtgctaatcacatctatgaaatgccttcacagcaacacctagattagcattcaattgaataactggggaatacagcctagccaagttgacacataaaattaaccatcacagcaacatgcctgctaaattttatcgaccgtcttcagactgttaaggattgtggtagagaactgtgacagccactctcagcatcaccctgaaccaaaggcccctatcaagtaacaatatagccaagcaaaattccagtcaatagagacattgactggttggctggcttcccaagggatagcaccagacaagaaatgcaaggatgaggaaaccaggcacgggagagggaggggcaacagaggtccagggtttggttatctttttatttttcactgggaggtggtaagttagccctgttgcccatgtatgcagatgggagaagtgatttagaaactccaaagcaattggtaatccccaaaatgggtgtatctggtttgaaatgaaaccttattttattggaaatggttggtttcccaattctgtttgccattggccaatataattgtgggtttgcacatggccagcacatgccaaacagaagtagacaaaggtctcactctgtaagtgggaccttggggaggagctgcctccatcataaagggaggggttagtaaaaatggtctcttaagcctgttcctgctacagttatagaggttgctcagaaccttctcagcaaatatagcagttatctattgttgtgtattaaaccatttcaacacat

SEQ ID NO: 382154 - DNA, 693 bp, Homo sapiens
ctctttggccaagccctgcctctgtacagcctcgagtggacagccagaggctgcagctggagcccagagcccaagatggagccccagctggggcctgaggctgccgccctccgccctggctggctggccctgctgctgtgggtctcagccctgagctgttctttctccttgccagcttcttccctttcttctctggtgccccaagtcagaaccagctacaattttggaaggactttcctcggtcttgataaatgcaatgcctgcatcgggacatctatttgcaagaagttctttaaagaagaaataagatctgacaactggctggcttcccaccttggactgcctcccgattccttgctttcttatcctgcaaattactcagatgattccaaaatctggcgccctgtggagatctttagactggtcagcaaatatcaaaacgagatctcagacaggagaatctgtgcctctgcatcagccccaaagacctgcagcattgagcgtgtcctgcggaaaacagagaggttccagaaatggctgcaggccaagcgcctcacgccggacctggtgcagggcctggccagcccgctcctgcgctgcccttcgcagcgactcctggatcgcgtggtcaggcgctatgcagaggtggccgacgccggcagcatcttcatggaccacttcaccgacggataa

SEQ ID NO: 382155 - DNA, 398 bp, Homo sapiens
ctgtcatttctcattctctctgatgtgatcctcagtgacgattcgagaaagttcctagctgcgacctctggcctgaagatctgacaggatgacccttgccagtccacccctctgccagggctcaactcacctgcatcattctctgacagctctttgccagccgccagtctagctgagtattctctcttagaagctcccatatatatcctgtttcaaaatacagagagacaactttgaaagccaagttcctcttctatctcccactgtaaagaataaccaaacctcagccattacagaagccaactttgacaatacagcatcctcttcccacctgacagcctcccacccactcccatgggcatgctgtgctgggaacttcagcaccttgctggtgccat

SEQ ID NO: 382156 - DNA, 339 bp, Homo sapiens
ttgtggtctggccatgcagggctgtacagagtaaaccacctgatagcaataactcaagcataccctgagaatgactttgtatgggagaatctgtgcctctgcatcagccccaaagacctgcagcattgagcgtgtcctgcggaaaacagagaggttccagaaatggctgcaggccaagcgcctcacgccggacctggtgcagtgacgattcgagaaagttcctagctgcgacctctggcctgaagatctgacaggatgacccttgccagtccacccctctgccagggctcaactcacctgcatcattctctgacagctctttgccagccgccagtctag

SEQ ID NO: 382157 - DNA, 902 bp, Homo sapiens
ctgtgaagagtgcccagtggggccctccctggagtggagaggagtgactccccgtggccagcagccttgccttcctggggcacaccccgcatacagcttctccccgggctgggacagtggaagggctgccttgccatcacctccctgcacacttgctttgcccaggtcctggggctctgctcctgccagctcctgggtggttcatgctcctgtgagggcactgaccagccaagcaggaggcctttgtggtggctgagtagaggcatgtggggtcactcatgcgccctcggggtccaggccccactagtcctcctccaagtcccattttggctggtggacacccaggtgtgtggcctagaggctatcaggctgcagcttggggaagcaaacaagggagggtgatggttcctggccccacaccatcattctggtgtcagccctgagagggtgcctgtcacagcaggttccaggactgctgcctcctgaggatggagaaactgtggcaccctgggggccactaagggaggccagctgattgcagccacgtgtaccttcctcttctcgtctctgtgttttgtagatgaccgcacctcgagcaggagtggggatgccacgtctgcccccagcgcccggccctctgtccaccacggtcattcccggagccgccccgaccctgtccgtgcccacaccagatcctgagagtgagaagcctgactgaccccgcctagacgccaggcccacttcacgccgtctaagtggagaagtgacggaccctcagggccagctgctcctcctgtccagttcacgctgttttgtaaccactttctaagcattttttattcacaattggaaacacaaatgtaatgcaagaataaaaaatattttggggcagaaaggacttt

SEQ ID NO: 382158 - DNA, 1102 bp, Homo sapiens
ccctgggcaggccaggtgggccagctgggggcacagggcagctggaacaccccccaggtgcccgtgctgccagtcttcttgcagccacctgtggtcagcatgcctggcccccggctgcggatcacgtagccttctgccctgtcccttgccagatggcgccctcggaaccgcccggagaaaccaggtgtggtttggcctccgagtcccccccaccgcctgctgtgggcacagcactcagccgcgagggggacagcgggtgggcagcaagactgcttcctttgcggcttcagaccctgttcgctcctaggttcctgtggtccacgcgccgtctccacacccacttcctatacttgagttgatggttagaaccttgtcgtcaccctgcagaagtacagtgccttgaatgccagcttttccgttccctgatgaaaagatatgttaaaaaaaattatcggaaaaggtttcatttgcaattggcttgtgcattgataatctttatttactgttttaagttgcagagatgtgaatggtttacaaatctgaagctgaagttcaatctttggttttctgttgtaaatgccttttacaaacattgaattagctaccttaagtattgaagagcttccattgctaggtgagccctgctttgtcctcagtagagtgccggttccctgggctcatccaggggctgagagacggcgggacgctggggcagggcacactggcggagctgcttgctcagtagggaatgtcagttgttgcgctgggccatgagaaatccgccagaaaacgttaggtgagcagacatgccccccatgccagtgggctgctgtcccccttgcctgtgaatcccttccttgtacatggtggtcagtggcacggaatccccaatagattgtatatctgaaggagaaaaataaacacttttgctcgaaaacagtgtgaaacaacatctttttcttaccctctatccatataaaatccaaagcaaccagcctcctagggagcacaggagttgggagccagttctgggctcagctgcatccacacctctggaggagggtgctgaggggctgcgggtgctgggctgggctgtccccgg

SEQ ID NO: 382159 - DNA, 640 bp, Homo sapiens
cttttttcttttcttttttctttctcttttacttttcttagaatatgcttctagagacaaacacttctccctgaagcttaggggcttggccctggcacctctgccccctcggcgaagctcgtgggagcctgcaccctctctccaggggctgccccgtttcccccggccgggtcggccctctctctgaactgctgcctgtgtctgcccctccctgcacactgacgacttttgcttagtgtggtagcgtgtcccagtgtgtgctgttctgcctaaccctgtggtcttgtgtcgtttctttttcccttgcagggtctgccctgaagcgtctctgcctaggcaaagaacacagcagtagtaattatccgggttttttcccctttgtcctctctcatcgcatgggctttctcgtggctagcgcacatcagggttcccgcggccgggcgggcgtgggcctgccctgtgcctgccccgcgcctgctccatgcctctcggccgggcactgcttcgcttctgcctggcgggatcgctgtcctcggctcccccgtgtgtctcgtggcgcctagagtttgtgcggtctcgccagttcacatctaacgggcttatccttccccagaacaccgtcgaagtgccgatcattaat

SEQ ID NO: 382160 - DNA, 408 bp, Homo sapiens
tgtgtgctgttctgaggtccccttcgacggtgtctagctaaccctgtggtcttgtgtcgtttctttttcccttgcagggtctgccctgaagcgtctctgcctaggcaaagaacacagcagtagtaattatccgggttttttcccctttgtcctctctcatcgcatgggctttctcgtggctagcgcacatcagggttcccgcggccgggcgggcgtgggcctgccctgtgcctgccccgcgcctgctccatgcctctcggccgggcactgcttcgcttctgcctggcgggatcgctgtcctcggctcccccgtgtgtctcgtggcgcctagagtttgtgcggtctcgccagttcacatctaacgggcttatccttccccagaacaccgtcgaagtgccgatcattaat

SEQ ID NO: 382161 - DNA, 5363 bp, Homo sapiens
  misc_feature (534)..(534): n is a, c, g, or t
cggaccattgtgccaaatgcaccggccactatccccctgctggccgtagccccaccgggcgtggctgccctgtccattcattctgccgtggcccagctcccaggccaacctgtgtacccagcggccttcccacagatggcgcctactgacgtccctccttccccccatcacacggtgcagaatatgagggccacccctccacagccggcactgcctccacaacccacactgcccccacaacccgtgctgcccccgcaacccacgctgccccctcaacctgtgttgcccccgcaacccacacggccccctcaacctgtgctgcccccgcaacccatgctgcccccacaacctgtgctgcccccgcagccggcactgcctgtgcgccctgagcccctccagccccaccttcctgaacaagctgctccagctgctacaccagggagccagattctgcttggccacccagctccctatgctgtggacgtcgccgctcaggtccccaccgtgcctgtgccaccggctgcggtcctctcnccgcctctgccggaagtgctgctgcctgccgcccctgagctcctgcctcagttccccagctccctggccacggtgtctgcctctgtgcagagtgtgcccacccagactgccacacttctgccaccagcaaacccaccgctgcctggcgggcccgggatcgccagcccttgcccaactgtccagctgacggtggaaccagtccaagaggagcaggcctcacaggacaagccgcccggcctcccgcagagctgtgagagctatggaggttctgatgtcacttctggaaaagagctgagtgacagctgtgaaggcgcctttggagggggcaggctggagggcagggcagcccgaaaacaccaccgcaggtccacgcgtgcgcgctcccggcaggagagggccagccggccccggcttaccatcttgaacgtgtgcaacactggggacaagatggtggagtgccagctggagacgcacaaccacaagatggtgaccttcaagttcgacttggacggggacgcacccgatgaaattgccacgtatatggtggagcatgactttatcctgcaggccgagcgggaaacgttcatcgagcagatgaaggatgtcatggacaaggcagaggacatgctcagcgaggacacagacgccgaccgtggctccgacccagggaccagcccgccacacctcagcacctgcggcctgggcaccggggaggagagccgacaatcccaagccaacgcccccgtgtatcagcagaacgtcctgcacaccgggaagaggtggttcatcatctgtccggtggctgagcaccccgcccccgaggcccctgaatcttcgcccccacttcctctaagctccctgccgccagaagccagccaagattcagcgccctataaagaccagctgtcctcgaaggaacaacccagctttctagccagtcagcagctcctgagccaggcgggccccagcaaccctcctggggcacccccagcccctttggccccctcctcccctcctgtgactgctctgccccaagatggagcagctccagccaccagcaccatgccagagccagcgtcaggaactgccagccaggcagggggtccagggacacctcaggggctgaccagtgagctcgagacgtctcagccactagcggagactcacgaggccccgcttgctgtgcagcccctcgtggtgggcctagcaccttgcactccagctccagaggctgcctcaaccagggacgccagtgccccaagggagcccctgccacctcctgcacctgagcccagcccccacagcgggaccccacagcccgccttgggtcagcctgctcccctgcttcctgccgcagtgggggccgtcagcctggccacctcccagctcccaagcccacccctggggcccaccgtccccccacagccaccctcggccctggagtcggatggggaagggccgccccccagggtgggctttgtggacagcaccatcaagagcctggacgagaagctgcggactctgctctaccaggagcacgtgcccacctcctcagcctcagctgggacccctgtggaggtgggcgacagagacttcaccctggagcccctgagaggggaccagccccgctcagaggtctgcgggggggacctggccctgcccccagtgcctaaggaggcggtctcagggcgtgtccagctgccccagcccttggtggagaagtcagaactggcccccactcgaggggccgtgatggagcagggcacgtcctcgtcaatgacagagtcgtctcccaggagtatgctaggctatgacagagatggaaggcaggtggcctcagactcccatgtggtccccagcgtcccccaggatgtacctgcttttgtgagacctgcacgtgtggagcccacagacagggatggtggagaagctggagaaagctcggcagagcccccgccgagtgacatgggcacagtggggggccaggctagccacccccagacactcggcgctcgagctttggggtcccctcggaaacgtccagagcagcaggatgtcagctcaccagccaagactgtgggccgtttctcggtggtcagcactcaggacgagtggaccctggcctccccccacagcctgagatactctgccccacccgacgtctacctggacgaggccccctccagccccgacgtgaagctggcagtgcggcgggcgcagacggcctcctccatcgaggtcggcgtgggcgagcccgtgtccagcgactctggggacgagggccctcgggcgagacccccggtgcagaagcaggcgtccctgcccgtgagtggcagcgtggctggcgacttcgtgaagaaggccaccgccttcctgcagaggccttctcgggccggctcgctgggccccgagacacccagcagggtgggcatgaaggtccccacgatcagcgtgacctccttccattcccagtcgtcctacatcagcagcgacaatgattcggagctcgaggatgctgacataaagaaggagctgcagagtctgcgggagaagcacctgaaggagatctcggagctgcagagccagcagaagcaggagatcgaagctctgtaccgccgcctgggcaagccactgccccccaacgtgggcttcttccacacggcaccccccactggccgccggagaaaaaccagcaagagcaagctgaaggcaggcaagctgctaaatcccctggtgcggcagctcaaggtcgtggcctccagcacaggtcacttggctgactccagcagaggccctcccgctaaggaccctgcccaagccagtgtggggctcactgcagacagcacgggcctgagcgggaaggcagtgcagacccagcagccctgctccgtccgggcctccctgtcttcggacatctgctccggcttagccagtgatggaggcggagcgcgtggccaagggtcctccaccagcagcctggccccaggccctgagccaggcccccagcccgccctgcacgtccaggcgcaggtgaacaacagcaacaacaagaagggtaccttcacggacgacctgcacaagctggtggacgagtggacgagcaagacggtgggggccgcgcagctgaagcccacgctcaaccagctgaagcagacccagaagctgcaagacatggaggcccaggcaggctgggctgcccctggcgaggcgcgggctatgaccgcacctcgagcaggagtggggatgccacgtctgcccccagcgcccggccctctgtccaccacggtcattcccggagccgccccgaccctgtccgtgcccacaccagatggcgccctcggaaccgcccggagaaaccaggtgtggtttggcctccgagtcccccccaccgcctgctgtgggcacagcactcagccgcgagggggacagcgggtgggcagcaagactgcttcctttgcggcttcagaccctgttcgctcctaggttcctgtggtccacgcgccgtctccacacccacttcctatacttgagttgatggttagaaccttgtcgtcaccctgcagaagtacagtgccttgaatgccagcttttccgttccctgatgaaaagatatgttaaaaaaaattatcggaaaaggtttcatttgcaattggcttgtgcattgataatctttatttactgttttaagttgcagagatgtgaatggtttacaaatctgaagctgaagttcaatctttggttttctgttgtaaatgccttttacaaacattgaattagctaccttaagtattgaagagcttccattgctaggtgagccctgctttgtcctcagtagagtgccggttccctgggctcatccaggggctgagagacggcgggacgctggggcagggcacactggcggagctgcttgctcagtagggaatgtcagttgttgcgctgggccatgagaaatccgccagaaaacgttaggtgagcagacatgccccccatgccagtgggctgctgtgagtgaggataaggtgtgtgttgggcatagaaaccctggctgcccgcccaccctgtggagacaagtgcagctcctccagctggagaggctgccctctctcctgcccacttccctcccttctccatgatttccatggagacctgtggctctgctcacccctggcatgcagaccgctctcccgtccagccctaagcctgctctgcggagggcggggtcattcttctcctggagatttcagtgggactcgtccccagtgggcacaacacagcccttggtgggaggggaaggccccagcctcctccacctcccactggaaagcagactgcttgggactgcccagctgtgaattgtatagtttctgtacttattagaactgggtaaattattttggttcaaatctattattccatcaattcagttagaattgaattttctaggtgattatgcagaatcttctgccagggcacgatgctgtcgtaagagatttctgttctctgtactgggcccccttgccctgttccttgagtgaagtgggggctgccctcacctgtcccccttgcctgtgaatcccttccttgtacatggtggtcagtggcacggaatccccaatagattgtatatctgaaggagaaaaataaacacttttgctcgaaaacagtgtgaaacaacatctttttcttaccctctatccatataaaatccaaagcaaccagcctcctagggagcacaggagttgggagccagttctgggctcagctgcatccacacctctggaggagggtgctgaggggctgcgggtgctgggctgggctgtccccgg

SEQ ID NO: 382162 - DNA, 4216 bp, Homo sapiens
  misc_feature (534)..(534): n is a, c, g, or t
cggaccattgtgccaaatgcaccggccactatccccctgctggccgtagccccaccgggcgtggctgccctgtccattcattctgccgtggcccagctcccaggccaacctgtgtacccagcggccttcccacagatggcgcctactgacgtccctccttccccccatcacacggtgcagaatatgagggccacccctccacagccggcactgcctccacaacccacactgcccccacaacccgtgctgcccccgcaacccacgctgccccctcaacctgtgttgcccccgcaacccacacggccccctcaacctgtgctgcccccgcaacccatgctgcccccacaacctgtgctgcccccgcagccggcactgcctgtgcgccctgagcccctccagccccaccttcctgaacaagctgctccagctgctacaccagggagccagattctgcttggccacccagctccctatgctgtggacgtcgccgctcaggtccccaccgtgcctgtgccaccggctgcggtcctctcnccgcctctgccggaagtgctgctgcctgccgcccctgagctcctgcctcagttccccagctccctggccacggtgtctgcctctgtgcagagtgtgcccacccagactgccacacttctgccaccagcaaacccaccgctgcctggcgggcccgggatcgccagcccttgcccaactgtccagctgacggtggaaccagtccaagaggagcaggcctcacaggacaagccgcccggcctcccgcagagctgtgagagctatggaggttctgatgtcacttctggaaaagagctgagtgacagctgtgaaggcgcctttggagggggcaggctggagggcagggcagcccgaaaacaccaccgcaggtccacgcgtgcgcgctcccggcaggagagggccagccggccccggcttaccatcttgaacgtgtgcaacactggggacaagatggtggagtgccagctggagacgcacaaccacaagatggtgaccttcaagttcgacttggacggggacgcacccgatgaaattgccacgtatatggtggagcatgactttatcctgcaggccgagcgggaaacgttcatcgagcagatgaaggatgtcatggacaaggcagaggacatgctcagcgaggacacagacgccgaccgtggctccgacccagggaccagcccgccacacctcagcacctgcggcctgggcaccggggaggagagccgacaatcccaagccaacgcccccgtgtatcagcagaacgtcctgcacaccgggaagaggtggttcatcatctgtccggtggctgagcaccccgcccccgaggcccctgaatcttcgcccccacttcctctaagctccctgccgccagaagccagccaagattcagcgccctataaagaccagctgtcctcgaaggaacaacccagctttctagccagtcagcagctcctgagccaggcgggccccagcaaccctcctggggcacccccagcccctttggccccctcctcccctcctgtgactgctctgccccaagatggagcagctccagccaccagcaccatgccagagccagcgtcaggaactgccagccaggcagggggtccagggacacctcaggggctgaccagtgagctcgagacgtctcagccactagcggagactcacgaggccccgcttgctgtgcagcccctcgtggtgggcctagcaccttgcactccagctccagaggctgcctcaaccagggacgccagtgccccaagggagcccctgccacctcctgcacctgagcccagcccccacagcgggaccccacagcccgccttgggtcagcctgctcccctgcttcctgccgcagtgggggccgtcagcctggccacctcccagctcccaagcccacccctggggcccaccgtccccccacagccaccctcggccctggagtcggatggggaagggccgccccccagggtgggctttgtggacagcaccatcaagagcctggacgagaagctgcggactctgctctaccaggagcacgtgcccacctcctcagcctcagctgggacccctgtggaggtgggcgacagagacttcaccctggagcccctgagaggggaccagccccgctcagaggtctgcgggggggacctggccctgcccccagtgcctaaggaggcggtctcagggcgtgtccagctgccccagcccttggtggagaagtcagaactggcccccactcgaggggccgtgatggagcagggcacgtcctcgtcaatgacagagtcgtctcccaggagtatgctaggctatgacagagatggaaggcaggtggcctcagactcccatgtggtccccagcgtcccccaggatgtacctgcttttgtgagacctgcacgtgtggagcccacagacagggatggtggagaagctggagaaagctcggcagagcccccgccgagtgacatgggcacagtggggggccaggctagccacccccagacactcggcgctcgagctttggggtcccctcggaaacgtccagagcagcaggatgtcagctcaccagccaagactgtgggccgtttctcggtggtcagcactcaggacgagtggaccctggcctccccccacagcctgagatactctgccccacccgacgtctacctggacgaggccccctccagccccgacgtgaagctggcagtgcggcgggcgcagacggcctcctccatcgaggtcggcgtgggcgagcccgtgtccagcgactctggggacgagggccctcgggcgagacccccggtgcagaagcaggcgtccctgcccgtgagtggcagcgtggctggcgacttcgtgaagaaggccaccgccttcctgcagaggccttctcgggccggctcgctgggccccgagacacccagcagggtgggcatgaaggtccccacgatcagcgtgacctccttccattcccagtcgtcctacatcagcagcgacaatgattcggagctcgaggatgctgacataaagaaggagctgcagagtctgcgggagaagcacctgaaggagatctcggagctgcagagccagcagaagcaggagatcgaagctctgtaccgccgcctgggcaagccactgccccccaacgtgggcttcttccacacggcaccccccactggccgccggagaaaaaccagcaagagcaagctgaaggcaggcaagctgctaaatcccctggtgcggcagctcaaggtcgtggcctccagcacaggtcacttggctgactccagcagaggccctcccgctaaggaccctgcccaagccagtgtggggctcactgcagacagcacgggcctgagcgggaaggcagtgcagacccagcagccctgctccgtccgggcctccctgtcttcggacatctgctccggcttagccagtgatggaggcggagcgcgtggccaaggctggacggtttaccacccaacgtctgagagagtgacctataagtctagtagcaaacctcgtgctcgattcctcagtggacccgtatctgtgtccatctggtctgccctgaagcgtctctgcctaggcaaagaacacagcagtaggtcctccaccagcagcctggccccaggccctgagccaggcccccagcccgccctgcacgtccaggcgcaggtgaacaacagcaacaacaagaagggtaccttcacggacgacctgcacaagctggtggacgagtggacgagcaagacggtgggggccgcgcagctgaagcccacgctcaaccagctgaagcagacccagaagctgcaagacatggaggcccaggcaggctgggctgcccctggcgaggcgcgggctatgaccgcacctcgagcaggagtggggatgccacgtctgcccccagcgcccggccctctgtccaccacggtcattcccggagccgccccgaccctgtccgtgcccacaccagatcctgagagtgagaagcctgactgaccccgcctagacgccaggcccacttcacgccgtctaagtggagaagtgacggaccctcagggccagctgctcctcctgtccagttcacgctgttttgtaaccactttctaagcattttttattcacaattggaaacacaaatgtaatgcaagaataaaaaatattttggggcagaaaggacttt

SEQ ID NO: 382163 - DNA, 4812 bp, Homo sapiens
  misc_feature (534)..(534): n is a, c, g, or t
cggaccattgtgccaaatgcaccggccactatccccctgctggccgtagccccaccgggcgtggctgccctgtccattcattctgccgtggcccagctcccaggccaacctgtgtacccagcggccttcccacagatggcgcctactgacgtccctccttccccccatcacacggtgcagaatatgagggccacccctccacagccggcactgcctccacaacccacactgcccccacaacccgtgctgcccccgcaacccacgctgccccctcaacctgtgttgcccccgcaacccacacggccccctcaacctgtgctgcccccgcaacccatgctgcccccacaacctgtgctgcccccgcagccggcactgcctgtgcgccctgagcccctccagccccaccttcctgaacaagctgctccagctgctacaccagggagccagattctgcttggccacccagctccctatgctgtggacgtcgccgctcaggtccccaccgtgcctgtgccaccggctgcggtcctctcnccgcctctgccggaagtgctgctgcctgccgcccctgagctcctgcctcagttccccagctccctggccacggtgtctgcctctgtgcagagtgtgcccacccagactgccacacttctgccaccagcaaacccaccgctgcctggcgggcccgggatcgccagcccttgcccaactgtccagctgacggtggaaccagtccaagaggagcaggcctcacaggacaagccgcccggcctcccgcagagctgtgagagctatggaggttctgatgtcacttctggaaaagagctgagtgacagctgtgaaggcgcctttggagggggcaggctggagggcagggcagcccgaaaacaccaccgcaggtccacgcgtgcgcgctcccggcaggagagggccagccggccccggcttaccatcttgaacgtgtgcaacactggggacaagatggtggagtgccagctggagacgcacaaccacaagatggtgaccttcaagttcgacttggacggggacgcacccgatgaaattgccacgtatatggtggagcatgactttatcctgcaggccgagcgggaaacgttcatcgagcagatgaaggatgtcatggacaaggcagaggacatgctcagcgaggacacagacgccgaccgtggctccgacccagggaccagcccgccacacctcagcacctgcggcctgggcaccggggaggagagccgacaatcccaagccaacgcccccgtgtatcagcagaacgtcctgcacaccgggaagaggtggttcatcatctgtccggtggctgagcaccccgcccccgaggcccctgaatcttcgcccccacttcctctaagctccctgccgccagaagccagccaagattcagcgccctataaagaccagctgtcctcgaaggaacaacccagctttctagccagtcagcagctcctgagccaggcgggccccagcaaccctcctggggcacccccagcccctttggccccctcctcccctcctgtgactgctctgccccaagatggagcagctccagccaccagcaccatgccagagccagcgtcaggaactgccagccaggcagggggtccagggacacctcaggggctgaccagtgagctcgagacgtctcagccactagcggagactcacgaggccccgcttgctgtgcagcccctcgtggtgggcctagcaccttgcactccagctccagaggctgcctcaaccagggacgccagtgccccaagggagcccctgccacctcctgcacctgagcccagcccccacagcgggaccccacagcccgccttgggtcagcctgctcccctgcttcctgccgcagtgggggccgtcagcctggccacctcccagctcccaagcccacccctggggcccaccgtccccccacagccaccctcggccctggagtcggatggggaagggccgccccccagggtgggctttgtggacagcaccatcaagagcctggacgagaagctgcggactctgctctaccaggagcacgtgcccacctcctcagcctcagctgggacccctgtggaggtgggcgacagagacttcaccctggagcccctgagaggggaccagccccgctcagaggtctgcgggggggacctggccctgcccccagtgcctaaggaggcggtctcagggcgtgtccagctgccccagcccttggtggagaagtcagaactggcccccactcgaggggccgtgatggagcagggcacgtcctcgtcaatgacagagtcgtctcccaggagtatgctaggctatgacagagatggaaggcaggtggcctcagactcccatgtggtccccagcgtcccccaggatgtacctgcttttgtgagacctgcacgtgtggagcccacagacagggatggtggagaagctggagaaagctcggcagagcccccgccgagtgacatgggcacagtggggggccaggctagccacccccagacactcggcgctcgagctttggggtcccctcggaaacgtccagagcagcaggatgtcagctcaccagccaagactgtgggccgtttctcggtggtcagcactcaggacgagtggaccctggcctccccccacagcctgagatactctgccccacccgacgtctacctggacgaggccccctccagccccgacgtgaagctggcagtgcggcgggcgcagacggcctcctccatcgaggtcggcgtgggcgagcccgtgtccagcgactctggggacgagggccctcgggcgagacccccggtgcagaagcaggcgtccctgcccgtgagtggcagcgtggctggcgacttcgtgaagaaggccaccgccttcctgcagaggccttctcgggccggctcgctgggccccgagacacccagcagggtgggcatgaaggtccccacgatcagcgtgacctccttccattcccagtcgtcctacatcagcagcgacaatgattcggagctcgaggatgctgacataaagaaggagctgcagagtctgcgggagaagcacctgaaggagatctcggagctgcagagccagcagaagcaggagatcgaagctctgtaccgccgcctgggcaagccactgccccccaacgtgggcttcttccacacggcaccccccactggccgccggagaaaaaccagcaagagcaagctgaaggcaggcaagctgctaaatcccctggtgcggcagctcaaggtcgtggcctccagcacaggtcacttggctgactccagcagaggccctcccgctaaggaccctgcccaagccagtgtggggctcactgcagacagcacgggcctgagcgggaaggcagtgcagacccagcagccctgctccgtccgggcctccctgtcttcggacatctgctccggcttagccagtgatggaggcggagcgcgtggccaagggtcctccaccagcagcctggccccaggccctgagccaggcccccagcccgccctgcacgtccaggcgcaggtgaacaacagcaacaacaagaagggtaccttcacggacgacctgcacaagctggtggacgagtggacgagcaagacggtgggggccgcgcagctgaagcccacgctcaaccagctgaagcagacccagaagctgcaagacatggaggcccaggcaggctgggctgcccctggcgaggcgcgggctatgaccgcacctcgagcaggagtggggatgccacgtctgcccccagcgcccggccctctgtccaccacggtcattcccggagccgccccgaccctgtccgtgcccacaccagatggcgccctcggaaccgcccggagaaaccaggtgtggtttggcctccgagtcccccccaccgcctgctgtgggcacagcactcagccgcgagggggacagcgggtgggcagcaagactgcttcctttgcggcttcagaccctgttcgctcctaggttcctgtggtccacgcgccgtctccacacccacttcctatacttgagttgatggttagaaccttgtcgtcaccctgcagaagtacagtgccttgaatgccagcttttccgttccctgatgaaaagatatgttaaaaaaaattatcggaaaaggtttcatttgcaattggcttgtgcattgataatctttatttactgttttaagttgcagagatgtgaatggtttacaaatctgaagctgaagttcaatctttggttttctgttgtaaatgccttttacaaacattgaattagctaccttaagtattgaagagcttccattgctaggtgagccctgctttgtcctcagtagagtgccggttccctgggctcatccaggggctgagagacggcgggacgctggggcagggcacactggcggagctgcttgctcagtagggaatgtcagttgttgcgctgggccatgagaaatccgccagaaaacgttaggtgagcagacatgccccccatgccagtgggctgctgtcccccttgcctgtgaatcccttccttgtacatggtggtcagtggcacggaatccccaatagattgtatatctgaaggagaaaaataaacacttttgctcgaaaacagtgtgaaacaacatctttttcttaccctctatccatataaaatccaaagcaaccagcctcctagggagcacaggagttgggagccagttctgggctcagctgcatccacacctctggaggagggtgctgaggggctgcgggtgctgggctgggctgtccccgg

SEQ ID NO: 382164 - DNA, 5315 bp, Homo sapiens
  misc_feature (534)..(534): n is a, c, g, or t
cggaccattgtgccaaatgcaccggccactatccccctgctggccgtagccccaccgggcgtggctgccctgtccattcattctgccgtggcccagctcccaggccaacctgtgtacccagcggccttcccacagatggcgcctactgacgtccctccttccccccatcacacggtgcagaatatgagggccacccctccacagccggcactgcctccacaacccacactgcccccacaacccgtgctgcccccgcaacccacgctgccccctcaacctgtgttgcccccgcaacccacacggccccctcaacctgtgctgcccccgcaacccatgctgcccccacaacctgtgctgcccccgcagccggcactgcctgtgcgccctgagcccctccagccccaccttcctgaacaagctgctccagctgctacaccagggagccagattctgcttggccacccagctccctatgctgtggacgtcgccgctcaggtccccaccgtgcctgtgccaccggctgcggtcctctcnccgcctctgccggaagtgctgctgcctgccgcccctgagctcctgcctcagttccccagctccctggccacggtgtctgcctctgtgcagagtgtgcccacccagactgccacacttctgccaccagcaaacccaccgctgcctggcgggcccgggatcgccagcccttgcccaactgtccagctgacggtggaaccagtccaagaggagcaggcctcacaggacaagccgcccggcctcccgcagagctgtgagagctatggaggttctgatgtcacttctggaaaagagctgagtgacagctgtgaaggcgcctttggagggggcaggctggagggcagggcagcccgaaaacaccaccgcaggtccacgcgtgcgcgctcccggcaggagagggccagccggccccggcttaccatcttgaacgtgtgcaacactggggacaagatggtggagtgccagctggagacgcacaaccacaagatggtgaccttcaagttcgacttggacggggacgcacccgatgaaattgccacgtatatggtggagcatgactttatcctgcaggccgagcgggaaacgttcatcgagcagatgaaggatgtcatggacaaggcagaggacatgctcagcgaggacacagacgccgaccgtggctccgacccagggaccagcccgccacacctcagcacctgcggcctgggcaccggggaggagagccgacaatcccaagccaacgcccccgtgtatcagcagaacgtcctgcacaccgggaagaggtggttcatcatctgtccggtggctgagcaccccgcccccgaggcccctgaatcttcgcccccacttcctctaagctccctgccgccagaagccagccaagattcagcgccctataaagaccagctgtcctcgaaggaacaacccagctttctagccagtcagcagctcctgagccaggcgggccccagcaaccctcctggggcacccccagcccctttggccccctcctcccctcctgtgactgctctgccccaagatggagcagctccagccaccagcaccatgccagagccagcgtcaggaactgccagccaggcagggggtccagggacacctcaggggctgaccagtgagctcgagacgtctcagccactagcggagactcacgaggccccgcttgctgtgcagcccctcgtggtgggcctagcaccttgcactccagctccagaggctgcctcaaccagggacgccagtgccccaagggagcccctgccacctcctgcacctgagcccagcccccacagcgggaccccacagcccgccttgggtcagcctgctcccctgcttcctgccgcagtgggggccgtcagcctggccacctcccagctcccaagcccacccctggggcccaccgtccccccacagccaccctcggccctggagtcggatggggaagggccgccccccagggtgggctttgtggacagcaccatcaagagcctggacgagaagctgcggactctgctctaccaggagcacgtgcccacctcctcagcctcagctgggacccctgtggaggtgggcgacagagacttcaccctggagcccctgagaggggaccagccccgctcagaggtctgcgggggggacctggccctgcccccagtgcctaaggaggcggtctcagggcgtgtccagctgccccagcccttggtggagaagtcagaactggcccccactcgaggggccgtgatggagcagggcacgtcctcgtcaatgacagagtcgtctcccaggagtatgctaggctatgacagagatggaaggcaggtggcctcagactcccatgtggtccccagcgtcccccaggatgtacctgcttttgtgagacctgcacgtgtggagcccacagacagggatggtggagaagctggagaaagctcggcagagcccccgccgagtgacatgggcacagtggggggccaggctagccacccccagacactcggcgctcgagctttggggtcccctcggaaacgtccagagcagcaggatgtcagctcaccagccaagactgtgggccgtttctcggtggtcagcactcaggacgagtggaccctggcctccccccacagcctgagatactctgccccacccgacgtctacctggacgaggccccctccagccccgacgtgaagctggcagtgcggcgggcgcagacggcctcctccatcgaggtcggcgtgggcgagcccgtgtccagcgactctggggacgagggccctcgggcgagacccccggtgcagaagcaggcgtccctgcccgtgagtggcagcgtggctggcgacttcgtgaagaaggccaccgccttcctgcagaggccttctcgggccggctcgctgggccccgagacacccagcagggtgggcatgaaggtccccacgatcagcgtgacctccttccattcccagtcgtcctacatcagcagcgacaatgattcggagctcgaggatgctgacataaagaaggagctgcagagtctgcgggagaagcacctgaaggagatctcggagctgcagagccagcagaagcaggagatcgaagctctgtaccgccgcctgggcaagccactgccccccaacgtgggcttcttccacacggcaccccccactggccgccggagaaaaaccagcaagagcaagctgaaggcaggcaagctgctaaatcccctggtgcggcagctcaaggtcgtggcctccagcacaggctggacggtttaccacccaacgtctgagagagtgacctataagtctagtagcaaacctcgtgctcgattcctcagtggacccgtatctgtgtccatctggtctgccctgaagcgtctctgcctaggcaaagaacacagcagtaggtcctccaccagcagcctggccccaggccctgagccaggcccccagcccgccctgcacgtccaggcgcaggtgaacaacagcaacaacaagaagggtaccttcacggacgacctgcacaagctggtggacgagtggacgagcaagacggtgggggccgcgcagctgaagcccacgctcaaccagctgaagcagacccagaagctgcaagacatggaggcccaggcaggctgggctgcccctggcgaggcgcgggctatgaccgcacctcgagcaggagtggggatgccacgtctgcccccagcgcccggccctctgtccaccacggtcattcccggagccgccccgaccctgtccgtgcccacaccagatggcgccctcggaaccgcccggagaaaccaggtgtggtttggcctccgagtcccccccaccgcctgctgtgggcacagcactcagccgcgagggggacagcgggtgggcagcaagactgcttcctttgcggcttcagaccctgttcgctcctaggttcctgtggtccacgcgccgtctccacacccacttcctatacttgagttgatggttagaaccttgtcgtcaccctgcagaagtacagtgccttgaatgccagcttttccgttccctgatgaaaagatatgttaaaaaaaattatcggaaaaggtttcatttgcaattggcttgtgcattgataatctttatttactgttttaagttgcagagatgtgaatggtttacaaatctgaagctgaagttcaatctttggttttctgttgtaaatgccttttacaaacattgaattagctaccttaagtattgaagagcttccattgctaggtgagccctgctttgtcctcagtagagtgccggttccctgggctcatccaggggctgagagacggcgggacgctggggcagggcacactggcggagctgcttgctcagtagggaatgtcagttgttgcgctgggccatgagaaatccgccagaaaacgttaggtgagcagacatgccccccatgccagtgggctgctgtgagtgaggataaggtgtgtgttgggcatagaaaccctggctgcccgcccaccctgtggagacaagtgcagctcctccagctggagaggctgccctctctcctgcccacttccctcccttctccatgatttccatggagacctgtggctctgctcacccctggcatgcagaccgctctcccgtccagccctaagcctgctctgcggagggcggggtcattcttctcctggagatttcagtgggactcgtccccagtgggcacaacacagcccttggtgggaggggaaggccccagcctcctccacctcccactggaaagcagactgcttgggactgcccagctgtgaattgtatagtttctgtacttattagaactgggtaaattattttggttcaaatctattattccatcaattcagttagaattgaattttctaggtgattatgcagaatcttctgccagggcacgatgctgtcgtaagagatttctgttctctgtactgggcccccttgccctgttccttgagtgaagtgggggctgccctcacctgtcccccttgcctgtgaatcccttccttgtacatggtggtcagtggcacggaatccccaatagattgtatatctgaaggagaaaaataaacacttttgctcgaaaacagtgtgaaacaacatctttttcttaccctctatccatataaaatccaaagcaaccagcctcctagggagcacaggagttgggagccagttctgggctcagctgcatccacacctctggaggagggtgctgaggggctgcgggtgctgggctgggctgtccccgg

SEQ ID NO: 382165 - DNA, 2038 bp, Homo sapiens
ctgtgaagagtgcccagtggggccctccctggagtggagaggagtgactccccgtggccagcagccttgccttcctggggcacaccccgcatacagcttctccccgggctgggacagtggaagggctgccttgccatcacctccctgcacacttgctttgcccaggtcctggggctctgctcctgccagctcctgggtggttcatgctcctgtgagggcactgaccagccaagcaggaggcctttgtggtggctgagtagaggcatgtggggtcactcatgcgccctcggggtccaggccccactagtcctcctccaagtcccattttggctggtggacacccaggtgtgtggcctagaggctatcaggctgcagcttggggaagcaaacaagggagggtgatggttcctggccccacaccatcattctggtgtcagccctgagagggtgcctgtcacagcaggttccaggactgctgcctcctgaggatggagaaactgtggcaccctgggggccactaagggaggccagctgattgcagccacgtgtaccttcctcttctcgtctctgtgttttgtagatgaccgcacctcgagcaggagtggggatgccacgtctgcccccagcgcccggccctctgtccaccacggtcattcccggagccgccccgaccctgtccgtgcccacaccaggttcctgtggtccacgcgccgtctccacacccacttcctatacttgagttgatggttagaaccttgtcgtcaccctgcagaagtacagtgccttgaatgccagcttttccgttccctgatgaaaagatatgttaaaaaaaattatcggaaaaggtttcatttgcaattggcttgtgcattgataatctttatttactgttttaagttgcagagatgtgaatggtttacaaatctgaagctgaagttcaatctttggttttctgttgtaaatgccttttacaaacattgaattagctaccttaagtattgaagagcttccattgctaggtgagccctgctttgtcctcagtagagtgccggttccctgggctcatccaggggctgagagacggcgggacgctggggcagggcacactggcggagctgcttgctcagtagggaatgtcagttgttgcgctgggccatgagaaatccgccagaaaacgttaggtgagcagacatgccccccatgccagtgggctgctgtgagtgaggataaggtgtgtgttgggcatagaaaccctggctgcccgcccaccctgtggagacaagtgcagctcctccagctggagaggctgccctctctcctgcccacttccctcccttctccatgatttccatggagacctgtggctctgctcacccctggcatgcagaccgctctcccgtccagccctaagcctgctctgcggagggcggggtcattcttctcctggagatttcagtgggactcgtccccagtgggcacaacacagcccttggtgggaggggaaggccccagcctcctccacctcccactggaaagcagactgcttgggactgcccagctgtgaattgtatagtttctgtacttattagaactgggtaaattattttggttcaaatctattattccatcaattcagttagaattgaattttctaggtgattatgcagaatcttctgccagggcacgatgctgtcgtaagagatttctgttctctgtactgggcccccttgccctgttccttgagtgaagtgggggctgccctcacctgtcccccttgcctgtgaatcccttccttgtacatggtggtcagtggcacggaatccccaatagattgtatatctgaaggagaaaaataaacacttttgctcgaaaacagtgtgaaacaacatctttttcttaccctctatccatataaaatccaaagcaaccagcctcctagggagcacaggagttgggagccagttctgggctcagctgcatccacacctctggaggagggtgctgaggggctgcgggtgctgggctgggctgtccccgg

SEQ ID NO: 382166 - DNA, 4284 bp, Homo sapiens
  misc_feature (534)..(534): n is a, c, g, or t
cggaccattgtgccaaatgcaccggccactatccccctgctggccgtagccccaccgggcgtggctgccctgtccattcattctgccgtggcccagctcccaggccaacctgtgtacccagcggccttcccacagatggcgcctactgacgtccctccttccccccatcacacggtgcagaatatgagggccacccctccacagccggcactgcctccacaacccacactgcccccacaacccgtgctgcccccgcaacccacgctgccccctcaacctgtgttgcccccgcaacccacacggccccctcaacctgtgctgcccccgcaacccatgctgcccccacaacctgtgctgcccccgcagccggcactgcctgtgcgccctgagcccctccagccccaccttcctgaacaagctgctccagctgctacaccagggagccagattctgcttggccacccagctccctatgctgtggacgtcgccgctcaggtccccaccgtgcctgtgccaccggctgcggtcctctcnccgcctctgccggaagtgctgctgcctgccgcccctgagctcctgcctcagttccccagctccctggccacggtgtctgcctctgtgcagagtgtgcccacccagactgccacacttctgccaccagcaaacccaccgctgcctggcgggcccgggatcgccagcccttgcccaactgtccagctgacggtggaaccagtccaagaggagcaggcctcacaggacaagccgcccggcctcccgcagagctgtgagagctatggaggttctgatgtcacttctggaaaagagctgagtgacagctgtgaaggcgcctttggagggggcaggctggagggcagggcagcccgaaaacaccaccgcaggtccacgcgtgcgcgctcccggcaggagagggccagccggccccggcttaccatcttgaacgtgtgcaacactggggacaagatggtggagtgccagctggagacgcacaaccacaagatggtgaccttcaagttcgacttggacggggacgcacccgatgaaattgccacgtatatggtggagcatgactttatcctgcaggccgagcgggaaacgttcatcgagcagatgaaggatgtcatggacaaggcagaggacatgctcagcgaggacacagacgccgaccgtggctccgacccagggaccagcccgccacacctcagcacctgcggcctgggcaccggggaggagagccgacaatcccaagccaacgcccccgtgtatcagcagaacgtcctgcacaccgggaagaggtggttcatcatctgtccggtggctgagcaccccgcccccgaggcccctgaatcttcgcccccacttcctctaagctccctgccgccagaagccagccaagattcagcgccctataaagaccagctgtcctcgaaggaacaacccagctttctagccagtcagcagctcctgagccaggcgggccccagcaaccctcctggggcacccccagcccctttggccccctcctcccctcctgtgactgctctgccccaagatggagcagctccagccaccagcaccatgccagagccagcgtcaggaactgccagccaggcagggggtccagggacacctcaggggctgaccagtgagctcgagacgtctcagccactagcggagactcacgaggccccgcttgctgtgcagcccctcgtggtgggcctagcaccttgcactccagctccagaggctgcctcaaccagggacgccagtgccccaagggagcccctgccacctcctgcacctgagcccagcccccacagcgggaccccacagcccgccttgggtcagcctgctcccctgcttcctgccgcagtgggggccgtcagcctggccacctcccagctcccaagcccacccctggggcccaccgtccccccacagccaccctcggccctggagtcggatggggaagggccgccccccagggtgggctttgtggacagcaccatcaagagcctggacgagaagctgcggactctgctctaccaggagcacgtgcccacctcctcagcctcagctgggacccctgtggaggtgggcgacagagacttcaccctggagcccctgagaggggaccagccccgctcagaggtctgcgggggggacctggccctgcccccagtgcctaaggaggcggtctcagggcgtgtccagctgccccagcccttggtggagaagtcagaactggcccccactcgaggggccgtgatggagcagggcacgtcctcgtcaatgacagagtcgtctcccaggagtatgctaggctatgacagagatggaaggcaggtggcctcagactcccatgtggtccccagcgtcccccaggatgtacctgcttttgtgagacctgcacgtgtggagcccacagacagggatggtggagaagctggagaaagctcggcagagcccccgccgagtgacatgggcacagtggggggccaggctagccacccccagacactcggcgctcgagctttggggtcccctcggaaacgtccagagcagcaggatgtcagctcaccagccaagactgtgggccgtttctcggtggtcagcactcaggacgagtggaccctggcctccccccacagcctgagatactctgccccacccgacgtctacctggacgaggccccctccagccccgacgtgaagctggcagtgcggcgggcgcagacggcctcctccatcgaggtcggcgtgggcgagcccgtgtccagcgactctggggacgagggccctcgggcgagacccccggtgcagaagcaggcgtccctgcccgtgagtggcagcgtggctggcgacttcgtgaagaaggccaccgccttcctgcagaggccttctcgggccggctcgctgggccccgagacacccagcagggtgggcatgaaggtccccacgatcagcgtgacctccttccattcccagtcgtcctacatcagcagcgacaatgattcggagctcgaggatgctgacataaagaaggagctgcagagtctgcgggagaagcacctgaaggagatctcggagctgcagagccagcagaagcaggagatcgaagctctgtaccgccgcctgggcaagccactgccccccaacgtgggcttcttccacacggcaccccccactggccgccggagaaaaaccagcaagagcaagctgaaggcaggcaagctgctaaatcccctggtgcggcagctcaaggtcgtggcctccagcacaggtcacttggctgactccagcagaggccctcccgctaaggaccctgcccaagccagtgtggggctcactgcagacagcacgggcctgagcgggaaggcagtgcagacccagcagccctgctccgtccgggcctccctgtcttcggacatctgctccggcttagccagtgatggaggcggagcgcgtggccaaggctggacggtttaccacccaacgtctgagagagtgacctataagtctagtagcaaacctcgtgctcgattcctcagtggacccgtatctgtgtccatctgtctgtatttgttcttttgtattttatcacctcctggcccttggttttctccccccaccccctccctgtcttcattacctttcatacatttcataggatgcctcccccaccccatcgaagtcacctatttaatatcaaagtggaaccccatgagccggtcccctggagcggcggccgccagcgcctacccccaagccccacacagcgtgtgtgcatgctcatggctggtgcctgggcacggaaagcatgtgcagcggctggcctgccttccgccccgggcacctctgcccagaaggactggagccctttgcattcttttcgtcacctcatttatttaatttttttttttatgttggatgtagtttttttttctgttgcaattgtggcaaatatacatgtccgctgtccccagttccagcgacaacaaaaagacaaccccaacctcctccagatgcacagtgtgtgtcacgcgtgtctggactgtgaagacatgcacatagcgagcctatacggttctaaaggtcactggagggcgtggtttctgtaccagggccaaatcccagcacccagtaccctgcacacccaccgccctgtgccctgcatgtggaaatgctgagagaacgtgctccagttcgggcctccccagcccctccccactggaagggcaggtctggtcccctttgtcattgctc

SEQ ID NO: 382167 - DNA, 2236 bp, Homo sapiens
  misc_feature (534)..(534): n is a, c, g, or t
cggaccattgtgccaaatgcaccggccactatccccctgctggccgtagccccaccgggcgtggctgccctgtccattcattctgccgtggcccagctcccaggccaacctgtgtacccagcggccttcccacagatggcgcctactgacgtccctccttccccccatcacacggtgcagaatatgagggccacccctccacagccggcactgcctccacaacccacactgcccccacaacccgtgctgcccccgcaacccacgctgccccctcaacctgtgttgcccccgcaacccacacggccccctcaacctgtgctgcccccgcaacccatgctgcccccacaacctgtgctgcccccgcagccggcactgcctgtgcgccctgagcccctccagccccaccttcctgaacaagctgctccagctgctacaccagggagccagattctgcttggccacccagctccctatgctgtggacgtcgccgctcaggtccccaccgtgcctgtgccaccggctgcggtcctctcnccgcctctgccggaagtgctgctgcctgccgcccctgagctcctgcctcagttccccagctccctggccacggtgtctgcctctgtgcagagtgtgcccacccagactgccacacttctgccaccagcaaacccaccgctgcctggcgggcccgggatcgccagcccttgcccaactgtccagctgacggtggaaccagtccaagaggagcaggcctcacaggacaagccgcccggcctcccgcagagctgtgagagctatggaggttctgatgtcacttctggaaaagagctgagtgacagctgtgaaggcgcctttggagggggcaggctggagggcagggcagcccgaaaacaccaccgcaggtccacgcgtgcgcgctcccggcaggagagggccagccggccccggcttaccatcttgaacgtgtgcaacactggggacaagatggtggagtgccagctggagacgcacaaccacaagatggtgaccttcaagttcgacttggacggggacgcacccgatgaaattgccacgtatatggtggagcatgactttatcctgcaggccgagcgggaaacgttcatcgagcagatgaaggatgtcatggacaaggcagaggacatgctcagcgaggacacagacgccgaccgtggctccgacccagggaccagcccgccacacctcagcacctgcggcctgggcaccggggaggagagccgacaatcccaagccaacgcccccgtgtatcagcagaacgtcctgcacaccgggaagaggtggttcatcatctgtccggtggctgagcaccccgcccccgaggcccctgaatcttcgcccccacttcctctaagctccctgccgccagaagccagccaaggtatgagcagcaggcgcccacacaagcccctccctgtttcatgtacaggcctccttctgtgcatgacccagccggtatgtgccccgtgcccaggtccatgcagggggctcaccctgccctgtctcccatggcgcagagcagcctgtggggctgtgttcctatccttgttttctgctgaatcagctcagtcaaagcagcctccaggtttgagtctgccctgttaccccaccaagtaggtggctcgcatggccatataggtgtgtgttgaagagctccgctgtccttccttcacagtgttaacctggcaactccttgctcctgtccctttcctctgtgccgcacacctgcagcagacacgcctctgctggttctgcttgctttggggggtggggtgggaaagtccctgttggtgctgagactctgattttaaagtgttcacacagacatttatcactgtgcattgatctgcacctgcacctgcctgtacagatgccaacaagcccgtgctttgggctgtcagttaaatcttgttggtcctttgggaggctgaaaatagtcacttgaacaaatttaaggtttaattccttaccagttggcaggggaaagttactgattctataacttgacataaccttatggcacattcatgaaaaatatctgtaaatcatttttaattttatgtcatgtgcttccagtgactcccattatcttttggagattcgttcccatgggggacaggtcagcctaataacgaaatccaaacaaagcaacgagctgaaacaaggtgatctcaggtaaagggcttggcctcagcctgggctg

SEQ ID NO: 382168 - DNA, 204 bp, Homo sapiens
ctgtgagtctcacggctcttctctttttgtgtttctttctccaggtggagaagtcagaactggcccccactcgaggggccgtgatggagcagggcacgtcctcgtcaatgacaggtaacagcttcctgctgaaccctgcgttcacaaggtgctgcctggcttccttgccccagaaccttctgcatccgcaccctcgtctttcat

SEQ ID NO: 382169 - DNA, 5507 bp, Homo sapiens
  misc_feature (534)..(534): n is a, c, g, or t
cggaccattgtgccaaatgcaccggccactatccccctgctggccgtagccccaccgggcgtggctgccctgtccattcattctgccgtggcccagctcccaggccaacctgtgtacccagcggccttcccacagatggcgcctactgacgtccctccttccccccatcacacggtgcagaatatgagggccacccctccacagccggcactgcctccacaacccacactgcccccacaacccgtgctgcccccgcaacccacgctgccccctcaacctgtgttgcccccgcaacccacacggccccctcaacctgtgctgcccccgcaacccatgctgcccccacaacctgtgctgcccccgcagccggcactgcctgtgcgccctgagcccctccagccccaccttcctgaacaagctgctccagctgctacaccagggagccagattctgcttggccacccagctccctatgctgtggacgtcgccgctcaggtccccaccgtgcctgtgccaccggctgcggtcctctcnccgcctctgccggaagtgctgctgcctgccgcccctgagctcctgcctcagttccccagctccctggccacggtgtctgcctctgtgcagagtgtgcccacccagactgccacacttctgccaccagcaaacccaccgctgcctggcgggcccgggatcgccagcccttgcccaactgtccagctgacggtggaaccagtccaagaggagcaggcctcacaggacaagccgcccggcctcccgcagagctgtgagagctatggaggttctgatgtcacttctggaaaagagctgagtgacagctgtgaaggcgcctttggagggggcaggctggagggcagggcagcccgaaaacaccaccgcaggtccacgcgtgcgcgctcccggcaggagagggccagccggccccggcttaccatcttgaacgtgtgcaacactggggacaagatggtggagtgccagctggagacgcacaaccacaagatggtgaccttcaagttcgacttggacggggacgcacccgatgaaattgccacgtatatggtggagcatgactttatcctgcaggccgagcgggaaacgttcatcgagcagatgaaggatgtcatggacaaggcagaggacatgctcagcgaggacacagacgccgaccgtggctccgacccagggaccagcccgccacacctcagcacctgcggcctgggcaccggggaggagagccgacaatcccaagccaacgcccccgtgtatcagcagaacgtcctgcacaccgggaagaggtggttcatcatctgtccggtggctgagcaccccgcccccgaggcccctgaatcttcgcccccacttcctctaagctccctgccgccagaagccagccaagattcagcgccctataaagaccagctgtcctcgaaggaacaacccagctttctagccagtcagcagctcctgagccaggcgggccccagcaaccctcctggggcacccccagcccctttggccccctcctcccctcctgtgactgctctgccccaagatggagcagctccagccaccagcaccatgccagagccagcgtcaggaactgccagccaggcagggggtccagggacacctcaggggctgaccagtgagctcgagacgtctcagccactagcggagactcacgaggccccgcttgctgtgcagcccctcgtggtgggcctagcaccttgcactccagctccagaggctgcctcaaccagggacgccagtgccccaagggagcccctgccacctcctgcacctgagcccagcccccacagcgggaccccacagcccgccttgggtcagcctgctcccctgcttcctgccgcagtgggggccgtcagcctggccacctcccagctcccaagcccacccctggggcccaccgtccccccacagccaccctcggccctggagtcggatggggaagggccgccccccagggtgggctttgtggacagcaccatcaagagcctggacgagaagctgcggactctgctctaccaggagcacgtgcccacctcctcagcctcagctgggacccctgtggaggtgggcgacagagacttcaccctggagcccctgagaggggaccagccccgctcagaggtctgcgggggggacctggccctgcccccagtgcctaaggaggcggtctcagggcgtgtccagctgccccagcccttggtggagaagtcagaactggcccccactcgaggggccgtgatggagcagggcacgtcctcgtcaatgacagagtcgtctcccaggagtatgctaggctatgacagagatggaaggcaggtggcctcagactcccatgtggtccccagcgtcccccaggatgtacctgcttttgtgagacctgcacgtgtggagcccacagacagggatggtggagaagctggagaaagctcggcagagcccccgccgagtgacatgggcacagtggggggccaggctagccacccccagacactcggcgctcgagctttggggtcccctcggaaacgtccagagcagcaggatgtcagctcaccagccaagactgtgggccgtttctcggtggtcagcactcaggacgagtggaccctggcctccccccacagcctgagatactctgccccacccgacgtctacctggacgaggccccctccagccccgacgtgaagctggcagtgcggcgggcgcagacggcctcctccatcgaggtcggcgtgggcgagcccgtgtccagcgactctggggacgagggccctcgggcgagacccccggtgcagaagcaggcgtccctgcccgtgagtggcagcgtggctggcgacttcgtgaagaaggccaccgccttcctgcagaggccttctcgggccggctcgctgggccccgagacacccagcagggtgggcatgaaggtccccacgatcagcgtgacctccttccattcccagtcgtcctacatcagcagcgacaatgattcggagctcgaggatgctgacataaagaaggagctgcagagtctgcgggagaagcacctgaaggagatctcggagctgcagagccagcagaagcaggagatcgaagctctgtaccgccgcctgggcaagccactgccccccaacgtgggcttcttccacacggcaccccccactggccgccggagaaaaaccagcaagagcaagctgaaggcaggcaagctgctaaatcccctggtgcggcagctcaaggtcgtggcctccagcacaggtcacttggctgactccagcagaggccctcccgctaaggaccctgcccaagccagtgtggggctcactgcagacagcacgggcctgagcgggaaggcagtgcagacccagcagccctgctccgtccgggcctccctgtcttcggacatctgctccggcttagccagtgatggaggcggagcgcgtggccaaggctggacggtttaccacccaacgtctgagagagtgacctataagtctagtagcaaacctcgtgctcgattcctcagtggacccgtatctgtgtccatctggtctgccctgaagcgtctctgcctaggcaaagaacacagcagtaggtcctccaccagcagcctggccccaggccctgagccaggcccccagcccgccctgcacgtccaggcgcaggtgaacaacagcaacaacaagaagggtaccttcacggacgacctgcacaagctggtggacgagtggacgagcaagacggtgggggccgcgcagctgaagcccacgctcaaccagctgaagcagacccagaagctgcaagacatggaggcccaggcaggctgggctgcccctggcgaggcgcgggctatgaccgcacctcgagcaggagtggggatgccacgtctgcccccagcgcccggccctctgtccaccacggtcattcccggagccgccccgaccctgtccgtgcccacaccagatggcgccctcggaaccgcccggagaaaccaggtgtggtttggcctccgagtcccccccaccgcctgctgtgggcacagcactcagccgcgagggggacagcgggtgggcagcaagactgcttcctttgcggcttcagaccctgttcgctcctaggttcctgtggtccacgcgccgtctccacacccacttcctatacttgagttgatggttagaaccttgtcgtcaccctgcagaagtacagtgccttgaatgccagcttttccgttccctgatgaaaagatatgttaaaaaaaattatcggaaaaggtttcatttgcaattggcttgtgcattgataatctttatttactgttttaagttgcagagatgtgaatggtttacaaatctgaagctgaagttcaatctttggttttctgttgtaaatgccttttacaaacattgaattagctaccttaagtattgaagagcttccattgctaggtgagccctgctttgtcctcagtagagtgccggttccctgggctcatccaggggctgagagacggcgggacgctggggcagggcacactggcggagctgcttgctcagtagggaatgtcagttgttgcgctgggccatgagaaatccgccagaaaacgttaggtgagcagacatgccccccatgccagtgggctgctgtgagtgaggataaggtgtgtgttgggcatagaaaccctggctgcccgcccaccctgtggagacaagtgcagctcctccagctggagaggctgccctctctcctgcccacttccctcccttctccatgatttccatggagacctgtggctctgctcacccctggcatgcagaccgctctcccgtccagccctaagcctgctctgcggagggcggggtcattcttctcctggagatttcagtgggactcgtccccagtgggcacaacacagcccttggtgggaggggaaggccccagcctcctccacctcccactggaaagcagactgcttgggactgcccagctgtgaattgtatagtttctgtacttattagaactgggtaaattattttggttcaaatctattattccatcaattcagttagaattgaattttctaggtgattatgcagaatcttctgccagggcacgatgctgtcgtaagagatttctgttctctgtactgggcccccttgccctgttccttgagtgaagtgggggctgccctcacctgtcccccttgcctgtgaatcccttccttgtacatggtggtcagtggcacggaatccccaatagattgtatatctgaaggagaaaaataaacacttttgctcgaaaacagtgtgaaacaacatctttttcttaccctctatccatataaaatccaaagcaaccagcctcctagggagcacaggagttgggagccagttctgggctcagctgcatccacacctctggaggagggtgctgaggggctgcgggtgctgggctgggctgtccccgg

SEQ ID NO: 382170 - DNA, 4072 bp, Homo sapiens
  misc_feature (534)..(534): n is a, c, g, or t
cggaccattgtgccaaatgcaccggccactatccccctgctggccgtagccccaccgggcgtggctgccctgtccattcattctgccgtggcccagctcccaggccaacctgtgtacccagcggccttcccacagatggcgcctactgacgtccctccttccccccatcacacggtgcagaatatgagggccacccctccacagccggcactgcctccacaacccacactgcccccacaacccgtgctgcccccgcaacccacgctgccccctcaacctgtgttgcccccgcaacccacacggccccctcaacctgtgctgcccccgcaacccatgctgcccccacaacctgtgctgcccccgcagccggcactgcctgtgcgccctgagcccctccagccccaccttcctgaacaagctgctccagctgctacaccagggagccagattctgcttggccacccagctccctatgctgtggacgtcgccgctcaggtccccaccgtgcctgtgccaccggctgcggtcctctcnccgcctctgccggaagtgctgctgcctgccgcccctgagctcctgcctcagttccccagctccctggccacggtgtctgcctctgtgcagagtgtgcccacccagactgccacacttctgccaccagcaaacccaccgctgcctggcgggcccgggatcgccagcccttgcccaactgtccagctgacggtggaaccagtccaagaggagcaggcctcacaggacaagccgcccggcctcccgcagagctgtgagagctatggaggttctgatgtcacttctggaaaagagctgagtgacagctgtgaaggcgcctttggagggggcaggctggagggcagggcagcccgaaaacaccaccgcaggtccacgcgtgcgcgctcccggcaggagagggccagccggccccggcttaccatcttgaacgtgtgcaacactggggacaagatggtggagtgccagctggagacgcacaaccacaagatggtgaccttcaagttcgacttggacggggacgcacccgatgaaattgccacgtatatggtggagcatgactttatcctgcaggccgagcgggaaacgttcatcgagcagatgaaggatgtcatggacaaggcagaggacatgctcagcgaggacacagacgccgaccgtggctccgacccagggaccagcccgccacacctcagcacctgcggcctgggcaccggggaggagagccgacaatcccaagccaacgcccccgtgtatcagcagaacgtcctgcacaccgggaagaggtggttcatcatctgtccggtggctgagcaccccgcccccgaggcccctgaatcttcgcccccacttcctctaagctccctgccgccagaagccagccaagattcagcgccctataaagaccagctgtcctcgaaggaacaacccagctttctagccagtcagcagctcctgagccaggcgggccccagcaaccctcctggggcacccccagcccctttggccccctcctcccctcctgtgactgctctgccccaagatggagcagctccagccaccagcaccatgccagagccagcgtcaggaactgccagccaggcagggggtccagggacacctcaggggctgaccagtgagctcgagacgtctcagccactagcggagactcacgaggccccgcttgctgtgcagcccctcgtggtgggcctagcaccttgcactccagctccagaggctgcctcaaccagggacgccagtgccccaagggagcccctgccacctcctgcacctgagcccagcccccacagcgggaccccacagcccgccttgggtcagcctgctcccctgcttcctgccgcagtgggggccgtcagcctggccacctcccagctcccaagcccacccctggggcccaccgtccccccacagccaccctcggccctggagtcggatggggaagggccgccccccagggtgggctttgtggacagcaccatcaagagcctggacgagaagctgcggactctgctctaccaggagcacgtgcccacctcctcagcctcagctgggacccctgtggaggtgggcgacagagacttcaccctggagcccctgagaggggaccagccccgctcagaggtctgcgggggggacctggccctgcccccagtgcctaaggaggcggtctcagggcgtgtccagctgccccagcccttggtggagaagtcagaactggcccccactcgaggggccgtgatggagcagggcacgtcctcgtcaatgacagagtcgtctcccaggagtatgctaggctatgacagagatggaaggcaggtggcctcagactcccatgtggtccccagcgtcccccaggatgtacctgcttttgtgagacctgcacgtgtggagcccacagacagggatggtggagaagctggagaaagctcggcagagcccccgccgagtgacatgggcacagtggggggccaggctagccacccccagacactcggcgctcgagctttggggtcccctcggaaacgtccagagcagcaggatgtcagctcaccagccaagactgtgggccgtttctcggtggtcagcactcaggacgagtggaccctggcctccccccacagcctgagatactctgccccacccgacgtctacctggacgaggccccctccagccccgacgtgaagctggcagtgcggcgggcgcagacggcctcctccatcgaggtcggcgtgggcgagcccgtgtccagcgactctggggacgagggccctcgggcgagacccccggtgcagaagcaggcgtccctgcccgtgagtggcagcgtggctggcgacttcgtgaagaaggccaccgccttcctgcagaggccttctcgggccggctcgctgggccccgagacacccagcagggtgggcatgaaggtccccacgatcagcgtgacctccttccattcccagtcgtcctacatcagcagcgacaatgattcggagctcgaggatgctgacataaagaaggagctgcagagtctgcgggagaagcacctgaaggagatctcggagctgcagagccagcagaagcaggagatcgaagctctgtaccgccgcctgggcaagccactgccccccaacgtgggcttcttccacacggcaccccccactggccgccggagaaaaaccagcaagagcaagctgaaggcaggcaagctgctaaatcccctggtgcggcagctcaaggtcgtggcctccagcacaggtcacttggctgactccagcagaggccctcccgctaaggaccctgcccaagccagtgtggggctcactgcagacagcacgggcctgagcgggaaggcagtgcagacccagcagccctgctccgtccgggcctccctgtcttcggacatctgctccggcttagccagtgatggaggcggagcgcgtggccaagggtcctccaccagcagcctggccccaggccctgagccaggcccccagcccgccctgcacgtccaggcgcaggtgaacaacagcaacaacaagaagggtaccttcacggacgacctgcacaagctggtggacgagtggacgagcaagacggtgggggccgcgcagctgaagcccacgctcaaccagctgaagcagacccagaagctgcaagacatggaggcccaggcaggctgggctgcccctggcgaggcgcgggctatgaccgcacctcgagcaggagtggggatgccacgtctgcccccagcgcccggccctctgtccaccacggtcattcccggagccgccccgaccctgtccgtgcccacaccagatcctgagagtgagaagcctgactgaccccgcctagacgccaggcccacttcacgccgtctaagtggagaagtgacggaccctcagggccagctgctcctcctgtccagttcacgctgttttgtaaccactttctaagcattttttattcacaattggaaacacaaatgtaatgcaagaataaaaaatattttggggcagaaaggacttt

SEQ ID NO: 382171 - DNA, 4228 bp, Homo sapiens
  misc_feature (534)..(534): n is a, c, g, or t
cggaccattgtgccaaatgcaccggccactatccccctgctggccgtagccccaccgggcgtggctgccctgtccattcattctgccgtggcccagctcccaggccaacctgtgtacccagcggccttcccacagatggcgcctactgacgtccctccttccccccatcacacggtgcagaatatgagggccacccctccacagccggcactgcctccacaacccacactgcccccacaacccgtgctgcccccgcaacccacgctgccccctcaacctgtgttgcccccgcaacccacacggccccctcaacctgtgctgcccccgcaacccatgctgcccccacaacctgtgctgcccccgcagccggcactgcctgtgcgccctgagcccctccagccccaccttcctgaacaagctgctccagctgctacaccagggagccagattctgcttggccacccagctccctatgctgtggacgtcgccgctcaggtccccaccgtgcctgtgccaccggctgcggtcctctcnccgcctctgccggaagtgctgctgcctgccgcccctgagctcctgcctcagttccccagctccctggccacggtgtctgcctctgtgcagagtgtgcccacccagactgccacacttctgccaccagcaaacccaccgctgcctggcgggcccgggatcgccagcccttgcccaactgtccagctgacggtggaaccagtccaagaggagcaggcctcacaggacaagccgcccggcctcccgcagagctgtgagagctatggaggttctgatgtcacttctggaaaagagctgagtgacagctgtgaaggcgcctttggagggggcaggctggagggcagggcagcccgaaaacaccaccgcaggtccacgcgtgcgcgctcccggcaggagagggccagccggccccggcttaccatcttgaacgtgtgcaacactggggacaagatggtggagtgccagctggagacgcacaaccacaagatggtgaccttcaagttcgacttggacggggacgcacccgatgaaattgccacgtatatggtggagcatgactttatcctgcaggccgagcgggaaacgttcatcgagcagatgaaggatgtcatggacaaggcagaggacatgctcagcgaggacacagacgccgaccgtggctccgacccagggaccagcccgccacacctcagcacctgcggcctgggcaccggggaggagagccgacaatcccaagccaacgcccccgtgtatcagcagaacgtcctgcacaccgggaagaggtggttcatcatctgtccggtggctgagcaccccgcccccgaggcccctgaatcttcgcccccacttcctctaagctccctgccgccagaagccagccaagattcagcgccctataaagaccagctgtcctcgaaggaacaacccagctttctagccagtcagcagctcctgagccaggcgggccccagcaaccctcctggggcacccccagcccctttggccccctcctcccctcctgtgactgctctgccccaagatggagcagctccagccaccagcaccatgccagagccagcgtcaggaactgccagccaggcagggggtccagggacacctcaggggctgaccagtgagctcgagacgtctcagccactagcggagactcacgaggccccgcttgctgtgcagcccctcgtggtgggcctagcaccttgcactccagctccagaggctgcctcaaccagggacgccagtgccccaagggagcccctgccacctcctgcacctgagcccagcccccacagcgggaccccacagcccgccttgggtcagcctgctcccctgcttcctgccgcagtgggggccgtcagcctggccacctcccagctcccaagcccacccctggggcccaccgtccccccacagccaccctcggccctggagtcggatggggaagggccgccccccagggtgggctttgtggacagcaccatcaagagcctggacgagaagctgcggactctgctctaccaggagcacgtgcccacctcctcagcctcagctgggacccctgtggaggtgggcgacagagacttcaccctggagcccctgagaggggaccagccccgctcagaggtctgcgggggggacctggccctgcccccagtgcctaaggaggcggtctcagggcgtgtccagctgccccagcccttggtggagaagtcagaactggcccccactcgaggggccgtgatggagcagggcacgtcctcgtcaatgacagagtcgtctcccaggagtatgctaggctatgacagagatggaaggcaggtggcctcagactcccatgtggtccccagcgtcccccaggatgtacctgcttttgtgagacctgcacgtgtggagcccacagacagggatggtggagaagctggagaaagctcggcagagcccccgccgagtgacatgggcacagtggggggccaggctagccacccccagacactcggcgctcgagctttggggtcccctcggaaacgtccagagcagcaggatgtcagctcaccagccaagactgtgggccgtttctcggtggtcagcactcaggacgagtggaccctggcctccccccacagcctgagatactctgccccacccgacgtctacctggacgaggccccctccagccccgacgtgaagctggcagtgcggcgggcgcagacggcctcctccatcgaggtcggcgtgggcgagcccgtgtccagcgactctggggacgagggccctcgggcgagacccccggtgcagaagcaggcgtccctgcccgtgagtggcagcgtggctggcgacttcgtgaagaaggccaccgccttcctgcagaggccttctcgggccggctcgctgggccccgagacacccagcagggtgggcatgaaggtccccacgatcagcgtgacctccttccattcccagtcgtcctacatcagcagcgacaatgattcggagctcgaggatgctgacataaagaaggagctgcagagtctgcgggagaagcacctgaaggagatctcggagctgcagagccagcagaagcaggagatcgaagctctgtaccgccgcctgggcaagccactgccccccaacgtgggcttcttccacacggcaccccccactggccgccggagaaaaaccagcaagagcaagctgaaggcaggcaagctgctaaatcccctggtgcggcagctcaaggtcgtggcctccagcacaggtcacttggctgactccagcagaggccctcccgctaaggaccctgcccaagccagtgtggggctcactgcagacagcacgggcctgagcgggaaggcagtgcagacccagcagccctgctccgtccgggcctccctgtcttcggacatctgctccggcttagccagtgatggaggcggagcgcgtggccaagggtcctccaccagcagcctggccccaggccctgagccaggcccccagcccgccctgcacgtccaggcgcaggtgaacaacagcaacaacaagaagggtaccttcacggacgacctgcacaagctggtggacgagtggacgagcaagacggtgggggccgcgcagctgaagcccacgctcaaccagctgaagcagacccagaagctgcaagacatggaggcccaggcaggctgggctgcccctggcgaggcgcgggctccccaagaactaggcttgtccactttacagattgggaggtgagcgacgcacccacagctccgcagctggcaggtggaaaggacaggccaggccaggccaggccagggctgtgactccacagctcagatacagcagcagccccagcctgggcagcccaagccccgcactcagagcaggtagccctggtcttggcagacaggcccacctctgcctgagttctgtttgtgcccaggctggagaccagggcaggtgtgcatgtcacccaagtgacaccagcgtctggccatagctcacacgcacctgagccaatgtggggcggaagtgaggacctgctgtcctaggttttcacacctaacttgtttgatgtcagcgcgagttggagaagcatctgctgtttttcagctttctggaggggtttgtggaagactggtgttatttctatctcaaatatttagtaaaggtcatttgtgaatccatc

SEQ ID NO: 382172 - DNA, 3774 bp, Homo sapiens
  misc_feature (534)..(534): n is a, c, g, or t
cggaccattgtgccaaatgcaccggccactatccccctgctggccgtagccccaccgggcgtggctgccctgtccattcattctgccgtggcccagctcccaggccaacctgtgtacccagcggccttcccacagatggcgcctactgacgtccctccttccccccatcacacggtgcagaatatgagggccacccctccacagccggcactgcctccacaacccacactgcccccacaacccgtgctgcccccgcaacccacgctgccccctcaacctgtgttgcccccgcaacccacacggccccctcaacctgtgctgcccccgcaacccatgctgcccccacaacctgtgctgcccccgcagccggcactgcctgtgcgccctgagcccctccagccccaccttcctgaacaagctgctccagctgctacaccagggagccagattctgcttggccacccagctccctatgctgtggacgtcgccgctcaggtccccaccgtgcctgtgccaccggctgcggtcctctcnccgcctctgccggaagtgctgctgcctgccgcccctgagctcctgcctcagttccccagctccctggccacggtgtctgcctctgtgcagagtgtgcccacccagactgccacacttctgccaccagcaaacccaccgctgcctggcgggcccgggatcgccagcccttgcccaactgtccagctgacggtggaaccagtccaagaggagcaggcctcacaggacaagccgcccggcctcccgcagagctgtgagagctatggaggttctgatgtcacttctggaaaagagctgagtgacagctgtgaaggcgcctttggagggggcaggctggagggcagggcagcccgaaaacaccaccgcaggtccacgcgtgcgcgctcccggcaggagagggccagccggccccggcttaccatcttgaacgtgtgcaacactggggacaagatggtggagtgccagctggagacgcacaaccacaagatggtgaccttcaagttcgacttggacggggacgcacccgatgaaattgccacgtatatggtggagcatgactttatcctgcaggccgagcgggaaacgttcatcgagcagatgaaggatgtcatggacaaggcagaggacatgctcagcgaggacacagacgccgaccgtggctccgacccagggaccagcccgccacacctcagcacctgcggcctgggcaccggggaggagagccgacaatcccaagccaacgcccccgtgtatcagcagaacgtcctgcacaccgggaagaggtggttcatcatctgtccggtggctgagcaccccgcccccgaggcccctgaatcttcgcccccacttcctctaagctccctgccgccagaagccagccaagattcagcgccctataaagaccagctgtcctcgaaggaacaacccagctttctagccagtcagcagctcctgagccaggcgggccccagcaaccctcctggggcacccccagcccctttggccccctcctcccctcctgtgactgctctgccccaagatggagcagctccagccaccagcaccatgccagagccagcgtcaggaactgccagccaggcagggggtccagggacacctcaggggctgaccagtgagctcgagacgtctcagccactagcggagactcacgaggccccgcttgctgtgcagcccctcgtggtgggcctagcaccttgcactccagctccagaggctgcctcaaccagggacgccagtgccccaagggagcccctgccacctcctgcacctgagcccagcccccacagcgggaccccacagcccgccttgggtcagcctgctcccctgcttcctgccgcagtgggggccgtcagcctggccacctcccagctcccaagcccacccctggggcccaccgtccccccacagccaccctcggccctggagtcggatggggaagggccgccccccagggtgggctttgtggacagcaccatcaagagcctggacgagaagctgcggactctgctctaccaggagcacgtgcccacctcctcagcctcagctgggacccctgtggaggtgggcgacagagacttcaccctggagcccctgagaggggaccagccccgctcagaggtctgcgggggggacctggccctgcccccagtgcctaaggaggcggtctcagggcgtgtccagctgccccagcccttggtggagaagtcagaactggcccccactcgaggggccgtgatggagcagggcacgtcctcgtcaatgacagagtcgtctcccaggagtatgctaggctatgacagagatggaaggcaggtggcctcagactcccatgtggtccccagcgtcccccaggatgtacctgcttttgtgagacctgcacgtgtggagcccacagacagggatggtggagaagctggagaaagctcggcagagcccccgccgagtgacatgggcacagtggggggccaggctagccacccccagacactcggcgctcgagctttggggtcccctcggaaacgtccagagcagcaggatgtcagctcaccagccaagactgtgggccgtttctcggtggtcagcactcaggacgagtggaccctggcctccccccacagcctgagatactctgccccacccgacgtctacctggacgaggccccctccagccccgacgtgaagctggcagtgcggcgggcgcagacggcctcctccatcgaggtcggcgtgggcgagcccgtgtccagcgactctggggacgagggccctcgggcgagacccccggtgcagaagcaggcgtccctgcccgtgagtggcagcgtggctggcgacttcgtgaagaaggccaccgccttcctgcagaggccttctcgggccggctcgctgggccccgagacacccagcagggtgggcatgaaggtccccacgatcagcgtgacctccttccattcccagtcgtcctacatcagcagcgacaatgattcggagctcgaggatgctgacataaagaaggagctgcagagtctgcgggagaagcacctgaaggagatctcggagctgcagagccagcagaagcaggagatcgaagctctgtaccgccgcctgggcaagccactgccccccaacgtgggcttcttccacacggcaccccccactggccgccggagaaaaaccagcaagagcaagctgaaggcaggcaagctgctaaatcccctggtgcggcagctcaaggtcgtggcctccagcacaggtcacttggctgactccagcagaggccctcccgctaaggaccctgcccaagccagtgtggggctcactgcagacagcacgggcctgagcgggaaggcagtgcagacccagcagccctgctccgtccgggcctccctgtcttcggacatctgctccggcttagccagtgatggaggcggagcgcgtggccaagggtcctccaccagcagcctggccccaggccctgagccaggcccccagcccgccctgcacgtccaggcgcagatcctgagagtgagaagcctgactgaccccgcctagacgccaggcccacttcacgccgtctaagtggagaagtgacggaccctcagggccagctgctcctcctgtccagttcacgctgttttgtaaccactttctaagcattttttattcacaattggaaacacaaatgtaatgcaagaataaaaaatattttggggcagaaaggacttt

SEQ ID NO: 382173 - DNA, 185 bp, Homo sapiens
acgaggctggtgtggctgttggtgtggaggaggaatcgcagcaacctgtacttgatgagtgtctctttgttttcttccctttatattcatttgcaggctggacggtttaccacccaacgtctgagagagtgacctataagtctagtagcaaacctcgtgctcgattcctcagtggacccgtatct

SEQ ID NO: 382174 - DNA, 312 bp, Homo sapiens
gtagaattttctctaaaaaaactaaaaccagctatcggtatggcaaaataaataataaataataaataaataagggaaggaaggaagcgaactggagcactgaatggtataccaggcaacccgaatatcgttctgcatttagtgattataacacgtcgccaagagagtcatcatcatagcctgtatttactacacctagaaaatgctgctcacagagctggtattattggcccaagttgacaagctcccatgaggaagaaatgggattagaaaacaagtccgtctggctctcagcctctgcttgttccattt

SEQ ID NO: 382175 - DNA, 1018 bp, Homo sapiens
tgggaaaagctccctcagacgtgggcaccaaggaacaggtagaagatcactgtcattttcctgttgtgttttctgccgaatgaatatatgaaagatgatttcttcattaaaatcgaaacatggcacaaaccagacttgggaacattagaaaatgtacatggtttagatccaaacacatggaaaactgttgaaattgtccatatagatattgcagatagaagtcaagttgaaccagcagtaagtattactcaatgacatttaatctgttcccttttacagttaaaaattattttctactatcacatttgggattaagttaaaaaaattatttcctttctttcttgtatggcctacatttctatgccgaagtgagcttggagtgaagtctagtacgtctgtgcagcaaagagaccagagtaagagagaaggcgatttgttttctgtgtagattttggctttgtgcaagtgatccctttaagaaatcccagtatacctgggaaatgtaggttgttttcattgaaaaacaaaaaacacattgtttacaaaataattctccctccagctaggtcccttttacttttcaaatgtgattaagaaagcaaaaatttaatttgcatacaagtatttagtaactcagctacagttgttatttgtggaaaatggttggtgtagagtatctttttaaaaatgttcttttagattccagaagtaggtgtagagtattttaatttaatagttgtttagctttctattttgaatcctattaagatgtaaatatttctactcctggcttttgacttaataaaaaaatttctttttcacaagtaaagatgcttattcctcatgccagattaagactcaagataaagattatatatgtaagcataatagaataatcttaggctggacacagtggcttccacttgtaatcccaacactttggaaggccaaggagggaggattgcttgagcacaggagcttgagaccagcctggacaacatagtgagatcctgtctct

SEQ ID NO: 382176 - DNA, 1151 bp, Homo sapiens
gcgcaggcgctgtgagaggcggtagcggcggcggcggcggtggtatcggcggcagctgtgagggggttccgggaagatggtgctgatcaaggaattccgtgtggttttgccatgttctgttcaggagtatcaggttgggcagctttactctgttgcagaagctagtaagaatgagactggtggtggagaaggaattgaagtcttaaagaatgaaccttatgagaaggatggagaaaagggacagtatacgcacaaaatttatcacctaaagaggtaagcggtgttcacatttgacgccttgtaactacctggcttacttatgatgcatgtaactagctaacttaactagtagatgtgaagtacatttttaatttcagtttgataatatattgcattttaattctttggcagaacctcctcctttatttgtaaattagaaaaggattatatctgcttataacaaaaattcagataaaaacttagtccctgctccttgccatcaaatatttgtaacacagagagaaacactagaagcagcttagagtttatctttctagatcattttctgtatatattcaaaggaatttttaaaacatagcgatgtattacttgtatcaattttagttttctacaacaaatggaccatatgaatggttttgcagtttgctttatttctgatgaacatcttccatattgttatttaatatctgtgtgattctttttaaagctaagtaaaatttcttctggacatagtatagtttacttaaccattccctacgttgtaagtccatttaggtattttagaattttctagtttttgtctgttataaataatgtttctggccaggtgtggtggctcacatctgtaatctcagcactttgggagacagaggcaggaggattgcttaagcctaggagttcgacaccagcctgggcaacacaaggagaccccatctctagtacaacaacaacaacagcaaaaaaattggccaggcgcggtggctcacgcttgtaatcccagcactttgggaggctgaggcgggcagattacgaggtcaagagatcgagaccaccctggtcagcatggtgaaaccctgtctctactaaaaatacaaaaattagcctgggtgtggtggcgcacgcctatagtc

SEQ ID NO: 382177 - DNA, 2923 bp, Homo sapiens
gcgcaggcgctgtgagaggcggtagcggcggcggcggcggtggtatcggcggcagctgtgagggggttccgggaagatggtgctgatcaaggaattccgtgtggttttgccatgttctgttcaggagtatcaggttgggcagctttactctgttgcagaagctagtaagaatgagactggtggtggagaaggaattgaagtcttaaagaatgaaccttatgagaaggatggagaaaagggacagtatacgcacaaaatttatcacctaaagagcaaagtgcctgcattcgtgaggatgattgctcccgagggctccttggtgtttcatgagaaagcctggaatgcgtacccctactgtagaacaattgtaacgaatgaatatatgaaagatgatttcttcattaaaatcgaaacatggcacaaaccagacttgggaacattagaaaatgtacatggtttagatccaaacacatggaaaactgttgaaattgtccatatagatattgcagatagaagtcaagttgaaccagcagactacaaagctgatgaagacccagcattattccagtcagtcaagaccaagagaggccctttgggacccaactggaagaaggagctggcaaacagccctgactgtccccagatgtgtgcctataagctggtgaccatcaaattcaagtggtggggactgcaaagcaaagtagaaaacttcattcaaaagcaagaaaaacggatatttacaaacttccatcgccagcttttttgttggattgacaagtggatcgatctcacgatggaagacattaggagaatggaagacgagactcagaaagaactagaaacaatgcgtaagaggggttccgttcgaggcacgtcggctgctgatgtctagatgagtcccctgtagggtcagagacaatgtcaaactgtttacgtaatcaaggtcaagtgaggggaacaagcgcagccagtgatgagtgaagaagaatctgaccagtatcttgcagtgttgacgtttcccagatgtgtgcttgtgatgatacacacacatgcacaggttctcaaccacgtgtgtatatatgtatgtgtgcatatgtctgtagctgtatataaagcgcatgtagagctacagatccagatacacacacttgtgtatatatgtacatacagacatactgaagggattagtacaatttctccaaagtactgtacctatcttcagcaagaatgcaaaagaaaatattttcaatatatatacctggaacagattttaataattatcagagtaataccattaatggacaaattgactgcaatgtaatactagctggtatgtttcataaatgtcaagctgtggaccaacatatatagccttttattatttttctcttcttttaagtcagtctgttataaatttttttttagtcccataagcagtagactcccacagaaaatttcttcaaaattttttggtgttccaatgaatctgggatgtaaactctgaatgtatttataactatttatttctggatggtcattatcttgtagccaaatttgacaatataaagtaaggagcaaagttacaggccagtttttacttgtttgccctgagggaaaaatccttttaaaaaaaatttctggtttttattggatttttgtattttaaatttcaaatatttttctacatcaaacctagcaaaaatggagatgacggtttctgatttataataaatactagacagttttcaggctcctgttagacaaacacattgatgaagaaattagtcttaataggattgtaggctgtgtagaaaagttggaaatatagcacttcatggagtcttgttttgaagatgacagttttctgtaactacagcttggaaactatgcaaatggtctagattcctcagagctcacatgataggatatagttagtgatgacattttgctcttcttgtgggaacacacacttcaaggaggagatagtgactttgagataggaacagtttaagatgcagtgtgagtctggcctgcgtgcggtgaggaggccccgccaagagactggtggacatctgactgtgggatgtgctctcaagtaggacgtcatcaggacagattctgaataggcatcatgagagtgctggtcagaaacggctgccactttttttaatttaattttattttttatttaaaggaaggaacaatagctaggtaagatttttatcagctttctctgtctgaatccagtttttcctctgtcagtcctggaagcttgaatagaattatattgttgaagccttcaggtcacaaactgtcttttgtaacctcctgtccctcctaaaacacgccaacccctgcagtcaaatcacattagtaatctgatttgctgacagtcctgccctgcctgctcctcgttttcccacatgtcctgcatccctcccccactggagtgatttcagtgaatcagacaaggaaggatgtgtaggatcactactgcattgcaataccctgttatcctcagcaacaaaacccacatttcatacatcctttgtgtactcaggataaagactgatgtttactctctgggcactgttgtaagataggttttgtcagagcataatcattgtctgcaaagtgtttggtgcgaggaagattattgctaattttgtgaaataaagagtctagccctctccttttaatgaacttaactctcgctggcatctgtagtatcattgggagcttaggcgcacatggaaatgagagcccggcgcatggattttaatgtttttctaacaactgtggagatttgagggaatgtgtggtgaatgtaaaatacctagtttacttgccagtctcttgtgtaaattacagtaaaacaaagtaaatgaaatttaaacaaaaaataaatttgatcacaaaatgc

SEQ ID NO: 382178 - DNA, 2837 bp, Homo sapiens
gcgcaggcgctgtgagaggcggtagcggcggcggcggcggtggtatcggcggcagctgtgagggggttccgggaagatggtgctgatcaaggaattccgtgtggttttgccatgttctgttcaggagtatcaggttgggcagctttactctgttgcagaagctagtaagaatgagactggtggtggagaaggaattgaagtcttaaagaatgaaccttatgagaaggatggagaaaagggacagtatacgcacaaaatttatcacctaaagagcaaagtgcctgcattcgtgaggatgattgctcccgagggctccttggtgtttcatgagaaagcctggaatgcgtacccctactgtagaacaattgtaacgaatgaatatatgaaagatgatttcttcattaaaatcgaaacatggcacaaaccagacttgggaacattagaaaatgtacatggtttagatccaaacacatggaaaactgttgaaattgtccatatagatattgcagatagaagtcaagttgaaccagcagactacaaagctgatgaagacccagcattattccagtcagtcaagaccaagagaggccctttgggacccaactggaagaaggagctggcaaacagccctgactgtccccagatgtgtgcctataagctggtgaccatcaaattcaagtggtggggactgcaaagcaaagtagaaaacttcattcaaaagcaagaaaaacggatatttacaaacttccatcgccagcttttttgttggattgacaagtggatcgatctcacgatggaagacattaggagaatggaagacgagactcagaaagaactagaaacattacgtaatcaaggtcaagtgaggggaacaagcgcagccagtgatgagtgaagaagaatctgaccagtatcttgcagtgttgacgtttcccagatgtgtgcttgtgatgatacacacacatgcacaggttctcaaccacgtgtgtatatatgtatgtgtgcatatgtctgtagctgtatataaagcgcatgtagagctacagatccagatacacacacttgtgtatatatgtacatacagacatactgaagggattagtacaatttctccaaagtactgtacctatcttcagcaagaatgcaaaagaaaatattttcaatatatatacctggaacagattttaataattatcagagtaataccattaatggacaaattgactgcaatgtaatactagctggtatgtttcataaatgtcaagctgtggaccaacatatatagccttttattatttttctcttcttttaagtcagtctgttataaatttttttttagtcccataagcagtagactcccacagaaaatttcttcaaaattttttggtgttccaatgaatctgggatgtaaactctgaatgtatttataactatttatttctggatggtcattatcttgtagccaaatttgacaatataaagtaaggagcaaagttacaggccagtttttacttgtttgccctgagggaaaaatccttttaaaaaaaatttctggtttttattggatttttgtattttaaatttcaaatatttttctacatcaaacctagcaaaaatggagatgacggtttctgatttataataaatactagacagttttcaggctcctgttagacaaacacattgatgaagaaattagtcttaataggattgtaggctgtgtagaaaagttggaaatatagcacttcatggagtcttgttttgaagatgacagttttctgtaactacagcttggaaactatgcaaatggtctagattcctcagagctcacatgataggatatagttagtgatgacattttgctcttcttgtgggaacacacacttcaaggaggagatagtgactttgagataggaacagtttaagatgcagtgtgagtctggcctgcgtgcggtgaggaggccccgccaagagactggtggacatctgactgtgggatgtgctctcaagtaggacgtcatcaggacagattctgaataggcatcatgagagtgctggtcagaaacggctgccactttttttaatttaattttattttttatttaaaggaaggaacaatagctaggtaagatttttatcagctttctctgtctgaatccagtttttcctctgtcagtcctggaagcttgaatagaattatattgttgaagccttcaggtcacaaactgtcttttgtaacctcctgtccctcctaaaacacgccaacccctgcagtcaaatcacattagtaatctgatttgctgacagtcctgccctgcctgctcctcgttttcccacatgtcctgcatccctcccccactggagtgatttcagtgaatcagacaaggaaggatgtgtaggatcactactgcattgcaataccctgttatcctcagcaacaaaacccacatttcatacatcctttgtgtactcaggataaagactgatgtttactctctgggcactgttgtaagataggttttgtcagagcataatcattgtctgcaaagtgtttggtgcgaggaagattattgctaattttgtgaaataaagagtctagccctctccttttaatgaacttaactctcgctggcatctgtagtatcattgggagcttaggcgcacatggaaatgagagcccggcgcatggattttaatgtttttctaacaactgtggagatttgagggaatgtgtggtgaatgtaaaatacctagtttacttgccagtctcttgtgtaaattacagtaaaacaaagtaaatgaaatttaaacaaaaaataaatttgatcacaaaatgc

SEQ ID NO: 382179 - DNA, 2890 bp, Homo sapiens
  misc_feature (33)..(33): n is a, c, g, or t
tctgttgcagaagctaggtagaatgagactggngggtccggagatggtgctgatcaaggaattccgtgtggttttgccatgttctgttcaggagtatcaggttgggcagctttactctgttgcagaagctagtaagaatgagactggtggtggagaaggaattgaagtcttaaagaatgaaccttatgagaaggatggagaaaagggacagtatacgcacaaaatttatcacctaaagagcaaagtgcctgcattcgtgaggatgattgctcccgagggctccttggtgtttcatgagaaagcctggaatgcgtacccctactgtagaacaattgtaacgaatgaatatatgaaagatgatttcttcattaaaatcgaaacatggcacaaaccagacttgggaacattagaaaatgtacatggtttagatccaaacacatggaaaactgttgaaattgtccatatagatattgcagatagaagtcaagttgaaccagcagactacaaagctgatgaagacccagcattattccagtcagtcaagaccaagagaggccctttgggacccaactggaagaaggagctggcaaacagccctgactgtccccagatgtgtgcctataagctggtgaccatcaaattcaagtggtggggactgcaaagcaaagtagaaaacttcattcaaaagcaagaaaaacggatatttacaaacttccatcgccagcttttttgttggattgacaagtggatcgatctcacgatggaagacattaggagaatggaagacgagactcagaaagaactagaaacaatgcgtaagaggggttccgttcgaggcacgtcggctgctgatgtctagatgagtcccctgtagggtcagagacaatgtcaaactgtttacgtaatcaaggtcaagtgaggggaacaagcgcagccagtgatgagtgaagaagaatctgaccagtatcttgcagtgttgacgtttcccagatgtgtgcttgtgatgatacacacacatgcacaggttctcaaccacgtgtgtatatatgtatgtgtgcatatgtctgtagctgtatataaagcgcatgtagagctacagatccagatacacacacttgtgtatatatgtacatacagacatactgaagggattagtacaatttctccaaagtactgtacctatcttcagcaagaatgcaaaagaaaatattttcaatatatatacctggaacagattttaataattatcagagtaataccattaatggacaaattgactgcaatgtaatactagctggtatgtttcataaatgtcaagctgtggaccaacatatatagccttttattatttttctcttcttttaagtcagtctgttataaatttttttttagtcccataagcagtagactcccacagaaaatttcttcaaaattttttggtgttccaatgaatctgggatgtaaactctgaatgtatttataactatttatttctggatggtcattatcttgtagccaaatttgacaatataaagtaaggagcaaagttacaggccagtttttacttgtttgccctgagggaaaaatccttttaaaaaaaatttctggtttttattggatttttgtattttaaatttcaaatatttttctacatcaaacctagcaaaaatggagatgacggtttctgatttataataaatactagacagttttcaggctcctgttagacaaacacattgatgaagaaattagtcttaataggattgtaggctgtgtagaaaagttggaaatatagcacttcatggagtcttgttttgaagatgacagttttctgtaactacagcttggaaactatgcaaatggtctagattcctcagagctcacatgataggatatagttagtgatgacattttgctcttcttgtgggaacacacacttcaaggaggagatagtgactttgagataggaacagtttaagatgcagtgtgagtctggcctgcgtgcggtgaggaggccccgccaagagactggtggacatctgactgtgggatgtgctctcaagtaggacgtcatcaggacagattctgaataggcatcatgagagtgctggtcagaaacggctgccactttttttaatttaattttattttttatttaaaggaaggaacaatagctaggtaagatttttatcagctttctctgtctgaatccagtttttcctctgtcagtcctggaagcttgaatagaattatattgttgaagccttcaggtcacaaactgtcttttgtaacctcctgtccctcctaaaacacgccaacccctgcagtcaaatcacattagtaatctgatttgctgacagtcctgccctgcctgctcctcgttttcccacatgtcctgcatccctcccccactggagtgatttcagtgaatcagacaaggaaggatgtgtaggatcactactgcattgcaataccctgttatcctcagcaacaaaacccacatttcatacatcctttgtgtactcaggataaagactgatgtttactctctgggcactgttgtaagataggttttgtcagagcataatcattgtctgcaaagtgtttggtgcgaggaagattattgctaattttgtgaaataaagagtctagccctctccttttaatgaacttaactctcgctggcatctgtagtatcattgggagcttaggcgcacatggaaatgagagcccggcgcatggattttaatgtttttctaacaactgtggagatttgagggaatgtgtggtgaatgtaaaatacctagtttacttgccagtctcttgtgtaaattacagtaaaacaaagtaaatgaaatttaaacaaaaaataaatttgatcacaaaatgc

SEQ ID NO: 382180 - DNA, 2438 bp, Homo sapiens
ggcttgcttgtctggcctagggactatgcaaatatggaccagacccttggggtattttctcacattatattggcaaacaatttgtttacccattggctgtttttgataattttttatcagtctgcaggcttttgttttttacagttaaggatagataaaccttttttgtgctaagaaaagccttttgcaagaatgtcttcaaaccaaggttatttgaggggccacagaacttcattcttaatgtggatatggttatgaacatcacttcataatctcttctagatcttttttctccccttgcttactaacccctatttagagtctgatttcagcagctcacaattttattttacgtttagatgcgtaagaggggttccgttcgaggcacgtcggctgctgatgtctagatgagtcccctgtagggtcagagacaatgtcaaactgtttacgtaatcaaggtcaagtgaggggaacaagcgcagccagtgatgagtgaagaagaatctgaccagtatcttgcagtgttgacgtttcccagatgtgtgcttgtgatgatacacacacatgcacaggttctcaaccacgtgtgtatatatgtatgtgtgcatatgtctgtagctgtatataaagcgcatgtagagctacagatccagatacacacacttgtgtatatatgtacatacagacatactgaagggattagtacaatttctccaaagtactgtacctatcttcagcaagaatgcaaaagaaaatattttcaatatatatacctggaacagattttaataattatcagagtaataccattaatggacaaattgactgcaatgtaatactagctggtatgtttcataaatgtcaagctgtggaccaacatatatagccttttattatttttctcttcttttaagtcagtctgttataaatttttttttagtcccataagcagtagactcccacagaaaatttcttcaaaattttttggtgttccaatgaatctgggatgtaaactctgaatgtatttataactatttatttctggatggtcattatcttgtagccaaatttgacaatataaagtaaggagcaaagttacaggccagtttttacttgtttgccctgagggaaaaatccttttaaaaaaaatttctggtttttattggatttttgtattttaaatttcaaatatttttctacatcaaacctagcaaaaatggagatgacggtttctgatttataataaatactagacagttttcaggctcctgttagacaaacacattgatgaagaaattagtcttaataggattgtaggctgtgtagaaaagttggaaatatagcacttcatggagtcttgttttgaagatgacagttttctgtaactacagcttggaaactatgcaaatggtctagattcctcagagctcacatgataggatatagttagtgatgacattttgctcttcttgtgggaacacacacttcaaggaggagatagtgactttgagataggaacagtttaagatgcagtgtgagtctggcctgcgtgcggtgaggaggccccgccaagagactggtggacatctgactgtgggatgtgctctcaagtaggacgtcatcaggacagattctgaataggcatcatgagagtgctggtcagaaacggctgccactttttttaatttaattttattttttatttaaaggaaggaacaatagctaggtaagatttttatcagctttctctgtctgaatccagtttttcctctgtcagtcctggaagcttgaatagaattatattgttgaagccttcaggtcacaaactgtcttttgtaacctcctgtccctcctaaaacacgccaacccctgcagtcaaatcacattagtaatctgatttgctgacagtcctgccctgcctgctcctcgttttcccacatgtcctgcatccctcccccactggagtgatttcagtgaatcagacaaggaaggatgtgtaggatcactactgcattgcaataccctgttatcctcagcaacaaaacccacatttcatacatcctttgtgtactcaggataaagactgatgtttactctctgggcactgttgtaagataggttttgtcagagcataatcattgtctgcaaagtgtttggtgcgaggaagattattgctaattttgtgaaataaagagtctagccctctccttttaatgaacttaactctcgctggcatctgtagtatcattgggagcttaggcgcacatggaaatgagagcccggcgcatggattttaatgtttttctaacaactgtggagatttgagggaatgtgtggtgaatgtaaaatacctagtttacttgccagtctcttgtgtaaattacagtaaaacaaagtaaatgaaatttaaacaaaaaataaatttgatcacaaaatgc

SEQ ID NO: 382181 - DNA, 1313 bp, Homo sapiens
gcgcaggcgctgtgagaggcggtagcggcggcggcggcggtggtatcggcggcagctgtgagggggttccgggaagatggtgctgatcaaggaattccgtgtggttttgccatgttctgttcaggagtatcaggttgggcagctttactctgttgcagaagctagtaagaatgagactggtggtggagaaggaattgaagtcttaaagaatgaaccttatgagaaggatggagaaaagggacagtatacgcacaaaatttatcacctaaagagcaaagtgcctgcattcgtgaggatgattgctcccgagggctccttggtgtttcatgagaaagcctggaatgcgtacccctactgtagaacaattgtaacgaatgaatatatgaaagatgatttcttcattaaaatcgaaacatggcacaaaccagacttgggaacattagaaaatgtacatggtttagatccaaacacatggaaaactgttgaaattgtccatatagatattgcagatagaagtcaagttgaaccagcagtaagtattactcaatgacatttaatctgttcccttttacagttaaaaattattttctactatcacatttgggattaagttaaaaaaattatttcctttctttcttgtatggcctacatttctatgccgaagtgagcttggagtgaagtctagtacgtctgtgcagcaaagagaccagagtaagagagaaggcgatttgttttctgtgtagattttggctttgtgcaagtgatccctttaagaaatcccagtatacctgggaaatgtaggttgttttcattgaaaaacaaaaaacacattgtttacaaaataattctccctccagctaggtcccttttacttttcaaatgtgattaagaaagcaaaaatttaatttgcatacaagtatttagtaactcagctacagttgttatttgtggaaaatggttggtgtagagtatctttttaaaaatgttcttttagattccagaagtaggtgtagagtattttaatttaatagttgtttagctttctattttgaatcctattaagatgtaaatatttctactcctggcttttgacttaataaaaaaatttctttttcacaagtaaagatgcttattcctcatgccagattaagactcaagataaagattatatatgtaagcataatagaataatcttaggctggacacagtggcttccacttgtaatcccaacactttggaaggccaaggagggaggattgcttgagcacaggagcttgagaccagcctggacaacatagtgagatcctgtctct

SEQ ID NO: 382182 - DNA, 374 bp, Homo sapiens
ggttatttgaggggccacagaacttcattcttaatgtggatatggttatgaacatcacttcataatctcttctagatcttttttctccccttgcttactaacccctatttagagtctgatttcagcagctcacaattttattttacgtttagatgcgtaagaggggttccgttcgaggcacgtcggctgctgatgtctagatgagtcccctgtagggtcagagacaatgtcaaactgtgtaagtgaagacctgggtaaaaagatgtttcgaaacctgtacctttttggtgatgggcagttaacttgctgagcagaagctctaagtgttaaatgtggttttatttttagaatttaaaagataaatattttagaaa

SEQ ID NO: 382183 - DNA, 260 bp, Homo sapiens
caggcgctgtgagaggcggtagcggcggcggcggcggtggtatcggcggcagctgtgagggggttccgggaagatggtgctgatcaaggaattgtgagtgggtctgtgggcgcgagcgaggccgtgggacggcagtgatgggagatttgttgatggagaagtggtaggatattcctaaatcggagtcagccctgtgtcagcccctccctgcgggcgccccctccctcccccggccccttcgaagcccctcagcgagtgcg

SEQ ID NO: 382184 - DNA, 2869 bp, Homo sapiens
gcgcaggcgctgtgagaggcggtagcggcggcggcggcggtggtatcggcggcagctgtgagggggttccgggaagatggtgctgatcaaggaattccgtgtggttttgccatgttctgttcaggagtatcaggttgggcagctttactctgttgcagaagctagtaagaatgagactggtggtggagaaggaattgaagtcttaaagaatgaaccttatgagaaggatggagaaaagggacagtatacgcacaaaatttatcacctaaagagcaaagtgcctgcattcgtgaggatgattgctcccgagggctccttggtgtttcatgagaaagcctggaatgcgtacccctactgtagaacaattgtaacgaatgaatatatgaaagatgatttcttcattaaaatcgaaacatggcacaaaccagacttgggaacattagaaaatgtacatggtttagatccaaacacatggaaaactgttgaaattgtccatatagatattgcagatagaagtcaagttgaaccagcagactacaaagctgatgaagacccagcattattccagtcagtcaagaccaagagaggccctttgggacccaactggaagaaggagctggcaaacagccctgactgtccccagatgtgtgcctataagctggtgaccatcaaattcaagtggtggggactgcaaagcaaagtagaaaacttcattcaaaagcaagaaaaacggatatttacaaacttccatcgccagcttttttgttggattgacaagtggatcgatctcacgatggaagacattaggagaatggaagacgagactcagaaagaactagaaacaatgcgtaagaggggttccgttcgaggcacgtcggctgctgatgtctagatgagtcccctgtagggtcagagacaatgtcaaactgtttacgtaatcaaggtcaagtgaggggaacaagcgcagccagtgatgagtgaagaagaatctgaccagtatcttgcagtgttgacgtttcccagatgtgtgcttgtgatgatacacacacatgcacaggttctcaaccacgtgtgtatatatgtatgtgtgcatatgtctgtagctgtatataaagcgcatgtagagctacagatccagatacacacacttgtgtatatatgtacatacagacatactgaagggattagtacaatttctccaaagtactgtacctatcttcagcaagaatgcaaaagaacattaatggacaaattgactgcaatgtaatactagctggtatgtttcataaatgtcaagctgtggaccaacatatatagccttttattatttttctcttcttttaagtcagtctgttataaatttttttttagtcccataagcagtagactcccacagaaaatttcttcaaaattttttggtgttccaatgaatctgggatgtaaactctgaatgtatttataactatttatttctggatggtcattatcttgtagccaaatttgacaatataaagtaaggagcaaagttacaggccagtttttacttgtttgccctgagggaaaaatccttttaaaaaaaatttctggtttttattggatttttgtattttaaatttcaaatatttttctacatcaaacctagcaaaaatggagatgacggtttctgatttataataaatactagacagttttcaggctcctgttagacaaacacattgatgaagaaattagtcttaataggattgtaggctgtgtagaaaagttggaaatatagcacttcatggagtcttgttttgaagatgacagttttctgtaactacagcttggaaactatgcaaatggtctagattcctcagagctcacatgataggatatagttagtgatgacattttgctcttcttgtgggaacacacacttcaaggaggagatagtgactttgagataggaacagtttaagatgcagtgtgagtctggcctgcgtgcggtgaggaggccccgccaagagactggtggacatctgactgtgggatgtgctctcaagtaggacgtcatcaggacagattctgaataggcatcatgagagtgctggtcagaaacggctgccactttttttaatttaattttattttttatttaaaggaaggaacaatagctaggtaagatttttatcagctttctctgtctgaatccagtttttcctctgtcagtcctggaagcttgaatagaattatattgttgaagccttcaggtcacaaactgtcttttgtaacctcctgtccctcctaaaacacgccaacccctgcagtcaaatcacattagtaatctgatttgctgacagtcctgccctgcctgctcctcgttttcccacatgtcctgcatccctcccccactggagtgatttcagtgaatcagacaaggaaggatgtgtaggatcactactgcattgcaataccctgttatcctcagcaacaaaacccacatttcatacatcctttgtgtactcaggataaagactgatgtttactctctgggcactgttgtaagataggttttgtcagagcataatcattgtctgcaaagtgtttggtgcgaggaagattattgctaattttgtgaaataaagagtctagccctctccttttaatgaacttaactctcgctggcatctgtagtatcattgggagcttaggcgcacatggaaatgagagcccggcgcatggattttaatgtttttctaacaactgtggagatttgagggaatgtgtggtgaatgtaaaatacctagtttacttgccagtctcttgtgtaaattacagtaaaacaaagtaaatgaaatttaaacaaaaaataaatttgatcacaaaatgc

SEQ ID NO: 382185 - DNA, 2993 bp, Homo sapiens
gcgcaggcgctgtgagaggcggtagcggcggcggcggcggtggtatcggcggcagctgtgagggggttccgggaagatggtgctgatcaaggaattgtgagtgggtctgtgggcgcgagcgaggccgtgggacggcagtgatgggagatttgttgatggagaagtgccgtgtggttttgccatgttctgttcaggagtatcaggttgggcagctttactctgttgcagaagctagtaagaatgagactggtggtggagaaggaattgaagtcttaaagaatgaaccttatgagaaggatggagaaaagggacagtatacgcacaaaatttatcacctaaagagcaaagtgcctgcattcgtgaggatgattgctcccgagggctccttggtgtttcatgagaaagcctggaatgcgtacccctactgtagaacaattgtaacgaatgaatatatgaaagatgatttcttcattaaaatcgaaacatggcacaaaccagacttgggaacattagaaaatgtacatggtttagatccaaacacatggaaaactgttgaaattgtccatatagatattgcagatagaagtcaagttgaaccagcagactacaaagctgatgaagacccagcattattccagtcagtcaagaccaagagaggccctttgggacccaactggaagaaggagctggcaaacagccctgactgtccccagatgtgtgcctataagctggtgaccatcaaattcaagtggtggggactgcaaagcaaagtagaaaacttcattcaaaagcaagaaaaacggatatttacaaacttccatcgccagcttttttgttggattgacaagtggatcgatctcacgatggaagacattaggagaatggaagacgagactcagaaagaactagaaacaatgcgtaagaggggttccgttcgaggcacgtcggctgctgatgtctagatgagtcccctgtagggtcagagacaatgtcaaactgtttacgtaatcaaggtcaagtgaggggaacaagcgcagccagtgatgagtgaagaagaatctgaccagtatcttgcagtgttgacgtttcccagatgtgtgcttgtgatgatacacacacatgcacaggttctcaaccacgtgtgtatatatgtatgtgtgcatatgtctgtagctgtatataaagcgcatgtagagctacagatccagatacacacacttgtgtatatatgtacatacagacatactgaagggattagtacaatttctccaaagtactgtacctatcttcagcaagaatgcaaaagaaaatattttcaatatatatacctggaacagattttaataattatcagagtaataccattaatggacaaattgactgcaatgtaatactagctggtatgtttcataaatgtcaagctgtggaccaacatatatagccttttattatttttctcttcttttaagtcagtctgttataaatttttttttagtcccataagcagtagactcccacagaaaatttcttcaaaattttttggtgttccaatgaatctgggatgtaaactctgaatgtatttataactatttatttctggatggtcattatcttgtagccaaatttgacaatataaagtaaggagcaaagttacaggccagtttttacttgtttgccctgagggaaaaatccttttaaaaaaaatttctggtttttattggatttttgtattttaaatttcaaatatttttctacatcaaacctagcaaaaatggagatgacggtttctgatttataataaatactagacagttttcaggctcctgttagacaaacacattgatgaagaaattagtcttaataggattgtaggctgtgtagaaaagttggaaatatagcacttcatggagtcttgttttgaagatgacagttttctgtaactacagcttggaaactatgcaaatggtctagattcctcagagctcacatgataggatatagttagtgatgacattttgctcttcttgtgggaacacacacttcaaggaggagatagtgactttgagataggaacagtttaagatgcagtgtgagtctggcctgcgtgcggtgaggaggccccgccaagagactggtggacatctgactgtgggatgtgctctcaagtaggacgtcatcaggacagattctgaataggcatcatgagagtgctggtcagaaacggctgccactttttttaatttaattttattttttatttaaaggaaggaacaatagctaggtaagatttttatcagctttctctgtctgaatccagtttttcctctgtcagtcctggaagcttgaatagaattatattgttgaagccttcaggtcacaaactgtcttttgtaacctcctgtccctcctaaaacacgccaacccctgcagtcaaatcacattagtaatctgatttgctgacagtcctgccctgcctgctcctcgttttcccacatgtcctgcatccctcccccactggagtgatttcagtgaatcagacaaggaaggatgtgtaggatcactactgcattgcaataccctgttatcctcagcaacaaaacccacatttcatacatcctttgtgtactcaggataaagactgatgtttactctctgggcactgttgtaagataggttttgtcagagcataatcattgtctgcaaagtgtttggtgcgaggaagattattgctaattttgtgaaataaagagtctagccctctccttttaatgaacttaactctcgctggcatctgtagtatcattgggagcttaggcgcacatggaaatgagagcccggcgcatggattttaatgtttttctaacaactgtggagatttgagggaatgtgtggtgaatgtaaaatacctagtttacttgccagtctcttgtgtaaattacagtaaaacaaagtaaatgaaatttaaacaaaaaataaatttgatcacaaaatgc

SEQ ID NO: 382186 - DNA, 3505 bp, Homo sapiens
gcgcaggcgctgtgagaggcggtagcggcggcggcggcggtggtatcggcggcagctgtgagggggttccgggaagatggtgctgatcaaggaattccgtgtggttttgccatgttctgttcaggagtatcaggttgggcagctttactctgttgcagaagctagtaagaatgagactggtggtggagaaggaattgaagtcttaaagaatgaaccttatgagaaggatggagaaaagggacagtatacgcacaaaatttatcacctaaagagcaaagtgcctgcattcgtgaggatgattgctcccgagggctccttggtgtttcatgagaaagcctggaatgcgtacccctactgtagaacaattgtaacgaatgaatatatgaaagatgatttcttcattaaaatcgaaacatggcacaaaccagacttgggaacattagaaaatgtacatggtttagatccaaacacatggaaaactgttgaaattgtccatatagatattgcagatagaagtcaagttgaaccagcagactacaaagctgatgaagacccagcattattccagtcagtcaagaccaagagaggccctttgggacccaactggaagaaggagctggcaaacagccctgactgtccccagatgtgtgcctataagctggtgaccatcaaattcaagtggtggggactgcaaagcaaagtagaaaacttcattcaaaagcaagaaaaacggatatttacaaacttccatcgccagcttttttgttggattgacaagtggatcgatctcacgatggaagacattaggagaatggaagacgagactcagaaagaactagaaacaatgcgtaagaggggttccgttcgaggcacgtcggctgctgatgtctagatgagtcccctgtagggtcagagacaatgtcaaactgtttacgtaatcaaggtcaagtgaggggaacaagcgcagccagtgatgagtgaagaagaatctgaccagtatcttgcagtgttgacgtttcccagatgtgtgcttgtgatgatacacacacatgcacaggttctcaaccacgtgtgtatatatgtatgtgtgcatatgtctgtagctgtatataaagcgcatgtagagctacagatccagatacacacacttgtgtatatatgtacatacagacatactgaagggattagtacaatttctccaaagtactgtacctatcttcagcaagaatgcaaaagaaaatattttcaatatatatacctggaacagattttaataattatcagagtaataccattaatggacaaattgactgcaatgtaatactagctggtatgtttcataaatgtcaagctgtggaccaacatatatagccttttattatttttctcttcttttaagtcagtctgttataaatttttttttagtcccataagcagtagactcccacagaaaatttcttcaaaattttttggtgttccaatgaatctgggatgtaaactctgaatgtatttataactatttatttctggatggtcattatcttgtagccaaatttgacaatataaagtaaggagcaaagttacaggccagtttttacttgtttgccctgagggaaaaatccttttaaaaaaaatttctggtttttattggatttttgtattttaaatttcaaatatttttctacatcaaacctagcaaaaatggagatgacggtttctgatttataataaatactagacagttttcaggctcctgttagacaaacacattgatgaagaaattagtcttaataggattgtaggctgtgtagaaaagttggaaatatagcacttcatggagtcttgttttgaagatgacagttttctgtaactacagcttggaaactatgcaaatggtctagattcctcagagctcacatgataggatatagttagtgatgacattttgctcttcttgtgggaacacacacttcaaggaggagatagtgactttgagataggaacagtttaagatgcagtgtgagtctggcctgcgtgcggtgaggaggccccgccaagagactggtggacatctgactgtgggatgtgctctcaagtaggacgtcatcaggacagattctgaataggcatcatgagagtgctggtcagaaacggctgccactttttttaatttaattttattttttatttaaaggaaggaacaatagctaggtaagatttttatcagctttctctgtctgaatccagtttttcctctgtcagtcctggaagcttgaatagaattatattgttgaagccttcaggtcacaaactgtcttttgtaacctcctgtccctcctaaaacacgccaacccctgcagtcaaatcacattagtaatctgatttgctgacagtcctgccctgcctgctcctcgttttcccacatgtcctgcatccctcccccactggagtgatttcagtgaatcagacaaggaaggatgtgtaggatcactactgcattgcaataccctgttatcctcagcaacaaaacccacatttcatacatcctttgtgtactcaggataaagactgatgtttactctctgggcactgttgtaagataggttttgtcagagcataatcattgtctgcaaagtgtttggtgcgaggaagattattgctaattttgtgaaataaagagtctagccctctccttttaatgaacttaactctcgctggcatctgtagtatcattgggagcttaggcgcacatggaaatgagagcccggcgcatggattttaatgtttttctaacaactgtggagatttgagggaatgtgtggtgaatgtaaaatacctagtttacttgccagtctcttgtgtaaattacagtaaaacaaagtaaatgaaatttaaacaaaaaataaatttgatcacaaaatgccacttgtgtgcttgagtggttgtttccctgagccatgtctggtttgaaacacctcagaccactactctgtttttcatgaattctgtaattcgcagcactaccagtctgggaaaattattttgttttaattgcaaattcttattcttgaaatgtacctgtgccacactaagtggttacgtttgatttcttaagtaattttctgtctttaaaagctaagcagtaaactaaaggattatatattattagtctcagtggttttcagatttatttttaaaggggaaaacagggaaaacccatcgtatttgtaaagcacttaggattttgccgtttgtttctgattgtttgaagattagggctttttggtgcgtggtcacctttcacctctccttttaggatttagtcctttccagtctgctctttttgtgcgtgtcacaaccatattcttgtggttctggctcatattgtagaactgctgaacataaggagaggtagccagctgtatggtcggatttaatatataatgttatatgttgggatatcttagtggtttgttttctgaggtaagtttcttagtgttgtgtt

SEQ ID NO: 382187 - DNA, 556 bp, Homo sapiens
tttattaatgtgacaggaatggcttcaggcaaaaaaatcaaaagaatttcattttcagtatggatctatgcatctatttggcaggccctaactagtagatgatcaaagctctatttctcttctggccccacatgcattgaggacatgcctgctgttccttaagagcttgggatctgccatccgcttgaaaaaattggctttacctaatgtccatgtttccgggctctgctttattccaatttgaaaaggcattaggaattccaacggatttgcttattatacctcccagttaacttgttatagctcctaattaacattaactaatagcacccagggtgatgaacattaactagtgtgccttaattaccagaaacaaaaccacccttggaaacatggattacccagcaagtctgtattagggcatggcttgggatagcagtatagatttcctttctggctttacaacaagtgcttcttgaagttttgcaattctcttgtcttagatgctttccacctccacctcccccccattttcccattggaaatattttttgaa

SEQ ID NO: 382188 - DNA, 339 bp, Homo sapiens
aaaggccaagaggggtatgtaacatagtgtccaaagagggaaggtccttgggtgaactgttacagcaaggggctagaagtgaaaaaagtaattctggagacaagcactattttctcttcctaccccacctccatttctaatgcctactgccatcaaggccttgttttgcttttctttttggattgttcagagaaatgtgtgtggcatgtgtaagaaaagtgtatatactatcttatactacctctccaggttgccagagagttgcgaggagagcaaggggcacaaccgtctccctttatagttctacttttctaataaatagtctgtttaagatcataa

SEQ ID NO: 382189 - DNA, 2923 bp, Homo sapiens
tctcttactgtgggtaatttagtaattaaactataagaggtatgtatgtatgggggaaaaaacagtaatatagggtttggtgcaatctgtggtttcaaacatctactgggggtcgtagaacatatccccagtggataagggggtactactgtacttgttggctcttcatgttagctctgctaggcagatgtcatttcagagaagaggaagcaagttcagaacggcttggaatcttgctcaggaaatcgggctggttaatgaataacaagagatccagtttcacaaacccaaggcattttgcccccagaatctgggcttcttcacccatttaggctgtcactacttttttttcacttttttatccctgtttaagtcagtctgacccacagttgtcctctgctgacttcagaaataataatctggccagtagacatttggtttcggtcctttaggcccttcgccccaggcatcgttctctatggtggacaaagttcagaatggaagatgggagaaaggtgattctgattctagaagcacccatccctcctaccccattccccacccgcattacctgccatcctgtcagcacagtcttctctgaagtgctccaagttttctctaagggcccatttggactcccactctcaagactcctcacttgcccagaaagctccttgctgaccttctctgtgtcttcctctcacccattcccttaggcctccctaatatcccctcccagggtctccctatcttgatcccagaatcttccttctacaggtctgctacaatgctgctgctgcacagagctgtggtcctcaggctccaacaggcctgcagactcaagtcaatcccctcaaggatctgcattcaggcctgctccacaaatgattcatttcagccccagcgccccagcctcaccttctctggtgataactccagcacccagggatggagagtcatggggaccctattaggtctcggtgcagtgttggcctatcaggaccatcggtgtagggctgctcaggagtcaacacacatatacactaaggaggaagtgagttcccacaccagccctgagactgggatctgggtgactctgggctctgaggtctttgatgtcacagaatttgtggacctacatccaggggggccttcaaagctgatgctagcagctgggggtcccctagagcccttctgggccctctatgctgttcacaaccagtcccatgtgcgtgagttactggctcagtacaagattggggagctgaatcctgaagacaaggtagcccccaccgtggagacctctgacccttatgctgatgatcctgtacgtcacccagccctgaaggtcaacagccagcggccctttaatgcagagcctccccctgagctgctgacagaaaactacatcacacccaaccctatcttcttcacccggaaccatctgcctgtacctaacctggatccagacacctatcgcttacacgtagtaggagcacctgggggtcagtcactgtctctttccctggatgacttgcacaactttcccaggtacgagatcacagtcactctgcagtgtgccggcaaccgacgctctgagatgactcaggtcaaagaagtaaaaggtctggagtggagaacaggagccatcagcactgcacgctgggctggggcacggctctgtgatgtgttagcccaggctggccaccaactctgtgaaactgaggcccacgtctgctttgagggactggactcagaccctactgggactgcctatggagcatccatccctctggctcgggccatggaccctgaagctgaggtcctgctggcatatgagatgaatgggcagcctctgccacgtgaccacggcttccctgtgcgtgtggtggttcctggagtggtgggtgcccgccatgtcaaatggctgggcagagtgagtgtgcagccagaggaaagttacagccactggcaacggcgggattacaaaggcttctctccatctgtggactgggagactgtagattttgactctgctccatccattcaggaacttcctgtccagtccgccatcacagagccccgggatggagagactgtagaatcaggggaggtgaccatcaagggctatgcatggagtggtggtggcagggctgtgatccgggtggatgtgtctctggatgggggcctaacctggcaggtggctaagctggatggagaggaacagcgccccaggaaggcctgggcatggcgtctgtggcagttgaaagcccctgtgccagctggacaaaaggaactgaacattgtttgtaaggctgtggatgatggttacaatgtgcagccagacaccgtggccccaatctggaacctgcgaggtgttctcagcaatgcctggcatcgtgtccatgtctatgtctccccatgagcatggaaaggagccacctccacccctttccccacccattagcctcactgcttcagaaaaatctttcccacctttcaacttcttggatcacaactctggccttcctaagccatacccaagtacacatatagcacatttcacccaaggaccttccctctttggacactatgttacatacccctcttggcctttgaacctgtgccaggaagtgtgagctgttacagcaaggggctagaagtgaaaaaagtaattctggagacaagcactattttctcttcctaccccacctccatttctaatgcctactgccatcaaggccttgttttgcttttctttttggattgttcagagaaatgtgtgtggcatgtgtaagaaaagtgtatatactatcttatactacctctccaggttgccagagagttgcgaggagagcaaggggcacaaccgtctccctttatagttctacttttctaataaatagtctgtttaagatcataa

SEQ ID NO: 382190 - DNA, 2463 bp, Homo sapiens
cataacggcgctggccccgccccttctcgagaactcgcagagctgggctggtaaaattgcagtgctgaagacactggacccgcaaaaggctgtccctcccaaacctgggattctgggctcactgagttcacctgcgagtcagccctacctgcactgctctggtctagtacaaacaggctgctggcattgagggacggagtctccaactcctggcctctagcagtcctcctgtgtaggtctcccaaagtgctagtgtgtccggaattggtgggttcttggtctcactgacttcaagaatgaagccgcggaccctcgcagtctgctacaatgctgctgctgcacagagctgtggtcctcaggctccaacaggcctgcagactcaagtcaatcccctcaaggatctgcattcaggcctgctccacaaatgattcatttcagccccagcgccccagcctcaccttctctggtgataactccagcacccagggatggagagtcatggggaccctattaggtctcggtgcagtgttggcctatcaggaccatcggtgtagggctgctcaggagtcaacacacatatacactaaggaggaagtgagttcccacaccagccctgagactgggatctgggtgactctgggctctgaggtctttgatgtcacagaatttgtggacctacatccaggggggccttcaaagctgatgctagcagctgggggtcccctagagcccttctgggccctctatgctgttcacaaccagtcccatgtgcgtgagttactggctcagtacaagattggggagctgaatcctgaagacaaggtagcccccaccgtggagacctctgacccttatgctgatgatcctgtacgtcacccagccctgaaggtcaacagccagcggccctttaatgcagagcctccccctgagctgctgacagaaaactacatcacacccaaccctatcttcttcacccggaaccatctgcctgtacctaacctggatccagacacctatcgcttacacgtagtaggagcacctgggggtcagtcactgtctctttccctggatgacttgcacaactttcccaggtacgagatcacagtcactctgcagtgtgccggcaaccgacgctctgagatgactcaggtcaaagaagtaaaaggtctggagtggagaacaggagccatcagcactgcacgctgggctggggcacggctctgtgatgtgttagcccaggctggccaccaactctgtgaaactgaggcccacgtctgctttgagggactggactcagaccctactgggactgcctatggagcatccatccctctggctcgggccatggaccctgaagctgaggtcctgctggcatatgagatgaatgggcagcctctgccacgtgaccacggcttccctgtgcgtgtggtggttcctggagtggtgggtgcccgccatgtcaaatggctgggcagagtgagtgtgcagccagaggaaagttacagccactggcaacggcgggattacaaaggcttctctccatctgtggactgggagactgtagattttgactctgctccatccattcaggaacttcctgtccagtccgccatcacagagccccgggatggagagactgtagaatcaggggaggtgaccatcaagggctatgcatggagtggtggtggcagggctgtgatccgggtggatgtgtctctggatgggggcctaacctggcaggtggctaagctggatggagaggaacagcgccccaggaaggcctgggcatggcgtctgtggcagttgaaagcccctgtgccagctggacaaaaggaactgaacattgtttgtaaggctgtggatgatggttacaatgtgcagccagacaccgtggccccaatctggaacctgcgaggtgttctcagcaatgcctggcatcgtgtccatgtctatgtctccccatgagcatggaaaggagccacctccacccctttccccacccattagcctcactgcttcagaaaaatctttcccacctttcaacttcttggatcacaactctggccttcctaagccatacccaagtacacatatagcacatttcacccaaggaccttccctctttggacactatgttacatacccctcttggcctttgaacctgtgccaggaagtgtgagctgttacagcaaggggctagaagtgaaaaaagtaattctggagacaagcactattttctcttcctaccccacctccatttctaatgcctactgccatcaaggccttgttttgcttttctttttggattgttcagagaaatgtgtgtggcatgtgtaagaaaagtgtatatactatcttatactacctctccaggttgccagagagttgcgaggagagcaaggggcacaaccgtctccctttatagttctacttttctaataaatagtctgtttaagatcataa

SEQ ID NO: 382191 - DNA, 2677 bp, Homo sapiens
tctcttactgtgggtaatttagtaattaaactataagaggtatgtatgtatgggggaaaaaacagtaatatagggtttggtgcaatctgtggtttcaaacatctactgggggtcgtagaacatatccccagtggataagggggtactactgtacttgttggctcttcatgttagctctgctaggcagatgtcatttcagagaagaggaagcaagttcagaacggcttggaatcttgctcaggaaatcgggctggttaatgaataacaagagatccagtttcacaaacccaaggcattttgcccccagaatctgggcttcttcacccatttaggctgtcactacttttttttcacttttttatccctgtttaagtcagtctgacccacagttgtcctctgctgacttcagaaataataatctggccagtagacatttggtttcggtcctttaggcccttcgccccaggcatcgttctctatggtggacaaagttcagaatggaagatgggagaaaggtgattctgattctagaagcacccatccctcctaccccattccccacccgcattacctgccatcctgtcagcacagtcttctctgaagtgctccaagttttctctaagggcccatttggactcccactctcaagactcctcacttgcccagaaagctccttgctgaccttctctgtgtcttcctctcacccattcccttaggcctccctaatatcccctcccagggtctccctatcttgatcccagaatcttccttctacaggtctgctacaatgctgctgctgcacagagctgtggtcctcaggctccaacaggcctgcagactcaagtcaatcccctcaaggatctgcattcaggcctgctccacaaatgattcatttcagccccagcgccccagcctcaccttctctggtgataactccagcacccagggatggagagtcatggggaccctattaggtctcggtgcagtgttggcctatcaggaccatcggtgtagggctgctcaggagtcaacacacatatacactaaggaggaagtgagttcccacaccagccctgagactgggatctgggtgactctgggctctgaggtctttgatgtcacagaatttgtggacctacatccaggggggccttcaaagctgatgctagcagctgggggtcccctagagcccttctgggccctctatgctgttcacaaccagtcccatgtgcgtgagttactggctcagtacaagattggggagctgaatcctgaagacaaggtagcccccaccgtggagacctctgacccttatgctgatgatcctgtacgtcacccagccctgaaggtcaacagccagcggccctttaatgcagagcctccccctgagctgctgacagaaaactacatcacacccaaccctatcttcttcacccggaaccatctgcctgtacctaacctggatccagacacctatcgcttacacgtagtaggagcacctgggggtcagtcactgtctctttccctggatgacttgcacaactttcccaggtacgagatcacagtcactctgcagtgtgccggcaaccgacgctctgagatgactcaggtcaaagaagtaaaaggtctggagtggagaacaggagccatcagcactgcacgctgggctggggcacggctctgtgatgtgttagcccaggctggccaccaactctgtgaaactgaggcccacgtctgctttgagggactggactcagaccctactgggactgcctatggagcatccatccctctggctcgggccatggaccctgaagctgaggtcctgctggcatatgagatgaatgggcagcctctgccacgtgaccacggcttccctgtgcgtgtggtggttcctggagtggtgggtgcccgccatgtcaaatggctgggcagagtgagtgtgcagccagaggaaagttacagccactggcaacggcgggattacaaaggcttctctccatctgtggactgggagactgtagattttgactctgctccatccattcaggaacttcctgtccagtccgccatcacagagccccgggatggagagactgtagaatcaggggaggtgaccatcaagggctatgcatggagtggtggtggcagggctgtgatccgggtggatgtgtctctggatgggggcctaacctggcaggtggctaagctggatggagaggaacagcgccccaggaaggcctgggcatggcgtctgtggcagttgaaagcccctgtgccagctggacaaaaggaactgaacattgtttgtaaggctgtggatgatggttacaatgtgcagccagacaccgtggccccaatctggaacctgcgaggtgttctcagcaatgcctggcatcgtgtccatgtctatgtctccccatgagcatggaaaggagccacctccacccctttccccacccaaagagccactccaagagccccccaacgtgccactcaacgcgccccgcaacgagacacaccacgagcccccccaacgcgccacaccacgagccggagtagtaagttacaatatgggagattattccgaagcctggtaggataagaatatacacttcagggtgaccagcaaaatcagaataggtgttggtatagaatggggtctctctccaacacg

SEQ ID NO: 382192 - DNA, 2661 bp, Homo sapiens
tctcttactgtgggtaatttagtaattaaactataagaggtatgtatgtatgggggaaaaaacagtaatatagggtttggtgcaatctgtggtttcaaacatctactgggggtcgtagaacatatccccagtggataagggggtactactgtacttgttggctcttcatgttagctctgctaggcagatgtcatttcagagaagaggaagcaagttcagaacggcttggaatcttgctcaggaaatcgggctggttaatgaataacaagagatccagtttcacaaacccaaggcattttgcccccagaatctgggcttcttcacccatttaggctgtcactacttttttttcacttttttatccctgtttaagtcagtctgacccacagttgtcctctgctgacttcagaaataataatctggccagtagacatttggtttcggtcctttaggcccttcgccccaggcatcgttctctatggtggacaaagttcagaatggaagatgggagaaaggtctgctacaatgctgctgctgcacagagctgtggtcctcaggctccaacaggcctgcagactcaagtcaatcccctcaaggatctgcattcaggcctgctccacaaatgattcatttcagccccagcgccccagcctcaccttctctggtgataactccagcacccagggatggagagtcatggggaccctattaggtctcggtgcagtgttggcctatcaggaccatcggtgtagggctgctcaggagtcaacacacatatacactaaggaggaagtgagttcccacaccagccctgagactgggatctgggtgactctgggctctgaggtctttgatgtcacagaatttgtggacctacatccaggggggccttcaaagctgatgctagcagctgggggtcccctagagcccttctgggccctctatgctgttcacaaccagtcccatgtgcgtgagttactggctcagtacaagattggggagctgaatcctgaagacaaggtagcccccaccgtggagacctctgacccttatgctgatgatcctgtacgtcacccagccctgaaggtcaacagccagcggccctttaatgcagagcctccccctgagctgctgacagaaaactacatcacacccaaccctatcttcttcacccggaaccatctgcctgtacctaacctggatccagacacctatcgcttacacgtagtaggagcacctgggggtcagtcactgtctctttccctggatgacttgcacaactttcccaggtacgagatcacagtcactctgcagtgtgccggcaaccgacgctctgagatgactcaggtcaaagaagtaaaaggtctggagtggagaacaggagccatcagcactgcacgctgggctggggcacggctctgtgatgtgttagcccaggctggccaccaactctgtgaaactgaggcccacgtctgctttgagggactggactcagaccctactgggactgcctatggagcatccatccctctggctcgggccatggaccctgaagctgaggtcctgctggcatatgagatgaatgggcagcctctgccacgtgaccacggcttccctgtgcgtgtggtggttcctggagtggtgggtgcccgccatgtcaaatggctgggcagagtgagtgtgcagccagaggaaagttacagccactggcaacggcgggattacaaaggcttctctccatctgtggactgggagactgtagattttgactctgctccatccattcaggaacttcctgtccagtccgccatcacagagccccgggatggagagactgtagaatcaggggaggtgaccatcaagggctatgcatggagtggtggtggcagggctgtgatccgggtggatgtgtctctggatgggggcctaacctggcaggtggctaagctggatggagaggaacagcgccccaggaaggcctgggcatggcgtctgtggcagttgaaagcccctgtgccagctggacaaaaggaactgaacattgtttgtaaggctgtggatgatggttacaatgtgcagccagacaccgtggccccaatctggaacctgcgaggtgttctcagcaatgcctggcatcgtgtccatgtctatgtctccccatgagcatggaaaggagccacctccacccctttccccacccattagcctcactgcttcagaaaaatctttcccacctttcaacttcttggatcacaactctggccttcctaagccatacccaagtacacatatagcacatttcacccaaggaccttccctctttggacactatgttacatacccctcttggcctttgaacctgtgccaggaagtgtgagctgttacagcaaggggctagaagtgaaaaaagtaattctggagacaagcactattttctcttcctaccccacctccatttctaatgcctactgccatcaaggccttgttttgcttttctttttggattgttcagagaaatgtgtgtggcatgtgtaagaaaagtgtatatactatcttatactacctctccaggttgccagagagttgcgaggagagcaaggggcacaaccgtctccctttatagttctacttttctaataaatagtctgtttaagatcataa

SEQ ID NO: 382193 - DNA, 2337 bp, Homo sapiens
cataacggcgctggccccgccccttctcgagaactcgcagagctgggctggtaaaattgcagtgctgaagacactggacccgcaaaaggctgtccctcccaaacctgggattctgggctcactgagttcacctgcgagtcagccctacctgcactgctctggtctagtacaaacaggctgctggcattgaggtctgctacaatgctgctgctgcacagagctgtggtcctcaggctccaacaggcctgcagactcaagtcaatcccctcaaggatctgcattcaggcctgctccacaaatgattcatttcagccccagcgccccagcctcaccttctctggtgataactccagcacccagggatggagagtcatggggaccctattaggtctcggtgcagtgttggcctatcaggaccatcggtgtagggctgctcaggagtcaacacacatatacactaaggaggaagtgagttcccacaccagccctgagactgggatctgggtgactctgggctctgaggtctttgatgtcacagaatttgtggacctacatccaggggggccttcaaagctgatgctagcagctgggggtcccctagagcccttctgggccctctatgctgttcacaaccagtcccatgtgcgtgagttactggctcagtacaagattggggagctgaatcctgaagacaaggtagcccccaccgtggagacctctgacccttatgctgatgatcctgtacgtcacccagccctgaaggtcaacagccagcggccctttaatgcagagcctccccctgagctgctgacagaaaactacatcacacccaaccctatcttcttcacccggaaccatctgcctgtacctaacctggatccagacacctatcgcttacacgtagtaggagcacctgggggtcagtcactgtctctttccctggatgacttgcacaactttcccaggtacgagatcacagtcactctgcagtgtgccggcaaccgacgctctgagatgactcaggtcaaagaagtaaaaggtctggagtggagaacaggagccatcagcactgcacgctgggctggggcacggctctgtgatgtgttagcccaggctggccaccaactctgtgaaactgaggcccacgtctgctttgagggactggactcagaccctactgggactgcctatggagcatccatccctctggctcgggccatggaccctgaagctgaggtcctgctggcatatgagatgaatgggcagcctctgccacgtgaccacggcttccctgtgcgtgtggtggttcctggagtggtgggtgcccgccatgtcaaatggctgggcagagtgagtgtgcagccagaggaaagttacagccactggcaacggcgggattacaaaggcttctctccatctgtggactgggagactgtagattttgactctgctccatccattcaggaacttcctgtccagtccgccatcacagagccccgggatggagagactgtagaatcaggggaggtgaccatcaagggctatgcatggagtggtggtggcagggctgtgatccgggtggatgtgtctctggatgggggcctaacctggcaggtggctaagctggatggagaggaacagcgccccaggaaggcctgggcatggcgtctgtggcagttgaaagcccctgtgccagctggacaaaaggaactgaacattgtttgtaaggctgtggatgatggttacaatgtgcagccagacaccgtggccccaatctggaacctgcgaggtgttctcagcaatgcctggcatcgtgtccatgtctatgtctccccatgagcatggaaaggagccacctccacccctttccccacccattagcctcactgcttcagaaaaatctttcccacctttcaacttcttggatcacaactctggccttcctaagccatacccaagtacacatatagcacatttcacccaaggaccttccctctttggacactatgttacatacccctcttggcctttgaacctgtgccaggaagtgtgagctgttacagcaaggggctagaagtgaaaaaagtaattctggagacaagcactattttctcttcctaccccacctccatttctaatgcctactgccatcaaggccttgttttgcttttctttttggattgttcagagaaatgtgtgtggcatgtgtaagaaaagtgtatatactatcttatactacctctccaggttgccagagagttgcgaggagagcaaggggcacaaccgtctccctttatagttctacttttctaataaatagtctgtttaagatcataa

SEQ ID NO: 382194 - DNA, 2228 bp, Homo sapiens
cataacggcgctggccccgccccttctcgagaactcgcagagctgggctggtaaaattgcagtgctgaagacactggacccggtctgctacaatgctgctgctgcacagagctgtggtcctcaggctccaacaggcctgcagactcaagtcaatcccctcaaggatctgcattcaggcctgctccacaaatgattcatttcagccccagcgccccagcctcaccttctctggtgataactccagcacccagggatggagagtcatggggaccctattaggtctcggtgcagtgttggcctatcaggaccatcggtgtagggctgctcaggagtcaacacacatatacactaaggaggaagtgagttcccacaccagccctgagactgggatctgggtgactctgggctctgaggtctttgatgtcacagaatttgtggacctacatccaggggggccttcaaagctgatgctagcagctgggggtcccctagagcccttctgggccctctatgctgttcacaaccagtcccatgtgcgtgagttactggctcagtacaagattggggagctgaatcctgaagacaaggtagcccccaccgtggagacctctgacccttatgctgatgatcctgtacgtcacccagccctgaaggtcaacagccagcggccctttaatgcagagcctccccctgagctgctgacagaaaactacatcacacccaaccctatcttcttcacccggaaccatctgcctgtacctaacctggatccagacacctatcgcttacacgtagtaggagcacctgggggtcagtcactgtctctttccctggatgacttgcacaactttcccaggtacgagatcacagtcactctgcagtgtgccggcaaccgacgctctgagatgactcaggtcaaagaagtaaaaggtctggagtggagaacaggagccatcagcactgcacgctgggctggggcacggctctgtgatgtgttagcccaggctggccaccaactctgtgaaactgaggcccacgtctgctttgagggactggactcagaccctactgggactgcctatggagcatccatccctctggctcgggccatggaccctgaagctgaggtcctgctggcatatgagatgaatgggcagcctctgccacgtgaccacggcttccctgtgcgtgtggtggttcctggagtggtgggtgcccgccatgtcaaatggctgggcagagtgagtgtgcagccagaggaaagttacagccactggcaacggcgggattacaaaggcttctctccatctgtggactgggagactgtagattttgactctgctccatccattcaggaacttcctgtccagtccgccatcacagagccccgggatggagagactgtagaatcaggggaggtgaccatcaagggctatgcatggagtggtggtggcagggctgtgatccgggtggatgtgtctctggatgggggcctaacctggcaggtggctaagctggatggagaggaacagcgccccaggaaggcctgggcatggcgtctgtggcagttgaaagcccctgtgccagctggacaaaaggaactgaacattgtttgtaaggctgtggatgatggttacaatgtgcagccagacaccgtggccccaatctggaacctgcgaggtgttctcagcaatgcctggcatcgtgtccatgtctatgtctccccatgagcatggaaaggagccacctccacccctttccccacccattagcctcactgcttcagaaaaatctttcccacctttcaacttcttggatcacaactctggccttcctaagccatacccaagtacacatatagcacatttcacccaaggaccttccctctttggacactatgttacatacccctcttggcctttgaacctgtgccaggaagtgtgagctgttacagcaaggggctagaagtgaaaaaagtaattctggagacaagcactattttctcttcctaccccacctccatttctaatgcctactgccatcaaggccttgttttgcttttctttttggattgttcagagaaatgtgtgtggcatgtgtaagaaaagtgtatatactatcttatactacctctccaggttgccagagagttgcgaggagagcaaggggcacaaccgtctccctttatagttctacttttctaataaatagtctgtttaagatcataa

SEQ ID NO: 382195 - DNA, 1566 bp, Homo sapiens
ggacgtggagtctctgcattaaagggccgctggctgctgacagaaaactacatcacacccaaccctatcttcttcacccggaaccatctgcctgtacctaacctggatccagacacctatcgcttacacgtagtaggagcacctgggggtcagtcactgtctctttccctggatgacttgcacaactttcccaggtacgagatcacagtcactctgcagtgtgccggcaaccgacgctctgagatgactcaggtcaaagaagtaaaaggtctggagtggagaacaggagccatcagcactgcacgctgggctggggcacggctctgtgatgtgttagcccaggctggccaccaactctgtgaaactgaggcccacgtctgctttgagggactggactcagaccctactgggactgcctatggagcatccatccctctggctcgggccatggaccctgaagctgaggtcctgctggcatatgagatgaatgggcagcctctgccacgtgaccacggcttccctgtgcgtgtggtggttcctggagtggtgggtgcccgccatgtcaaatggctgggcagagtgagtgtgcagccagaggaaagttacagccactggcaacggcgggattacaaaggcttctctccatctgtggactgggagactgtagattttgactctgctccatccattcaggaacttcctgtccagtccgccatcacagagccccgggatggagagactgtagaatcaggggaggtgaccatcaagggctatgcatggagtggtggtggcagggctgtgatccgggtggatgtgtctctggatgggggcctaacctggcaggtggctaagctggatggagaggaacagcgccccaggaaggcctgggcatggcgtctgtggcagttgaaagcccctgtgccagctggacaaaaggaactgaacattgtttgtaaggctgtggatgatggttacaatgtgcagccagacaccgtggccccaatctggaacctgcgaggtgttctcagcaatgcctggcatcgtgtccatgtctatgtctccccatgagcatggaaaggagccacctccacccctttccccacccattagcctcactgcttcagaaaaatctttcccacctttcaacttcttggatcacaactctggccttcctaagccatacccaagtacacatatagcacatttcacccaaggaccttccctctttggacactatgttacatacccctcttggcctttgaacctgtgccaggaagtgtgagctgttacagcaaggggctagaagtgaaaaaagtaattctggagacaagcactattttctcttcctaccccacctccatttctaatgcctactgccatcaaggccttgttttgcttttctttttggattgttcagagaaatgtgtgtggcatgtgtaagaaaagtgtatatactatcttatactacctctccaggttgccagagagttgcgaggagagcaaggggcacaaccgtctccctttatagttctacttttctaataaatagtctgtttaagatcataa

SEQ ID NO: 382196 - DNA, 1250 bp, Homo sapiens
agcgggggaccagatgttatgggcatcgacgagttaccgtctcggaaactctcaatcacgcaagcgaaaggagaggaggcggctaattaaatattgagcagaaagtcgcgtggggagaatgtcacgtgggtctggaggctcaaggaggctgggataaataccgcaaggcactgagcaggcgaaagagcgcgctcggacctccttcccggcggcagctaccgagagtgcggagcgaccagcgtgcgctcggaggaaccagagaaactcagcaccccgcgggactgtccgtcgcaaaatccaacatgaaaatcctcgtggccttggcagtcttttttcttgtctccactcagctgtttgcagaagaaataggagccaatgatgatctgaattactggtccgactggtacgacagcgaccagatcaaggaggaactgccggagccctttgagcatcttctgcagagaatcgcccggagacccaagcctcagcagttctttggattaatgggcaaacgggatgctgattcctcaattgaaaaacaagtggccctgttaaaggctctttatggacatggccagatctctcacaaaagacataaaacagattcctttgttggactaatgggcaaaagagctttaaattctgtggcttatgaaaggagtgcaatgcagaattatgaaagaagacgttaataaactacctaacattatttattcagcttcatttgtgtcaatgggcaatgacaggtaaattaagacatgcactatgaggaataattatttatttaataacaattgtttggggttgaaaattcaaaaagtgtttatttttcatattgtgccaatatgtattgtaaacatgtgttttaattccaatatgatgactcccttaaaatagaaataagtggttatttctcaacaaagcacagtgttaaatgaaattgtaaaacctgtcaatgatacagtccctaaagaaaaaaaatcattgctttgaagcagttgtgtcagctactgcggaaaaggaaggaaactcctgacagtcttgtgcttttcctatttgttttcatggtgaaaatgtactgagattttggtattacactgtatttgtatctctgaagcatgtttcatgttttgtgactatatagagatgtttttaaaagtttcaatgtgattctaatgtcttcatttcattgtatgatgtgttgtgatagctaacattttaaataaaagaaaaaatatcttgaaaaattt

SEQ ID NO: 382197 - DNA, 1196 bp, Homo sapiens
agcgggggaccagatgttatgggcatcgacgagttaccgtctcggaaactctcaatcacgcaagcgaaaggagaggaggcggctaattaaatattgagcagaaagtcgcgtggggagaatgtcacgtgggtctggaggctcaaggaggctgggataaataccgcaaggcactgagcaggcgaaagagcgcgctcggacctccttcccggcggcagctaccgagagtgcggagcgaccagcgtgcgctcggaggaaccagagaaactcagcaccccgcgggactgtccgtcgcaaaatccaacatgaaaatcctcgtggccttggcagtcttttttcttgtctccactcagctgtttgcagaagaaataggagccaatgatgatctgaattactggtccgactggtacgacagcgaccagatcaaggaggaactgccggagccctttgagcatcttctgcagagaatcgcccggagacccaagcctcagcagttctttggattaatgggcaaacgggatgctgattcctcaattgaaaaacaagtggccctgttaaaggctctttatggacatggccagatctctcacaaaatggcttatgaaaggagtgcaatgcagaattatgaaagaagacgttaataaactacctaacattatttattcagcttcatttgtgtcaatgggcaatgacaggtaaattaagacatgcactatgaggaataattatttatttaataacaattgtttggggttgaaaattcaaaaagtgtttatttttcatattgtgccaatatgtattgtaaacatgtgttttaattccaatatgatgactcccttaaaatagaaataagtggttatttctcaacaaagcacagtgttaaatgaaattgtaaaacctgtcaatgatacagtccctaaagaaaaaaaatcattgctttgaagcagttgtgtcagctactgcggaaaaggaaggaaactcctgacagtcttgtgcttttcctatttgttttcatggtgaaaatgtactgagattttggtattacactgtatttgtatctctgaagcatgtttcatgttttgtgactatatagagatgtttttaaaagtttcaatgtgattctaatgtcttcatttcattgtatgatgtgttgtgatagctaacattttaaataaaagaaaaaatatcttgaaaaattt

SEQ ID NO: 382198 - DNA, 780 bp, Homo sapiens
agcgggggaccagatgttatgggcatcgacgagttaccgtctcggaaactctcaatcacgcaagcgaaaggagaggaggcggctaattaaatattgagcagaaagtcgcgtggggagaatgtcacgtgggtctggaggctcaaggaggctgggataaataccgcaaggcactgagcaggcgaaagagcgcgctcggacctccttcccggcggcagctaccgagagtgcggagcgaccagcgtgcgctcggaggaaccagagaaactcagcaccccgcgggactgtccgtcgcaaaatccaacatgaaaatcctcgtggccttggcagtcttttttcttgtctccactcagctgtttgcagaagaaataggagccaatgatgatctgaattactggtccgactggtacgacagcgaccagatcaaggtgaggccccttcccaggacggcccgcacccttcttcctgggctcgggagctgtcaccttcccacgcaacagcaccctagttaacgtggcacgcaccgccaccacggaaagaggcagcggttgcgtgcgagaggatggaaaggggcactatttcccgggttccccacgggattttgtgcccacgattcaagtttcttcccgagggctgcaccgtccggcccaggaactccctgcagtagggatgccctcccggatgagcccgagatcctcacaaggcgggaaatctcgtaagatttcatcccccaggacctgggatttcgggggctccggtccagctgcactgccctagcgtctg

SEQ ID NO: 382199 - DNA, 1205 bp, Homo sapiens
agcgggggaccagatgttatgggcatcgacgagttaccgtctcggaaactctcaatcacgcaagcgaaaggagaggaggcggctaattaaatattgagcagaaagtcgcgtggggagaatgtcacgtgggtctggaggctcaaggaggctgggataaataccgcaaggcactgagcaggcgaaagagcgcgctcggacctccttcccggcggcagctaccgagagtgcggagcgaccagcgtgcgctcggaggaaccagagaaactcagcaccccgcgggactgtccgtcgcaaaatccaacatgaaaatcctcgtggccttggcagtcttttttcttgtctccactcagctgtttgcagaagaaataggagccaatgatgatctgaattactggtccgactggtacgacagcgaccagatcaaggaggaactgccggagccctttgagcatcttctgcagagaatcgcccggagacccaagcctcagcagttctttggattaatgggcaaacgggatgctggacatggccagatctctcacaaaagacataaaacagattcctttgttggactaatgggcaaaagagctttaaattctgtggcttatgaaaggagtgcaatgcagaattatgaaagaagacgttaataaactacctaacattatttattcagcttcatttgtgtcaatgggcaatgacaggtaaattaagacatgcactatgaggaataattatttatttaataacaattgtttggggttgaaaattcaaaaagtgtttatttttcatattgtgccaatatgtattgtaaacatgtgttttaattccaatatgatgactcccttaaaatagaaataagtggttatttctcaacaaagcacagtgttaaatgaaattgtaaaacctgtcaatgatacagtccctaaagaaaaaaaatcattgctttgaagcagttgtgtcagctactgcggaaaaggaaggaaactcctgacagtcttgtgcttttcctatttgttttcatggtgaaaatgtactgagattttggtattacactgtatttgtatctctgaagcatgtttcatgttttgtgactatatagagatgtttttaaaagtttcaatgtgattctaatgtcttcatttcattgtatgatgtgttgtgatagctaacattttaaataaaagaaaaaatatcttgaaaaattt

SEQ ID NO: 382200 - DNA, 1151 bp, Homo sapiens
agcgggggaccagatgttatgggcatcgacgagttaccgtctcggaaactctcaatcacgcaagcgaaaggagaggaggcggctaattaaatattgagcagaaagtcgcgtggggagaatgtcacgtgggtctggaggctcaaggaggctgggataaataccgcaaggcactgagcaggcgaaagagcgcgctcggacctccttcccggcggcagctaccgagagtgcggagcgaccagcgtgcgctcggaggaaccagagaaactcagcaccccgcgggactgtccgtcgcaaaatccaacatgaaaatcctcgtggccttggcagtcttttttcttgtctccactcagctgtttgcagaagaaataggagccaatgatgatctgaattactggtccgactggtacgacagcgaccagatcaaggaggaactgccggagccctttgagcatcttctgcagagaatcgcccggagacccaagcctcagcagttctttggattaatgggcaaacgggatgctggacatggccagatctctcacaaaatggcttatgaaaggagtgcaatgcagaattatgaaagaagacgttaataaactacctaacattatttattcagcttcatttgtgtcaatgggcaatgacaggtaaattaagacatgcactatgaggaataattatttatttaataacaattgtttggggttgaaaattcaaaaagtgtttatttttcatattgtgccaatatgtattgtaaacatgtgttttaattccaatatgatgactcccttaaaatagaaataagtggttatttctcaacaaagcacagtgttaaatgaaattgtaaaacctgtcaatgatacagtccctaaagaaaaaaaatcattgctttgaagcagttgtgtcagctactgcggaaaaggaaggaaactcctgacagtcttgtgcttttcctatttgttttcatggtgaaaatgtactgagattttggtattacactgtatttgtatctctgaagcatgtttcatgttttgtgactatatagagatgtttttaaaagtttcaatgtgattctaatgtcttcatttcattgtatgatgtgttgtgatagctaacattttaaataaaagaaaaaatatcttgaaaaattt

SEQ ID NO: 382201 - DNA, 627 bp, Homo sapiens
gatactgctagaatcctgtctctcaccatcccagttgcctggcactcagggatacttctatacaaccttagttgaatctcacaaaaagaggtgttgatccttcgtaagtgaggcacccaagacacagatggcttcagtgatttaaattgtggtcataatgttagaggcagagccaggtcagaggatagacattgtggctcagacacctgctcttataggagggacttgcctcacagttttctagttacggtgtctgtaatctacagctttcaaatcaggtgcctggcccatctctgtacacctcttggctcagctgttagaattataggacttttagtgtggctagcaattggataaaggccaggcacagtgactcattcctgtaatcccagcactttgggaggctgaggcagaaggattacttgagcccaggagctcgagaccagcctgagcaacatggcaagaccctgtttctgcaaagttaaaaagttagctgggcatagggctcattcatgcctgtggtcacacctactcaggaggttgaggcaggggatcacttgaacccatgctattgaggctccagtgaaccttgtttacaccactgcactccgcctgggcaacagagcg

SEQ ID NO: 382202 - DNA, 859 bp, Homo sapiens
aacgcagtagttgccctcttaataatgacttgtgcttgcccctttttaaatctatttccaattgatgtatagaaaaagatgaaaaatatatccatgtagttatgaatttcagatgtatgtctgtagatgaacagacattaatatatataaccatggcaaaaatagtttgatgacaagtaattataatctctctctctggccatcattggcgagtgcagtgttgagctaaaagtgacccagaggaggtgaactataatttacttgagttaagaaggataaaaattggagcaaactttccagccaaagcagttaattcccccaacatagtaacttacttaaattcaagtagagtgggtagatctattgaaatgaactttactctgctgtgcatgttacaatgtattaaagtattgcttccaaagagaacagaagagtgaacatttaaaaattttattttaagaaagaaatctgattactctgtgatattttttaaacaataaagagattttgctcttaaaaaaaaaaaaaaaaaaaaaaaaaaaaaaaaaaaaaaagccctataaatctagtcatacattatgagcatcaacctttgagatctctcatcaccgcatgattgcaaaaactcaggcctcccccatgctcggatttctcaaaaatagtcgatgtccaacgttcatatttagatacattgattcgtcatcaccccctcccacagttctttattggcagtcaccatctctttggtgttgtgtgctagagtaacatctctcactcaattatagtgtcatgtatcctctcaaccgtattgtgattatgacgctttactgttagtactcccactccccgaatatttgac

SEQ ID NO: 382203 - DNA, 518 bp, Homo sapiens
aacgcagtagttgccctcttaataatgacttgtgcttgcccctttttaaatctatttccaattgatgtatagaaaaagatgaaaaatatatccatgtagttatgaatttcagatgtatgtctgtagatgaacagacattaatatatataaccatggcaaaaatagtttgatgacaagtaattataatctctctctctggccatcattggcgagtgcagtgttgagctaaaagtgacccagaggaggtgaactataatttacttgagttaagaaggataaaaattggagcaaactttccagccaaagcagttaattcccccaacatagtaacttacttaaattcaagtagagtgggtagatctattgaaatgaactttactctgctgtgcatgttacaatgtattaaagtattgcttccaaagagaacagaagagtgaacatttaaaaattttattttaagaaagaaatctgattactctgtgatattttttaaacaataaagagattttgctcttaaa

SEQ ID NO: 382204 - DNA, 293 bp, Homo sapiens
gtcatcaaagcatgcctgggcaggttggtatacttgaagtctctccactgtccccccagataaaaaataaacccacaagacacagggcttatccatcctcaactgccctttccagcttccgttcactcgaaatatgctctgctcattcccatacaacttataatatactctgtaccattttctggcacacaaacccatcactttaaggatactgaagctacttgttcaaactggttcaaaatgacttttcccttttcctgacttcacatagccttaactaatttacctttttt

SEQ ID NO: 382205 - DNA, 266 bp, Homo sapiens
aggaaaaaaaagaaagaaaagaaagagagaaagagaaaatgtgtgtaactgaatttccatcctgaaggatattttatgcacataaaatgttgggttgactattctctcagcacttgaaaagtgtgccacttccttcttgcctctatgatttctcatgacatttgaattgttgttcccctctgcttcgagttggtatttgaatttaaaaaataataaaattaaataaaaataaaaataaatggattttgtccccttataggtaatgc

SEQ ID NO: 382206 - DNA, 372 bp, Homo sapiens
tttttgttatcactcttatcagagtttctcagttgttttactctttataaataacctttgatttttaatcttttctattttgtgtttattacataattttattactttctgctctttgttacccctctcctttctttcatgttgctgttcttttttcttacttcttgaaatagaagcatggctcaaattttcacctaatgcatgcattcttcaatgttataaatttttccctatgtcttagctttagtatacgttttgatatacatagtactattatttagttcaaattattttcctttttttttttctgagaactccagctccaaaaaaaaaaagaactaacggccaaattttttccaaacttgatgaaaa

SEQ ID NO: 382207 - DNA, 973 bp, Homo sapiens
ttctgcctgtatatggtggcatgagatgtaatgtccagagccaacaattatttaccagggttagattttattcagtgacccttgtttaaaaataataatttatcacattgaaactttcagctctgtcgaatgatttctgaattacatcctgtgtttcagcttaggttgtaaaatactccgttctctgtggagtcagcatatttgagagggcagcgttttgccagtacctatcttctttctacagaagatagctttttaagaaataagagttccacattgagtggctgtcagacacagatttcactgtgacgtaaaatacactgcagtgagaatatggtatcaccactattcatatttacatcattcccctcacacagaaaaaccaacccttttcccaaaaagtcaagaatactgctatacctttattattctcagcttcctccagcccttcttgtttttcctcacttgaaattgaaccttcattgtcagctaagtatatatacttttgtgttttcctggacagagtgcaagtggctcttatcagccaaggtggtgaaggttcaggaaagctgggcagcactgggccctgctcctctctgcacctgtgtgcgccatgacacacccacatgcagattcccaagtctgtctcccctcccccttagcaagtacaaggctgtgcattaactcacctcggtcctagaggagtatcctagtactgcttggcaacttctaagaccctaacttgtgaaactagggaagtaagaaaccgttcaaatttaacatctgtcttcagtcatctttaaatcgtctctctttataaacactctgctcacttagcagaaggactgaaggaactaaggaacttgctaaagagaagaagaaaacaaaagctagacttagttccagttaattctgttattcttctgaaataaaaatgaaataaaaggaaggttcgtaaagaggaaggatgggt

SEQ ID NO: 382208 - DNA, 622 bp, Homo sapiens
gtacaaggctgtgcattaactcacctcggtcctagaggagtatcctagtactgcttggcaacttctaagaccctaacttgtgaaactagggaagtaagaaaccgttcaaatttaacatctgtcttcagtcatctttaaatcgtctctctttataaacactctgctcacttagcagaaggactgaaggaactaaggaacttgctaaagagaagaagaaaacaaaagctagacttagttccagttaattctgttattcttctgaaataaaaatgaaataaaaggaaggcagaattctctttttttttttttttagacaggatcttgctctgtgatggtgcaatctcaactcactgcaacctccatgtcccagatgcaggtgatcctcccgcctcagcctcccgagtagctgggactacaggcacgcacaaccatgcctagctaatttttctgtttttagtagagacagtgtttctccatgttgcccaggctggtctcaaactcctaagtgatccacccgcctcagcctcccaaagtgctgggattataggcgtgagccaccacaccaggccaagaaggcggattccttgaagatgattcaaagccagccattaaggatatccgt

SEQ ID NO: 382209 - DNA, 404 bp, Homo sapiens
actctgtctacctttttgggctttttcagtgatgtttctccagcatttcaaaggcaccatggtatgggtagttaggaatatgtgctgtggtgccagactgtctgggtttgaatcctggtctactgtccactaactctgtgactctgggcaagttgctgagcctctttgtgcctcagtattgtcatctgtataatggaaatcgcggtagtgctaacttcatagagttttgtgagattaaatgtattaatacatgtacgacacttaaaacaacggttactgtctattaaccatttggtatatgaaagagagtaagtgctaaagtaatgttcatttcatggatttaaaaaagactaattcagtaggtgttcatgggattttagggagaagcaactgtgtgcctggta

SEQ ID NO: 382210 - DNA, 218 bp, Homo sapiens
taggtttatatataacatccctaaagtgaagtgttttaaataggagcaaggagaaatttcttaccttaatgatatgcttaaaattagtttctttcaagcgtgaaacatatgagcataagtctgcatattgaaagagtaattggaatgtctgtcattcctttcaaattttatacgtaccatgtggaaggcactggcacaaaataattatttcagcacta

SEQ ID NO: 382211 - DNA, 2282 bp, Homo sapiens
acactcagcaaacggcagcctcaccccgcaggccgcgccactccccttccccaccccaccgccgcgtcccggctcagcgctccccggggaacgcagggggaccgggctcgctgcgtgaccttgggctctcagcccacccacctggaagcgcccatgtgtcaccttacccaggagagggcggcagaggctgcgagcaggacggcagccccctctccccacccccaggaccctgagatcctgcttcacgggctgcaagaagttggggggccaggattcggcgcggaggccgggggtgtgggtggggagactgcagagactcccgagacccccccaagtcagggcttttcgctggtctcgcagccccagcccagcagctgctgcagtcttgcatgttgtggatgcaagcattttgctgaggaaactgcatagcgttcccaggactctagggcccacgacccctcaaaagttaagagccgctgatctaatctaaccccactttcaccctcagttaacaaaagaggaaaactgaggcctgagagggtgtgacttgcctgaaatacctaacctggtgagtgatgggtggaaccagctcctaggctttctgcgcaggtgtccaggggacagagaagggtggtttaaactagagaggtggcaggcagaagtagatggatttgataactatttaggatacaccatcaaaatttaactcaaactggattacacacctaaatataaatggccaaaccataaaacttttttttttaaaaatggagacaatcttaacaatattgggtttgaaaagatttcttttttcttttctaaaggcagggtcttgctttcattgaccaggcaggagtgcagtgccctgatcacagctcactgtaactttaaactcctgggctcaagagatcctctcacctcagcctcctgagtagctgagactacaggcacgtgccacgacacacagctaatttttaaattttttgtagaaatggggtcctgctgtgttactcaggctggtcatgaactcctgggctcaagcagtcctcctgcctgagcctcccaaagtgctgggattacaggtgtgagctttggcacctggccagatttcttaaatatgacacaaaaagtgtaaatgatagaagaaatcaataaattgaacttcatcaaaataaaaaaaaaaaacaaaaaaaacaaaaaaaaaaaaaaaaaaaaaaaaaaaaaaaaaaagggggcgcgcgcgcgagccagcaggaaatccccccgcagggggcgccccaagcaggcggcgcccccgccgcgcttacgtggggaacagcgggcggcgccccaaagaggcggcgggacataatagaatagcagaaagccgaacgggagcgcagcgacgctaataaacaaacgaataagcacgcggaggagaaaacagacgagcaaacaagggagaaacccacgaggaggaaggaccccataaagaagcgagggggggcagcaaataataactggggcacaagaaacaccaccccacacagaaacagaacggctcacgcggcgggggaaaacatagaaacaacacagtcaaaagaggcggacacaacgaggggggaacacaaaaacacaccagcgacaatatatgagagaaggcaggagacaaagacacgcgcgggagccggcgggagacataactgtaggcggcaacacaagcacagccaccacgagaagagcaacaaagcaaaaagagagacacgaagggggccacgagggggagggaacgaccagagggacggaaggccggcgcgcggaggagaaacgaacgagcgagagggacgaagtgggcgacgcgggggacgaggaaagcggagcagaaccgggaagaggaagacgagaaggcgggacgcgggggacgaacatgcacgcaagagggaggccgaaaggaagaacaaaaaagaagaagcgaaaaaataagagggacacagaaggaggaagcaggaaagaagagaaggaaggaaaagaagagcgaacggggaggccaaaggaggggcagacacagagggcgacaaaaggcaggagcaggagacagaccacaagaaggagaggaggaaaggggcgaacgaggagagagcgagggggcaggaggagacgcaggcgagagaggaggaggagggtagcggagcgacgggaacggcggcggagggacgaggggaaaaagacgaagaacgggagagggaaagggaagacggagaagcagcaacaaacaacgcgagacgaagcacgcggcgctagtg

SEQ ID NO: 382212 - DNA, 353 bp, Homo sapiens
cagggggaccgggctcgctgcgtgaccttgggtaagtccctgccccgttcggcccgactttccgcatgcgtgcatcctatgggatggggttgggcaattgtgggagcccatctttctctaacgttctggggtttcttgaacctggaaacttagagaggtggacatccctgttctctcccccaggctctcagcccacccacctggaagcgcccatgtgtcaccttacccaggagagggcggcagaggctgcgagcaggacggcagccccctctccccacccccaggaccctgagatcctgcttcacgggctgcaagaagttggggggccaggattcggcgcggaggccgggggt

SEQ ID NO: 382213 - DNA, 319 bp, Homo sapiens
tgctgtgttactcaggctggtcatgaactcctgggctcaagcagtcctcctgcctgagcctcccaaagtgctgggattacaggtgtgagctttggcacctggccagatttcttaaatatgacacaaaaagtgtaaatgatagaagaaatcaataaattgaacttcatcaaaataaaacgcttttgtttctcaaaatgcacgaaactattaaaaatgaaaagataagccatagactaggacgaatatttgtaaaaattctatctgatgtaggacttgtataaagaacttttacaattgaataaaaatccaataaaaatgg

SEQ ID NO: 382214 - DNA, 1326 bp, Homo sapiens
acactcagcaaacggcagcctcaccccgcaggccgcgccactccccttccccaccccaccgccgcgtcccggctcagcgctccccggggaacgcagggggaccgggctcgctgcgtgaccttgggctctcagcccacccacctggaagcgcccatgtgtcaccttacccaggagagggcggcagaggctgcgagcaggacggcagccccctctccccacccccaggaccctgagatcctgcttcacgggctgcaagaagttggggggccaggattcggcgcggaggccgggggtgtgggtggggagactgcagagactcccgagacccccccaagtcagggcttttcgctggtctcgcagccccagcccagcagctgctgcagtcttgcatgttgtggatgcaagcattttgctgaggaaactgcatagcgttcccaggactctagggcccacgacccctcaaaagttaagagccgctgatctaatctaaccccactttcaccctcagttaacaaaagaggaaaactgaggcctgagagggtgtgacttgcctgaaatacctaacctggtgagtgatgggtggaaccagctcctaggctttctgcgcaggtgtccaggggacagagaagggtggtttaaactagagaggtggcaggcagaagtagatggatttgataactatttaggatacaccatcaaaatttaactcaaactggattacacacctaaatataaatggccaaaccataaaacttttttttttaaaaatggagacaatcttaacaatattgggtttgaaaagatttcttttttcttttctaaaggcagggtcttgctttcattgaccaggcaggagtgcagtgccctgatcacagctcactgtaactttaaactcctgggctcaagagatcctctcacctcagcctcctgagtagctgagactacaggcacgtgccacgacacacagctaatttttaaattttttgtagaaatggggtcctgctgtgttactcaggctggtcatgaactcctgggctcaagcagtcctcctgcctgagcctcccaaagtgctgggattacaggtgtgagctttggcacctggccagatttcttaaatatgacacaaaaagtgtaaatgatagaagaaatcaataaattgaacttcatcaaaataaaacgcttttgtttctcaaaatgcacgaaactattaaaaatgaaaagataagccatagactaggacgaatatttgtaaaaattctatctgatgtaggacttgtataaagaacttttacaattgaataaaaatccaataaaaatggacaaaac

SEQ ID NO: 382215 - DNA, 673 bp, Homo sapiens
ggtgggattggttgctgattcatcagtgtctggttgtgcaagagaacagaaatgtgtgtggaagtgtccccaaagaggcagacacttgtaactttcgcaaatatgacttagcaagaagaaaatatttacatttgaaattatttcaaaatttaaaaagaatatatagaaaaatgggcaaaagacatgaacggccacctcacattaaaagcaacaccagtgtcctcatcgtgaaactagacgcccgatcttatcctcgaagcaatgaatgctcaacaggacctgctgctcagcaggatggcaggagccggagacgtggatgctgttcaggcttgttgagggtgtgggaaaaaggggctgtttgtattctgtgtgggcctgaactgggttgggtttttgagggcagcttggaaatacagccattgtagttttaatctgtaacttttactggagttttaatttgtacacttctattggagttttaatttgtatacttttattggagttttaatttgtatacttttattggttttaatgtgtatactttttgactgaaaaattcaactttaaggaatttcatcagaattatacagattcactgttgcgttattgcaaaatgtgaaaaaaatttaaatgtccatcaatagagaattgggcaaataaatacgataaatat

SEQ ID NO: 382216 - DNA, 471 bp, Homo sapiens
tgtgagttggatcttgcaggatgaattagcattttgtagtcaaggaagagaagggagaaattcatttctggccaagggaccaacctgggcaaagccatggaagcacatgtgtgttgggaatgaaagcataggctggagagggtgacaggttatggtggctgtggagggcgtggaggagatacggccagaagggacccatagagttgggggtgggaggctaagatggaaacctcatagttttatttgaaagatgaaactacggccaaaagaaaggaaatggactggatggggcaacaagacagcagggagaccattcagggagctgctaaagtggtccaggtaagagataatgatgttgactttgagagacatttaggaggcatacgtgcagtaagctggatctggagaataatgtaaagatgggacgccttgaaggtgtcactcagatttctggcttaatgaatgagtaat

SEQ ID NO: 382217 - DNA, 403 bp, Homo sapiens
cccatttatgatcctgccctgggcggctccccacttacaggaaaccccaccaagaggaatttgggctgcatcatttccggcttcctgcctgggctgctggaggtggctggctggcagccccctgacccagtggtgtttggagtggggagagggaggtctccacacctggggtgcctcactatttgggtaaagccagcccagaagtgcatgctagggctccccctcttggcgaagaaggctggtcccttcctcctgagccctggagtcagccccccaggaaggtgttggcggtcaccttgggcatccctctgttgccctgattgggagggggtcccttaaaaagcctaaacccgctgcactccagcctgggcgacagagcgggctccgtctcaaaaaaaaaaaa

SEQ ID NO: 382218 - DNA, 1642 bp, Homo sapiens
  misc_feature (1)..(3): n is a, c, g, or t
  misc_feature (301)..(301): n is a, c, g, or t
  misc_feature (1002)..(1002): n is a, c, g, or t
  misc_feature (1085)..(1085): n is a, c, g, or t
nnnatcattgtactttctcatgagttaaactttttatcattatgataatgctttttgccttaaagtctactttgtctaatattaatatagataacattaattttgttaatatttatatttttccactttttaatttcaacattataatacaaatgttttaggtatgtttcttataaacagtatgcagattgttatccaattcaatctttgatttttaattgaactatttaatttatttacatttaatgtaattactgatatatttgaatttaaatataccgtcttcttaagtgttttcaantgtctcacatgctctctgttctctttatcctcactttttgcctgcttttggaaaatattgtttttgcctccattgttttggaagttacatatctttttagtagtcttttagagtttatcctatagatcacagtatgggtctctgagttagcaaaggctaataatgttaattggcactttcattttcttccataatagtacaaggaccttagaacgtttcaattcatttacttcctctcctgatttgtatgcacttttaatatttttaattttttaaatcttcagcactgtgttacattgtttcatacggtataattcatttagacttcctcaaatggaccttcgtgctggacctcatttctttctgcatctatataacctatcatccttaatcatcttccttctgcttaaagaacatcctttagtatttgatgctggtaaagaatcctgaaaatgtcttaatttcacttttattattgaaggctattttcactggacatagaattctaatgttgacagttattttatttcagcacttgaaagacatttaaattccactaatttctagtttccattgtttctatcaagaggtaagctaacagtctattacattttttcaagtaatgacagctgcttgtaatttttttttccctttgtctttggttttcatctgtcttattgtgatgtacctaggtgtggctnttaaaaatttctcctgcttgcagctcccagggcttctgagatttgtggcttgttgtctttaatcaattttgggaatttttcanctattttctcttcaaatattgatgctgcaccattctctttctcttctccttctgaaattttaattctcattttatctccatatctcttactctctgtagcattgctatccttttgtctctccatgtttcgtcatgatgttgtcttctaacctactttccagttcatcaattttccctacagctgtgtataattttttgttaaaccaagtaaagagtatccactgagctctttgcttttgttagtatatattttaaattctaaattgttcactggttattttttacaactttttcatccttttttaaagttttcagttctctgccaaatttgttgatactgtcttttatctccgtatgtgtagtaaacataattaatttaaagtccgtatctgataaatccattaactggagttctgtggtattgtttctattgtagttgtttctactggatctcatgttttcttatttctttatgggcctggttattctcttgtgtgctaaaattgtatatgaaaaattgttggttgaagtaaagtaaaacttattgtgttatattc

SEQ ID NO: 382219 - DNA, 347 bp, Homo sapiens
aacaaatgtccatagaggttaaataatttgcccaatgttccatagacagtatcagagctgggatctaaacccaggtgatctggctcccgatgccatgttccggtccctgatatttctttgatgatgtaggtatcactctctgattttcaaagacgtgagtgctgagccttggagcagtggcacatttgtctgcagattatccaggtgccctgactccaagagctgtgcactttctacatgggaggcacagcagcctccctgttataccaagtgttggtgaatggaaaccaccagacagtttttgtttttgagacagagtctcgctctgtcgcccaggctggagtgca

SEQ ID NO: 382220 - DNA, 318 bp, Homo sapiens
ggttgtagtgagccgagattgcaccactgcactccagcctgggcgacagaatgagagtccgtctcaaaaaaaagaaaagaagtaggcctgatgtgtttgaggatcagcaaggaggccaccgtggctacagccaggtaacccaagagggagggatgggagctgaggtcaggaaggcaatgggggaagatcgtgcagggccctagaggcctcaaggactttgcttttaccctgagtgaggtgagagccacaggacggtttgagcatagaaacaatatctgacttgtgtttttttaaacaattatattgcaatataaggcc

SEQ ID NO: 382221 - DNA, 428 bp, Homo sapiens
gtgaagtccacctgcttatggacagcccatttgcatggggccctgcgtgtggtgcagcccagggtatgtgaggaaggcctcagaggagctgctgctgccacaggtggtcaccagggcagaggttacactgacatacctccagaccagcccgctccactgtggacaggggcaagtcacatacctgctgtttaccatggggtcacggcagaacctgtctcacggggtgctttgtgatgccaaatggatataggtgggacgtgctggcagcagcggcctcagcgtcgagccatctcccctcccgttctgctccggcctgcctgtgggcctaatggtggcaccgtttaagcacctgctgtgtgctcagcctggggcctgaggctttccatacgtgatcactggttcctaccccaggcctcattcctccctgt

SEQ ID NO: 382222 - DNA, 679 bp, Homo sapiens
actccatctcaaaaaaaaaaaaaaaaaaagtctcctttgccttgcttttcccaaatatatcctatagctgttccaggggctaggagatggacccaaccggacatagcctggattctatagagatagcagagggaaggctaagtcatactacagtgtgaatgattaatagtagatatttcttttcagagcaggttttgtttaggttggggagaaagaggactgcagagaaaagggataaacactgagatgccagaggcaccagggttgcccaccccatagagtccacaccccattccccatgttttttgcatgagccctgctggggggcaggccctgggtcccttcccttctgatcctgttgtcctgagtcacaagcttatccctgtcttggaaccattggttctaagcagcactggagaatctgagacagctggaagaccagagcaccccattcagcccctctaaatttgtatgtggtaaagctggggccaagagagggcagctgttggctcaaggccagccatagtaggaggtctaaaacttgtgtcacccagcgtgctggctggattatttaggctgaggcacaagattcacttgaaccctggaggcggaggctgtagtgagccgagatgacaccactgcactccagcctgggtgacagaatgagtctctgtctcaa

SEQ ID NO: 382223 - DNA, 340 bp, Homo sapiens
tgggaaaggcttcctgtacctatgttactatgaaatgttacagcttagtttcatgcatatggctggtgtgatccagttacttattttaaaaagagagttgatttcctttgtttatatgctggcagtgaaaaacagaatgacagttcgacttaagaatgagggcttgttctcagtacagaaacagaagtagcctagttcaagaagtgcggaccaccgctttgtacaatggtctccaaactttggtcacttcatcaggaaatagtatgagcacttctctccatacatagttatttgtaaagtatacatgcttctgctattgtactctaaaacgtgctgtatt

SEQ ID NO: 382224 - DNA, 431 bp, Homo sapiens
gtggcaccacgaggggcaggcacacatgctcttccatttcacctctgttgcctcctcccgctggtatttaccgttactcccatgctgaaggtgggtctgtaatgccgaggaccctaacattagtgctgaagggtcctggaaaggcttcaggaatccccagacatatcaaagtggaactcttcaccaccagaggagggttagttttccagcatccatccgaatatcacacatcaccacctgcactgctagagctgatcaggaagaaaaaccggtcactgcttcagacgggctcccttccagagtcactgtgtggattgccttctggtcaacatcttggtctcatctgagtgtggaattagccagttgaaatttcactgattttattatcattacaccattttattataaattattatattaattcttcatca

SEQ ID NO: 382225 - DNA, 251 bp, Homo sapiens
ggtgttaggcactgggttcaagagtgaaacctctgatctgctgctgcctgggaggatattaatcatgttacatagggagtaccagactccatgtctctgcccttgatggggagtgttgggagtatttttcatcttgaatgtaagctgaaagttattcttcacaccagaaaggaaaccaagaccatcttagacatgcagtgaagcagacaaaacaaggctgaggaggggcccctggaacagggaaccagagt

SEQ ID NO: 382226 - DNA, 406 bp, Homo sapiens
gtctgataaccaagagctctgatgtccaagggcaatggatgttccacttcaagagagagataatgccctcttcctctgcctttttgttctatctgagccctcaatgaatagattaatgcccattcacattgagtgaggttggatcttctttactcagtctgtgattcaaatgctaatctgtttaccagctctctgttttaccagctatctgggcatcccttagcccagtcaagttgacacccaacattaatcatcacaaagttgtcttagtgcattttagtgtgttacagtgttacaggctcacacctgtaatcccagcactttgggaggctgagataggtggatcgcttgaggtcaggagttcgagaccagcctggccaacatggtgaaaccccatctctactaa

SEQ ID NO: 382227 - DNA, 149 bp, Homo sapiens
cgacatcacagctcactgcagcctcaacctgggttcaagtgagctgtgatgtagtcccagcactttgggaggtggagacaggagtatcgcttgagcgcaagagttcgagaccaaccttagtaatatactgagaccttgtctcaattaaa

SEQ ID NO: 382228 - DNA, 490 bp, Homo sapiens
attaatctaagcaagtacagccttgtagctcattggaagaggtgcttccaacaatctcccaggatcactggagcacaagcagtgaccaccttggcctctgagatgtgtttaaatttgtaggtgtcatttgcttgtattttctctaaatgatttgattattctaagatccttattatcactattttccaaaaaaagataaggattgtttctctcttcaaggatgatagatgttttatcattcccaaaggccatgcttttcttcctgtgaggacaagccagccaaggattagatatttcacgcatgggtttctttatgctcctgcaaaagattgtctttctgtccacacttcttgtgattccttgggagtccatcaggcatggctcagagtgttcactctagtgattcttgggaagtgcctccagcagagctcagagcattcatgctattgattcttgggaagtccatcaggaacagctcagagcattcagt

SEQ ID NO: 382229 - DNA, 547 bp, Homo sapiens
attttagggttgttaatagcctaactttaatatgttgtgtctcaaggaatacggaggcctgaggagagggagaccggagaatcactggtcagtggagcagtcagaacacacacaacgtttattaagttcatcggtatgtgtgggtgtggttcgtggtgccccagaaccagaactgttgtaattacaacagtaacatcaaagatcactgagcacaggtcactataacaaatataatcctaatggaaaagtttgaaatactgtgagaattcccaaaatgtgacacagagatgcacagtgagtgcatgctgtttgaaaaatgatgccaataaacttgctcagcacagggttgccacaaacctttaatttgtaaaaagaaaatgcagtatcttcaaagggcaatacagtaaagcacagtaaaatgaggtgtgtctgtatggacacgtgtcagcttctcaaattgtaaactttaaatatgtgcattttatttggtgtcaattgtataaagcgattaaatttttaaaaggactgatgcagacagcacctggca

SEQ ID NO: 382230 - DNA, 670 bp, Homo sapiens
atgtttcatctctatcacattcactgactttccccttgaattttccttgcctgatatcaggcccatacctactggtatcttcttggtttcatttgcttggtataccttttcccatgtctctatttattaacttttaagttactttgttttacatatttcctttatatacactatagagttggtttttgctttgtgagccagcttgaaattttaaaacaggtaacttaatcacgtttatatttattgatatgacttcatatttggtcttaaatgtcttattttgttatacttacagtttccttctctatgctttcttttgtgtgtatctgtatatatgaatgtgtaagggtgtattttttggtatttcagaaggcttttgcattttgttttattgattcactttacattaatactatttatcatgttcttgatctgccttttccttatttaaccttctcctcttttatttgccagctttaaatatcctttgactcctaattactaagtgaaaatcagtgaacttatttttttctcttctctcttcatcctctcattaaaaatttttttctacttttttaaagaaaacatagcctttacaaatcatttttctttctactcactccagcctgggtgacagagtgagaccccctctcaaaaagacaaaaaaaaa

SEQ ID NO: 382231 - DNA, 221 bp, Homo sapiens
aatattgtctgtgaatatttttctttcttatacaaaagagagatcttggtaactacatgagagcaatacaatatcttaacattttttaaaagttgttttcatttttaattaaagcgatgtgcttgtgctccaacctctacctatctttcccctctttctgggggggaaatgttgccaactgtgccatcaaaaatacgcatacagctgtgtgtcatgctttt

SEQ ID NO: 382232 - DNA, 2852 bp, Homo sapiens
gactagtgattaagatgacagcagggatcgtctcctccggtctcacagctaccccgggctggagcgtggggagggggtaagggagccagccaactcggggaaacttcgttgccagagatgactggggttttcgggctttcccagccttcccatgccgggccacacggcattcattaaagtggtggggcaactattggtgcgctccagccgggcaggttttgagctgcagagacccgtgcccggtagcagcgctttgccaccgagtgcacccaggacgcagtggccgccagcccgggtctcctgctgggggccggcgagtgcagggagactttgcgccacgatgttttgttttcctgccgcaggaacgctaggcagtctctttccaccagacttaacccgcctgaagcaatagccatggaagttgcggcggcacagagggagacagaaccgcttggcgcggcatctttcttggatgttttttctctacacagacttctttctttccttggtggccgttcccgcagcagcaccggtgtgccagcccaagagcgccactaacgggcaacccccggctccggctccgactccaactccgcgcctgtccatttcctcccgagccacagtggtagccaggatggaaggcacctcccaagggggcttgcagaccgtcatgaagtggaagacggtggttgccatctttgtggttgtggtggtctaccttgtcactggcggtcttgtcttccgggcattggagcagccctttgagagcagccagaagaataccatcgccttggagaaggcggaattcctgcgggatcatgtctgtgtgagcccccaggagctggagacgttgatccagcatgctcttgatgctgacaatgcgggagtcagtccaataggaaactcttccaacaacagcagccactgggacctcggcagtgcctttttctttgctggaactgtcattacgaccatagggtatgggaatattgctccgagcactgaaggaggcaaaatcttttgtattttatatgccatctttggaattccactctttggtttcttattggctggaattggagaccaacttggaaccatctttgggaaaagcattgcaagagtggagaaggtctttcgaaaaaagcaagtgagtcagaccaagatccgggtcatctcaaccatcctgttcatcttggccggctgcattgtgtttgtgacgatccctgctgtcatctttaagtacatcgagggctggacggccttggagtccatttactttgtggtggtcactctgaccacggtgggctttggtgattttgtggcagggggaaacgctggcatcaattatcgggagtggtataagcccctagtgtggttttggatccttgttggccttgcctactttgcagctgtcctcagtatgatcggagattggctacgggttctgtccaaaaagacaaaagaagaggtgggtgaaatcaaggcccatgcggcagagtggaaggccaatgtcacggctgagttccgggagacacggcgaaggctcagcgtggagatccacgataagctgcagcgggcggccaccatccgcagcatggagcgccggcggctgggcctggaccagcgggcccactcactggacatgctgtcccccgagaagcgctctgtctttgctgccctggacaccggccgcttcaaggcctcatcccaggagagcatcaacaaccggcccaacaacctgcgcctgaaggggccggagcagctgaacaagcatgggcagggtgcgtccgaggacaacatcatcaacaagttcgggtccacctccagactcaccaagaggaaaaacaaggacctcaaaaagaccttgcccgaggacgttcagaaaatctacaagaccttccggaattactccctggacgaggagaagaaagaggaggagacggaaaagatgtgtaactcagacaactccagcacagccatgctgacggactgtatccagcagcacgctgagttggagaacggaatgatacccacggacaccaaagaccgggagccggagaacaactcattacttgaagacagaaactaaatgtgaaggacattggtcttggactgagcgttgtgtgtgtgtgtgtgtgtgtgtttttaatattcacactgagacatgtgccttaaacagactttttagtccaaaattacatagcattgaagaatatatttcactgtgccataaacaactgaaagcttgctctgccaaaaggaatcagagaacaagaacttcatttcagatagcaaacgcaggacacaccaagagtgtccgtgcacgtagccggttctggccgtacatgttaagggcatttcagtggcagtgctgtacccctgggcagtgctacctgggcacacacgtagacaagggcagctattccttagaccagcctcctgaaagaaacaggtgtgtctttttagtggagtcgtagtaatatgtgcacacacagaaggggacctgattgggtgggagctggttatgtgtaactagcgttggagttgacattttggcatgtgctctgagcttgaattttgataccaaccattcagtgcatcatacctagtctttctatgctccaaatgaatgtctgtggggacctgagagcacctggaatttgttggaagcagatcagagcacacgtacgaaaaggtgcaattgcttttctcatgacaaaagaaaaaaaataatcacaaacacatcacactgtggatatcaccttgaccaatgacagaagcctgctgagtttggtctttctcacaggggtaggtagtccacatgaactggcgagcagtggtgaaaacatgac

SEQ ID NO: 382233 - DNA, 3438 bp, Homo sapiens
aagtgatgcttttattatttgttatctaccatggactgagcacttagtacaaactagtactttaccttatctttacttacctagtaagggcacaacctacacagtcccaggcatccacagttttactgcccttgtcagtgattacagagccatatttcctttgtcctgaggtttctgtagaccacggtctcttaaaagtcacagtgctgactgcagttaggccagaccccttccaagctccagttttccgagcttacacagaccaatctggagaatgcatgcctgaaaagactggaagtttatctctatcttttggtaacagtctgcgagtgatagggaaggttgcccaatcattggaaaacgatacattaacaagagttgatggttgctgtgattcgacatagtatgaactctactagaaatgtaatcagatcattgatcctgcaggattgattgctgatttattttgcagctgactcactttaggacagccttacaatatttcgcaactctgtctgggagcacacacagaactccgaatccagataagcagctcataaagggatacttagaagggtgttgactgcctgcttcattgttccttgttcactagcgcaccctagtgaccatctttgctgggtaatagtgacttgcaaaggtaaatatttactcccagatagcccacaggagaaagctacagatttctctggcgtagcacagaaacgaaatgaacctcaaaaaccacttactggtgcgggaactcagatcgtatcctacagctctaatgatgcaggagagagttgtctgaaaggaaaaaccaaaagcagctgcaccaaaccgaagggggcttggcacagagaagttggaattctaacgttaagaagtggcagcagctgtcgagcctcatggtctgctgcgctgtgttgctgattgggtttgagcttgtcgagaggagccacaggtcacatttcttgcccagctgcctttgccgtaagactcagtggcgctagatgtggttacaaccttggtctggtgggaaagtctgtaatcactcatcacctaatacgatagttaccaatccattgctagtatctgtcatcttagaaatggccactgcctgcttccttaggcaatagcgtttcccagagagagattgaggctgatgtccgttatttccaggagcttcctcacttctttaggacggtgggttgggcttgcaacctgttttgcatggctgcctccagcagtgtctgtaggaaggttagaataaataggctaattattcagaataaatgactggtcctttcaatggaacagccagtcaatgcaatcaggcaactggccaatttggtttgatggatttttactgtaatccttatttataaaataaagggattggcctcaaaggtcccttttagttctagtttatggtgactctaattactcagcctaactgaccctttggagtagcactatgtaaacaccattcctcagttagcattaaatcactattgcttgcatcaaaatcccagtaatgccattaaagctaattttactttcacacatccacttgtctcttagtaaatgtatgggtgcttaagatggaaatggttccaagaattccaaaccatagggggtgatatgattatatttgatttttattaaaataaatttagagaagtttaagaaaaaacaatgacaaccaggcctgatctgttgtcctgtagttcagagttattcatccttaacgctcaggtcaagcattagtaggtcaagttggccactggcgttttttatttctggtattaaggttagtggtcaagaatcgagggaagtaaagccttaagttaggcttttttgggtaagggatgggtaccccccttgccctctaaccccggtccaccttgtacacagcaaacctaacagctgagtgttaaacaatgatggatgacgtcttcactacatggaatggaatatgtgttctctgcaaagaccatatgctagatcatggttaaagtaacatttggttgttttcagggggaaacgctggcatcaattatcgggagtggtataagcccctagtgtggttttggatccttgttggccttgcctactttgcagctgtcctcagtatgatcggagattggctacgggttctgtccaaaaagacaaaagaagaggtaggaccccttcctaaccctatgaatgttcctgagaacagatgagcttgtgtccagaattgcctgtctctgtcctgtgggctggagtgtttctggctcggttttgcagggggagcggggggcgggtcataggcttcctcatgttgaatcagtccttcaaagctaaggagaatagaatacagttatttctggattctttttttggcaggtgagaaaatatggtgattcgtttaccagcccataaatcctggaaaaactagtaaacaacagctgattttaaaaaaatgaaaatgaaaataaataggagaggtagactatggctgagtgtgtgtgtgggggggtgcagcctgtccttccggtctcagggtctgtgcagaaaggcagttgaacgccaagaatctttcctgattcagtaagaaactgaaatcatcgaacattgaccagctacggggaagtgagcccaatgggcctctttcacttatcccctcttggttgtcacatccatagagacaaatatacatccctgaggaagggccgtgcatgtaactttacatgaagggaagtaaaggaagacatatgaaggaaagatagattttgtgattaaaaaataaatattcatgtagctctcttaggaagagaggaaaagaaaggaggaaggccaaggaaggagaaaaaaaagagctaaaagaaaggaagggagataagaaaaaccaaagaaatagagggccagcctctgtttgcttcattctgtataaaaggccccaggagaaagttgctgaatggagagatttcccacatcagtttcctgggcccatatgctaattttcctggtttatataagtaagccaggaaagtaagcaatgcaatttccagaccggttccccagacagctaactgacctgctgaaaatcagctataacaaaagagaagggaacaacatgaatattgactttcctggatgcacaaatttgagttcctcatttgcagagggaagcatgggacttatactgtctgccctgttcattaagagccaagaaatttggtgctgatcctcaggcaaaactccactctaaggaggcctgttctgtgggctttggcagaataggccgtcttcctgcaccctgactgggggaagtgggttaccaggtgccctggagcatcttcttaaaccagggaaagccccacagcacatgaccatagcatggcccagatagggtggccacccatcccagttttcccaggactgagggagttccta

SEQ ID NO: 382234 - DNA, 3060 bp, Homo sapiens
gagggtgggtcgaccccgggaattcggcgcgacccggcggcggggccacccgcgagtccagcgtcgccgcagccccccaatgcggccgcgagaagcagcgggggggcaggcgatcgaaggagccttcacgtaaatgggtccagtcatgcctcccagtaagaagccagaaagctcaggaattagtgtctccagtggactgagtcagtgttacgggggcagcggtttctccaaggcccttcaggaagacgatgacctcgacttttctctgcctgacatccgattagaagagggggccatggaagatgaagagctgaccaacctgaactggctgcacgagagcaagaacttgctgaagagctttggggagtcggtcctcaggagtgtcagccccgtccaggacctggacgatgacacccccccatcccctgcccactctgacatgccctacgatgccaggcagaaccccaactgcaaacccccctactccttcagctgcctcatatttatggccatcgaggactctccaaccaagcgcctgccagtgaaggatatctacaactggatcttggaacattttccgtattttgcaaatgcacctactgggtggaaaaactcagtgagacacaatttatcattgaataagtgttttaagaaagtggacaaagagaggagtcagagtattgggaaagggtcgttgtggtgcatagacccagagtatagacaaaatctaattcaggctttgaaaaagacaccttatcacccacacccacacgtgttcaatacacctcccacctgtcctcaggcatatcaaagcacatcaggtccacccatctggccgggcagtaccttcttcaagagaaatggagcccttctccaagatcctgacattgatgctgccagtgccatgatgcttttgaatactccccctgagatacaagcaggttttcctccaggagtgatccaaaatggagcgcgggtcctgagccgagggctgtttcctggcgtgcggccgctgccaatcactcccattggggtgacagcggccatgaggaatggcatcaccagctgccggatgcggactgagagtgagccatcttgtggctccccagtggtcagcggagaccccaaggaggatcacaactacagcagtgccaagtcctccaacgcccggagcacctcgcccaccagcgactccatctcctcctcctcctcctcagccgacgaccactatgagtttgccaccaaggggagccaggagggcagcgagggcagcgaggggagcttccggagccacgagagccccagcgacacggaagaggacgacaggaagcacagccagaaggagcccaaggattctctgggggacagcgggtacgcatcccagcacaagaagcgccagcacttcgccaaggccaggaaggtccccagcgacacactgcccctcaaaaagagacgcaccgaaaagccccccgagagcgatgatgaggagatgaaagaagcggcagggtccctcctgcacttagcagggatccggtcctgtttgaataacatcaccaatcggacggcaaaggggcagaaagagcaaaaggaaaccacaaaaaattaaaaacaagtcactgatttgttttgaacttacgaccatttggtttcagcatgtcaggagatttctaatgatttgtggcaatatcagcaattttttttcttttttcttgtttttggtttggttttctttcttttcttttccttttattttgttttaatttgccccctcttctttgttttggacccttaagaattttatttttaaaggagattgaagccatagaactcatattgacactcagctgttttacaaaagcttttcattatctgaagacaaaaccgaaaaagccaaaattaccattgcttcctccagcttgtcagaaacctgtggctgaatccgcagggatgtcaacgtcaatatcacaggaacacacattcggcacctagaaggcacgtgggcaaagtaatcatcgttcaggcccaacccttaggtttaaaaagtcaggttgtccatcccattgggttcactgagtgaaggcacataaagcaattgaggaggaggaggaacccctcgtccccctaggagcagacccaagcttgtggcaccaggcatctgatggtgccaggaaagccactggaattgtcacacggcgagcacagagggccggccaccagtcctcgatgcttctgaaccctgaagcccgatgacatcttacgaggtggacgttggactgttcatgcgcatcgggtgtcagtgactcatggagaagaaatggggtaaatttttagtgatgttgctaatcattgaattctgttctctattaaattaagaaaatgttccaaaagccataagcctgaagattggccctgtgcacgcacgcacacacacacacacacacacacacacacacacacacacacgaaggagagagagagaaaactgatggggaaaacaagctgtgtcttcttaactgcccaagtgaaaagcaaccaagtccaggaaattacaatagctgttaaggaaaggaaataatggtacagatctttttctgtctatcaaaactatttgatccaagtgaaaaaaaaaaaaaactagaaagctacggaacctgccattagtattgtggtgtatttttaagattaaaggtacactgatggacaaaaaaaaaaagtaaaacatggcaaaaaataaaataactcctatactgccctcaaaatggagtttgcaattaatatcaggatttatctttgcaaaaatcagtgatttccacattcagccagtatagccagcagaaatttctgatccacaatgcatggattcctttgaagaaaaaaaagaaaaagagaaaaaaatcacaaaaacaaactttttttattcaaaagtaacaaagttcttgtaaggtaaataatgtatttagcatgaagcatgaattattttcatataaatatagaaaatagagaaaaggctatgctgtaatttttaagcccttaggcttagagtttcttttggttttcttc

SEQ ID NO: 382235 - DNA, 2676 bp, Homo sapiens
  misc_feature (2637)..(2637): n is a, c, g, or t
  misc_feature (2649)..(2649): n is a, c, g, or t
gagggtgggtcgaccccgggaattcggcgcgacccggcggcggggccacccgcgagtccagcgtcgccgcagccccccaatgcggccgcgagaagcagcgggggggcaggcgatcgaaggagccttcacgtaaatgggtccagtcatgcctcccagtaagaagccagaaagctcaggaattagtgtctccagtggactgagtcagtgttacgggggcagcggtttctccaaggcccttcaggaagacgatgacctcgacttttctctgcctgacatccgattagaagagggggccatggaagatgaagagctgaccaacctgaactggctgcacgagagcaagaacttgctgaagagctttggggagtcggtcctcaggagtgtcagccccgtccaggacctggacgatgacacccccccatcccctgcccactctgacatgccctacgatgccaggcagaaccccaactgcaaacccccctactccttcagctgcctcatatttatggccatcgaggactctccaaccaagcgcctgccagtgaaggatatctacaactggatcttggaacattttccgtattttgcaaatgcacctactgggtggaaaaactcagtgagacacaatttatcattgaataagtgttttaagaaagtggacaaagagaggagtcagagtattgggaaagggtcgttgtggtgcatagacccagagtatagacaaaatctaattcaggctttgaaaaagacaccttatcacccacacccacacgtgttcaatacacctcccacctgtcctcaggcatatcaaagcacatcaggtccacccatctggccgggcagtaccttcttcaagagaaatggagcccttctccaagatcctgacattgatgctgccagtgccatgatgcttttgaatactccccctgagatacaagcaggttttcctccaggagtgatccaaaatggagcgcgggtcctgagccgagggctgtttcctggcgtgcggccgctgccaatcactcccattggggtgacagcggccatgaggaatggcatcaccagctgccggatgcggactgagagtgagccatcttgtggctccccagtggtcagcggagaccccaaggaggatcacaactacagcagtgccaagtcctccaacgcccggagcacctcgcccaccagcgactccatctcctcctcctcctcctcagccgacgaccactatgagtttgccaccaaggggagccaggagggcagcgagggcagcgaggggagcttccggagccacgagagccccagcgacacggaagaggacgacaggaagcacagccagaaggagcccaaggattctctgggggacagcgggtacgcatcccagcacaagaagcgccagcacttcgccaaggccaggaaggtccccagcgacacactgcccctcaaaaagagacgcaccgaaaagccccccgagagcgatgatgaggagatgaaagaagcggcagggtccctcctgcacttagcagggatccggtcctgtttgaataacatcaccaatcggacggcaaaggggcagaaagagcaaaaggaaaccacaaaaaattaaaaacaagtcactgatttgttttgaacttacgaccatttggtttcagcatgtcaggagatttctaatgatttgtggcaatatcagcaattttttttcttttttcttgtttttggtttggttttctttcttttcttttccttttattttgttttaatttgccccctcttctttgttttggacccttaagaattttatttttaaaggagattgaagccatagaactcatattgacactcagctgttttacaaaagcttttcattatctgaagacaaaaccgaaaaagccaaaattaccattgcttcctccagcttgtcagaaacctgtggctgaatccgcagggatgtcaacgtcaatatcacaggaacacacattcggcacctagaaggcacgtgggcaaagtaatcatcgttcaggcccaacccttaggtttaaaaagtcaggttgtccatcccattgggttcactgagtgaaggcacataaagcaattgaggaggaggaggaacccctcgtccccctaggagcagacccaagcttgtggcaccaggcatctgatggtgccaggaaagccactggaattgtcacacggcgagcacagagggccggccaccagtcctcgatgcttctgaaccctgaagcccgatgacatcttacgaggtggacgttggactgttcatgcgcatcgggtgtcagtgactcatggagaagaaatggggtaaatttttagtgatgttgctaatcattgaattctgttctctattaaattaagaaaatgttccaaaagccataagcctgaagattggccctgtgcacgcacgcacacacacacacacacacacacacacacacacacacacacgaaggagagagagagaaaactgatggggaaaacaagctgtgtcttcttaactgcccaagtgaaaagcaaccaagtccaggaaattacaatagctgttaaggaaaggaaataatggtacagatctttttctgtctatcaaaactatttgatccaagtgtgtgtgtgtgtgtgtgngtgtgtgtgagngtgtgtgtgtgtgtgtgcgcgtgcgct

SEQ ID NO: 382236 - DNA, 3196 bp, Homo sapiens
gcggccgccccccgccgcccgccgccccgggctcgccgcgccgcgcccgcgcgtccttagcggggccaccgagcgatgcccgccgggcgcccgcgaaagtttgtcggctcctgctgaagggcagcggcgcccccgcacccccgtgccccgctccggccaggagccttcacgtaaatgggtccagtcatgcctcccagtaagaagccagaaagctcaggaattagtgtctccagtggactgagtcagtgttacgggggcagcggtttctccaaggcccttcaggaagacgatgacctcgacttttctctgcctgacatccgattagaagagggggccatggaagatgaagagctgaccaacctgaactggctgcacgagagcaagaacttgctgaagagctttggggagtcggtcctcaggagtgtcagccccgtccaggacctggacgatgacacccccccatcccctgcccactctgacatgccctacgatgccaggcagaaccccaactgcaaacccccctactccttcagctgcctcatatttatggccatcgaggactctccaaccaagcgcctgccagtgaaggatatctacaactggatcttggaacattttccgtattttgcaaatgcacctactgggtggaaaaactcagtgagacacaatttatcattgaataagtgttttaagaaagtggacaaagagaggagtcagagtattgggaaagggtcgttgtggtgcatagacccagagtatagacaaaatctaattcaggctttgaaaaagacaccttatcacccacacccacacgtgttcaatacacctcccacctgtcctcaggcatatcaaagggaaggatgactaagagtttagtgctggaagagcagaagaggaaagctggaagatcagaaatgaaattggagctgttgatgcgtgtgtctctatgcacatcaggtccacccatctggccgggcagtaccttcttcaagagaaatggagcccttctccaagatcctgacattgatgctgccagtgccatgatgcttttgaatactccccctgagatacaagcaggttttcctccaggagtgatccaaaatggagcgcgggtcctgagccgagggctgtttcctggcgtgcggccgctgccaatcactcccattggggtgacagcggccatgaggaatggcatcaccagctgccggatgcggactgagagtgagccatcttgtggctccccagtggtcagcggagaccccaaggaggatcacaactacagcagtgccaagtcctccaacgcccggagcacctcgcccaccagcgactccatctcctcctcctcctcctcagccgacgaccactatgagtttgccaccaaggggagccaggagggcagcgagggcagcgaggggagcttccggagccacgagagccccagcgacacggaagaggacgacaggaagcacagccagaaggagcccaaggattctctgggggacagcgggtacgcatcccagcacaagaagcgccagcacttcgccaaggccaggaaggtccccagcgacacactgcccctcaaaaagagacgcaccgaaaagccccccgagagcgatgatgaggagatgaaagaagcggcagggtccctcctgcacttagcagggatccggtcctgtttgaataacatcaccaatcggacggcaaaggggcagaaagagcaaaaggaaaccacaaaaaattaaaaacaagtcactgatttgttttgaacttacgaccatttggtttcagcatgtcaggagatttctaatgatttgtggcaatatcagcaattttttttcttttttcttgtttttggtttggttttctttcttttcttttccttttattttgttttaatttgccccctcttctttgttttggacccttaagaattttatttttaaaggagattgaagccatagaactcatattgacactcagctgttttacaaaagcttttcattatctgaagacaaaaccgaaaaagccaaaattaccattgcttcctccagcttgtcagaaacctgtggctgaatccgcagggatgtcaacgtcaatatcacaggaacacacattcggcacctagaaggcacgtgggcaaagtaatcatcgttcaggcccaacccttaggtttaaaaagtcaggttgtccatcccattgggttcactgagtgaaggcacataaagcaattgaggaggaggaggaacccctcgtccccctaggagcagacccaagcttgtggcaccaggcatctgatggtgccaggaaagccactggaattgtcacacggcgagcacagagggccggccaccagtcctcgatgcttctgaaccctgaagcccgatgacatcttacgaggtggacgttggactgttcatgcgcatcgggtgtcagtgactcatggagaagaaatggggtaaatttttagtgatgttgctaatcattgaattctgttctctattaaattaagaaaatgttccaaaagccataagcctgaagattggccctgtgcacgcacgcacacacacacacacacacacacacacacacacacacacacgaaggagagagagagaaaactgatggggaaaacaagctgtgtcttcttaactgcccaagtgaaaagcaaccaagtccaggaaattacaatagctgttaaggaaaggaaataatggtacagatctttttctgtctatcaaaactatttgatccaagtgaaaaaaaaaaaaaactagaaagctacggaacctgccattagtattgtggtgtatttttaagattaaaggtacactgatggacaaaaaaaaaaagtaaaacatggcaaaaaataaaataactcctatactgccctcaaaatggagtttgcaattaatatcaggatttatctttgcaaaaatcagtgatttccacattcagccagtatagccagcagaaatttctgatccacaatgcatggattcctttgaagaaaaaaaagaaaaagagaaaaaaatcacaaaaacaaactttttttattcaaaagtaacaaagttcttgtaaggtaaataatgtatttagcatgaagcatgaattattttcatataaatatagaaaatagagaaaaggctatgctgtaatttttaagcccttaggcttagagtttcttttggttttcttc

SEQ ID NO: 382237 - DNA, 3096 bp, Homo sapiens
cgggggttgcggcattccccttctgcacgatggcaaaatctgggcaaagttgaaagttgcaagattccagtcaaacaattgtccttgcttgggtaaatatcctcaaatgaaaaaaaatcagcctctagaagaccagcattctcgtgattatggaggcccctctgtcttttctgtgacgggagcaatgctgacctcggtttcctggacccattccgactcaggagccttcacgtaaatgggtccagtcatgcctcccagtaagaagccagaaagctcaggaattagtgtctccagtggactgagtcagtgttacgggggcagcggtttctccaaggcccttcaggaagacgatgacctcgacttttctctgcctgacatccgattagaagagggggccatggaagatgaagagctgaccaacctgaactggctgcacgagagcaagaacttgctgaagagctttggggagtcggtcctcaggagtgtcagccccgtccaggacctggacgatgacacccccccatcccctgcccactctgacatgccctacgatgccaggcagaaccccaactgcaaacccccctactccttcagctgcctcatatttatggccatcgaggactctccaaccaagcgcctgccagtgaaggatatctacaactggatcttggaacattttccgtattttgcaaatgcacctactgggtggaaaaactcagtgagacacaatttatcattgaataagtgttttaagaaagtggacaaagagaggagtcagagtattgggaaagggtcgttgtggtgcatagacccagagtatagacaaaatctaattcaggctttgaaaaagacaccttatcacccacacccacacgtgttcaatacacctcccacctgtcctcaggcatatcaaagcacatcaggtccacccatctggccgggcagtaccttcttcaagagaaatggagcccttctccaagttcctccaggagtgatccaaaatggagcgcgggtcctgagccgagggctgtttcctggcgtgcggccgctgccaatcactcccattggggtgacagcggccatgaggaatggcatcaccagctgccggatgcggactgagagtgagccatcttgtggctccccagtggtcagcggagaccccaaggaggatcacaactacagcagtgccaagtcctccaacgcccggagcacctcgcccaccagcgactccatctcctcctcctcctcctcagccgacgaccactatgagtttgccaccaaggggagccaggagggcagcgagggcagcgaggggagcttccggagccacgagagccccagcgacacggaagaggacgacaggaagcacagccagaaggagcccaaggattctctgggggacagcgggtacgcatcccagcacaagaagcgccagcacttcgccaaggccaggaaggtccccagcgacacactgcccctcaaaaagagacgcaccgaaaagccccccgagagcgatgatgaggagatgaaagaagcggcagggtccctcctgcacttagcagggatccggtcctgtttgaataacatcaccaatcggacggcaaaggggcagaaagagcaaaaggaaaccacaaaaaattaaaaacaagtcactgatttgttttgaacttacgaccatttggtttcagcatgtcaggagatttctaatgatttgtggcaatatcagcaattttttttcttttttcttgtttttggtttggttttctttcttttcttttccttttattttgttttaatttgccccctcttctttgttttggacccttaagaattttatttttaaaggagattgaagccatagaactcatattgacactcagctgttttacaaaagcttttcattatctgaagacaaaaccgaaaaagccaaaattaccattgcttcctccagcttgtcagaaacctgtggctgaatccgcagggatgtcaacgtcaatatcacaggaacacacattcggcacctagaaggcacgtgggcaaagtaatcatcgttcaggcccaacccttaggtttaaaaagtcaggttgtccatcccattgggttcactgagtgaaggcacataaagcaattgaggaggaggaggaacccctcgtccccctaggagcagacccaagcttgtggcaccaggcatctgatggtgccaggaaagccactggaattgtcacacggcgagcacagagggccggccaccagtcctcgatgcttctgaaccctgaagcccgatgacatcttacgaggtggacgttggactgttcatgcgcatcgggtgtcagtgactcatggagaagaaatggggtaaatttttagtgatgttgctaatcattgaattctgttctctattaaattaagaaaatgttccaaaagccataagcctgaagattggccctgtgcacgcacgcacacacacacacacacacacacacacacacacacacacacgaaggagagagagagaaaactgatggggaaaacaagctgtgtcttcttaactgcccaagtgaaaagcaaccaagtccaggaaattacaatagctgttaaggaaaggaaataatggtacagatctttttctgtctatcaaaactatttgatccaagtgaaaaaaaaaaaaaactagaaagctacggaacctgccattagtattgtggtgtatttttaagattaaaggtacactgatggacaaaaaaaaaaagtaaaacatggcaaaaaataaaataactcctatactgccctcaaaatggagtttgcaattaatatcaggatttatctttgcaaaaatcagtgatttccacattcagccagtatagccagcagaaatttctgatccacaatgcatggattcctttgaagaaaaaaaagaaaaagagaaaaaaatcacaaaaacaaactttttttattcaaaagtaacaaagttcttgtaaggtaaataatgtatttagcatgaagcatgaattattttcatataaatatagaaaatagagaaaaggctatgctgtaatttttaagcccttaggcttagagtttcttttggttttcttc

SEQ ID NO: 382238 - DNA, 3034 bp, Homo sapiens
gtagcttgcaggtttctgatatcgcatcagtggacaggcggcatgcactatattaacagcctctagaagaccagcattctcgtgattatggaggcccctctgtcttttctgtgacgggagcaatgctgacctcggtttcctggacccattccgactcaggagccttcacgtaaatgggtccagtcatgcctcccagtaagaagccagaaagctcaggaattagtgtctccagtggactgagtcagtgttacgggggcagcggtttctccaaggcccttcaggaagacgatgacctcgacttttctctgcctgacatccgattagaagagggggccatggaagatgaagagctgaccaacctgaactggctgcacgagagcaagaacttgctgaagagctttggggagtcggtcctcaggagtgtcagccccgtccaggacctggacgatgacacccccccatcccctgcccactctgacatgccctacgatgccaggcagaaccccaactgcaaacccccctactccttcagctgcctcatatttatggccatcgaggactctccaaccaagcgcctgccagtgaaggatatctacaactggatcttggaacattttccgtattttgcaaatgcacctactgggtggaaaaactcagtgagacacaatttatcattgaataagtgttttaagaaagtggacaaagagaggagtcagagtattgggaaagggtcgttgtggtgcatagacccagagtatagacaaaatctaattcaggctttgaaaaagacaccttatcacccacacccacacgtgttcaatacacctcccacctgtcctcaggcatatcaaagcacatcaggtccacccatctggccgggcagtaccttcttcaagagaaatggagcccttctccaagttcctccaggagtgatccaaaatggagcgcgggtcctgagccgagggctgtttcctggcgtgcggccgctgccaatcactcccattggggtgacagcggccatgaggaatggcatcaccagctgccggatgcggactgagagtgagccatcttgtggctccccagtggtcagcggagaccccaaggaggatcacaactacagcagtgccaagtcctccaacgcccggagcacctcgcccaccagcgactccatctcctcctcctcctcctcagccgacgaccactatgagtttgccaccaaggggagccaggagggcagcgagggcagcgaggggagcttccggagccacgagagccccagcgacacggaagaggacgacaggaagcacagccagaaggagcccaaggattctctgggggacagcgggtacgcatcccagcacaagaagcgccagcacttcgccaaggccaggaaggtccccagcgacacactgcccctcaaaaagagacgcaccgaaaagccccccgagagcgatgatgaggagatgaaagaagcggcagggtccctcctgcacttagcagggatccggtcctgtttgaataacatcaccaatcggacggcaaaggggcagaaagagcaaaaggaaaccacaaaaaattaaaaacaagtcactgatttgttttgaacttacgaccatttggtttcagcatgtcaggagatttctaatgatttgtggcaatatcagcaattttttttcttttttcttgtttttggtttggttttctttcttttcttttccttttattttgttttaatttgccccctcttctttgttttggacccttaagaattttatttttaaaggagattgaagccatagaactcatattgacactcagctgttttacaaaagcttttcattatctgaagacaaaaccgaaaaagccaaaattaccattgcttcctccagcttgtcagaaacctgtggctgaatccgcagggatgtcaacgtcaatatcacaggaacacacattcggcacctagaaggcacgtgggcaaagtaatcatcgttcaggcccaacccttaggtttaaaaagtcaggttgtccatcccattgggttcactgagtgaaggcacataaagcaattgaggaggaggaggaacccctcgtccccctaggagcagacccaagcttgtggcaccaggcatctgatggtgccaggaaagccactggaattgtcacacggcgagcacagagggccggccaccagtcctcgatgcttctgaaccctgaagcccgatgacatcttacgaggtggacgttggactgttcatgcgcatcgggtgtcagtgactcatggagaagaaatggggtaaatttttagtgatgttgctaatcattgaattctgttctctattaaattaagaaaatgttccaaaagccataagcctgaagattggccctgtgcacgcacgcacacacacacacacacacacacacacacacacacacacacgaaggagagagagagaaaactgatggggaaaacaagctgtgtcttcttaactgcccaagtgaaaagcaaccaagtccaggaaattacaatagctgttaaggaaaggaaataatggtacagatctttttctgtctatcaaaactatttgatccaagtgaaaaaaaaaaaaaactagaaagctacggaacctgccattagtattgtggtgtatttttaagattaaaggtacactgatggacaaaaaaaaaaagtaaaacatggcaaaaaataaaataactcctatactgccctcaaaatggagtttgcaattaatatcaggatttatctttgcaaaaatcagtgatttccacattcagccagtatagccagcagaaatttctgatccacaatgcatggattcctttgaagaaaaaaaagaaaaagagaaaaaaatcacaaaaacaaactttttttattcaaaagtaacaaagttcttgtaaggtaaataatgtatttagcatgaagcatgaattattttcatataaatatagaaaatagagaaaaggctatgctgtaatttttaagcccttaggcttagagtttcttttggttttcttc

SEQ ID NO: 382239 - DNA, 1885 bp, Homo sapiens
gcggccgccccccgccgcccgccgccccgggctcgccgcgccgcgcccgcgcgtccttagcggggccaccgagcgatgcccgccgggcgcccgcgaaagtttgtcggctcctgctgaagggcagcggcgcccccgcacccccgtgccccgctccggccaggagccttcacgtaaatgggtccagtcatgcctcccagtaagaagccagaaagctcaggaattagtgtctccagtggactgagtcagtgttacgggggcagcggtttctccaaggcccttcaggaagacgatgacctcgacttttctctgcctgacatccgattagaagagggggccatggaagatgaagagctgaccaacctgaactggctgcacgagagcaagaacttgctgaagagctttggggagtcggtcctcaggagtgtcagccccgtccaggacctggacgatgacacccccccatcccctgcccactctgacatgccctacgatgccaggcagaaccccaactgcaaacccccctactccttcagctgcctcatatttatggccatcgaggactctccaaccaagcgcctgccagtgaaggatatctacaactggatcttggaacattttccgtattttgcaaatgcacctactgggtggaaaaactcagtgagacacaatttatcattgaataagtgttttaagaaagtggacaaagagaggagtcagagtattgggaaagggtcgttgtggtgcatagacccagagtatagacaaaatctaattcaggctttgaaaaagacaccttatcacccacacccacacgtgttcaatacacctcccacctgtcctcaggcatatcaaagcacatcaggtccacccatctggccgggcagtaccttcttcaagagaaatggagcccttctccaagttcctccaggagtgatccaaaatggagcgcgggtcctgagccgagggctgtttcctggcgtgcggccgctgccaatcactcccattggggtgacagcggccatgaggaatggcatcaccagctgccggatgcggactgagagtgagccatcttgtggctccccagtggtcagcggagaccccaaggaggatcacaactacagcagtgccaagtcctccaacgcccggagcacctcgcccaccagcgactccatctcctcctcctcctcctcagccgacgaccactatgagtttgccaccaaggggagccaggagggcagcgagggcagcgaggggagcttccggagccacgagagccccagcgacacggaagaggacgacaggaagcacagccagaaggagcccaaggattctctgggggacagcgggtacgcatcccagcacaagaagcgccagcacttcgccaaggccaggaaggtccccagcgacacactgcccctcaaaaagagacgcaccgaaaagccccccgagagcgatgatgaggagatgaaagaagcggcagggtccctcctgcacttagcagggatccggtcctgtttgaataacatcaccaatcggacggcaaaggggcagaaagagcaaaaggaaaccacaaaaaattaaaaacaagtcactgatttgttttgaacttacgaccatttggtttcagcatgtcaggagatttctaatgatttgtggcaatatcagcaattttttttcttttttcttgtttttggtgacatagctgagtcttttggcaaatctaaggtcatgaagatttatccctgtgttttcttttaagagttttatagttttagctattatatcaaggtacttgatctatttcaagttgatttttatatatggtgtgaggtaaaggtccaacttcatttttttcatagtggatatcttttgcttgtgacatgga

SEQ ID NO: 382240 - DNA, 2501 bp, Homo sapiens
taaatatttgctctgaataaaactgaactgtgagatatctataagtggcatgttgggcttctcctcttgaatcgaggacattttccgtattttgcaaatgcacctactgggtggaaaaactcagtgagacacaatttatcattgaataagtgttttaagaaagtggacaaagagaggagtcagagtattgggaaagggtcgttgtggtgcatagacccagagtatagacaaaatctaattcaggctttgaaaaagacaccttatcacccacacccacacgtgttcaatacacctcccacctgtcctcaggcatatcaaagcacatcaggtccacccatctggccgggcagtaccttcttcaagagaaatggagcccttctccaagttcctccaggagtgatccaaaatggagcgcgggtcctgagccgagggctgtttcctggcgtgcggccgctgccaatcactcccattggggtgacagcggccatgaggaatggcatcaccagctgccggatgcggactgagagtgagccatcttgtggctccccagtggtcagcggagaccccaaggaggatcacaactacagcagtgccaagtcctccaacgcccggagcacctcgcccaccagcgactccatctcctcctcctcctcctcagccgacgaccactatgagtttgccaccaaggggagccaggagggcagcgagggcagcgaggggagcttccggagccacgagagccccagcgacacggaagaggacgacaggaagcacagccagaaggagcccaaggattctctgggggacagcgggtacgcatcccagcacaagaagcgccagcacttcgccaaggccaggaaggtccccagcgacacactgcccctcaaaaagagacgcaccgaaaagccccccgagagcgatgatgaggagatgaaagaagcggcagggtccctcctgcacttagcagggatccggtcctgtttgaataacatcaccaatcggacggcaaaggggcagaaagagcaaaaggaaaccacaaaaaattaaaaacaagtcactgatttgttttgaacttacgaccatttggtttcagcatgtcaggagatttctaatgatttgtggcaatatcagcaattttttttcttttttcttgtttttggtttggttttctttcttttcttttccttttattttgttttaatttgccccctcttctttgttttggacccttaagaattttatttttaaaggagattgaagccatagaactcatattgacactcagctgttttacaaaagcttttcattatctgaagacaaaaccgaaaaagccaaaattaccattgcttcctccagcttgtcagaaacctgtggctgaatccgcagggatgtcaacgtcaatatcacaggaacacacattcggcacctagaaggcacgtgggcaaagtaatcatcgttcaggcccaacccttaggtttaaaaagtcaggttgtccatcccattgggttcactgagtgaaggcacataaagcaattgaggaggaggaggaacccctcgtccccctaggagcagacccaagcttgtggcaccaggcatctgatggtgccaggaaagccactggaattgtcacacggcgagcacagagggccggccaccagtcctcgatgcttctgaaccctgaagcccgatgacatcttacgaggtggacgttggactgttcatgcgcatcgggtgtcagtgactcatggagaagaaatggggtaaatttttagtgatgttgctaatcattgaattctgttctctattaaattaagaaaatgttccaaaagccataagcctgaagattggccctgtgcacgcacgcacacacacacacacacacacacacacacacacacacacacgaaggagagagagagaaaactgatggggaaaacaagctgtgtcttcttaactgcccaagtgaaaagcaaccaagtccaggaaattacaatagctgttaaggaaaggaaataatggtacagatctttttctgtctatcaaaactatttgatccaagtgaaaaaaaaaaaaaactagaaagctacggaacctgccattagtattgtggtgtatttttaagattaaaggtacactgatggacaaaaaaaaaaagtaaaacatggcaaaaaataaaataactcctatactgccctcaaaatggagtttgcaattaatatcaggatttatctttgcaaaaatcagtgatttccacattcagccagtatagccagcagaaatttctgatccacaatgcatggattcctttgaagaaaaaaaagaaaaagagaaaaaaatcacaaaaacaaactttttttattcaaaagtaacaaagttcttgtaaggtaaataatgtatttagcatgaagcatgaattattttcatataaatatagaaaatagagaaaaggctatgctgtaatttttaagcccttaggcttagagtttcttttggttttcttc

SEQ ID NO: 382241 - DNA, 2624 bp, Homo sapiens
tggaggctcctggaggctgcccaggaatgcagttcagtcctcggaatttctaattcttcttcgccctgaggaagctcacaaaggtggacaagcaggccccttctcacccgaaatgtaggaagccatcagcaacctgcaccctgggcgatctcccaggagaacctgcccctggcctttgtggtgacctttgctgtgggaaaggggaggcaggaggccatggggtctggccttggaaccacagcccgtggtctgcacctgcccacccagggactagtgctcttcccactggaggccgacttcaggaccacccgacacagcctcgccagcttcccttccaccctcggcctcccatcctcatagatctagcatacagtggctcaactcaacttgtgcctcagtcacaagcctcacggtcattgagattgcaggaaataacagaccaatcctgacattgatgctgccagtgccatgatgcttttgaatactccccctgagatacaagcaggttttcctccaggagtgatccaaaatggagcgcgggtcctgagccgagggctgtttcctggcgtgcggccgctgccaatcactcccattggggtgacagcggccatgaggaatggcatcaccagctgccggatgcggactgagagtgagccatcttgtggctccccagtggtcagcggagaccccaaggaggatcacaactacagcagtgccaagtcctccaacgcccggagcacctcgcccaccagcgactccatctcctcctcctcctcctcagccgacgaccactatgagtttgccaccaaggggagccaggagggcagcgagggcagcgaggggagcttccggagccacgagagccccagcgacacggaagaggacgacaggaagcacagccagaaggagcccaaggattctctgggggacagcgggtacgcatcccagcacaagaagcgccagcacttcgccaaggccaggaaggtccccagcgacacactgcccctcaaaaagagacgcaccgaaaagccccccgagagcgatgatgaggagatgaaagaagcggcagggtccctcctgcacttagcagggatccggtcctgtttgaataacatcaccaatcggacggcaaaggggcagaaagagcaaaaggaaaccacaaaaaattaaaaacaagtcactgatttgttttgaacttacgaccatttggtttcagcatgtcaggagatttctaatgatttgtggcaatatcagcaattttttttcttttttcttgtttttggtttggttttctttcttttcttttccttttattttgttttaatttgccccctcttctttgttttggacccttaagaattttatttttaaaggagattgaagccatagaactcatattgacactcagctgttttacaaaagcttttcattatctgaagacaaaaccgaaaaagccaaaattaccattgcttcctccagcttgtcagaaacctgtggctgaatccgcagggatgtcaacgtcaatatcacaggaacacacattcggcacctagaaggcacgtgggcaaagtaatcatcgttcaggcccaacccttaggtttaaaaagtcaggttgtccatcccattgggttcactgagtgaaggcacataaagcaattgaggaggaggaggaacccctcgtccccctaggagcagacccaagcttgtggcaccaggcatctgatggtgccaggaaagccactggaattgtcacacggcgagcacagagggccggccaccagtcctcgatgcttctgaaccctgaagcccgatgacatcttacgaggtggacgttggactgttcatgcgcatcgggtgtcagtgactcatggagaagaaatggggtaaatttttagtgatgttgctaatcattgaattctgttctctattaaattaagaaaatgttccaaaagccataagcctgaagattggccctgtgcacgcacgcacacacacacacacacacacacacacacacacacacacacgaaggagagagagagaaaactgatggggaaaacaagctgtgtcttcttaactgcccaagtgaaaagcaaccaagtccaggaaattacaatagctgttaaggaaaggaaataatggtacagatctttttctgtctatcaaaactatttgatccaagtgaaaaaaaaaaaaaactagaaagctacggaacctgccattagtattgtggtgtatttttaagattaaaggtacactgatggacaaaaaaaaaaagtaaaacatggcaaaaaataaaataactcctatactgccctcaaaatggagtttgcaattaatatcaggatttatctttgcaaaaatcagtgatttccacattcagccagtatagccagcagaaatttctgatccacaatgcatggattcctttgaagaaaaaaaagaaaaagagaaaaaaatcacaaaaacaaactttttttattcaaaagtaacaaagttcttgtaaggtaaataatgtatttagcatgaagcatgaattattttcatataaatatagaaaatagagaaaaggctatgctgtaatttttaagcccttaggcttagagtttcttttggttttcttc

SEQ ID NO: 382242 - DNA, 1560 bp, Homo sapiens
gcggccgccccccgccgcccgccgccccgggctcgccgcgccgcgcccgcgcgtccttagcggggccaccgagcgatgcccgccgggcgcccgcgaaagtttgtcggctcctgctgaagggcagcggcgcccccgcacccccgtgccccgctccggccaggagccttcacgtaaatgggtccagtcatgcctcccagtaagaagccagaaagctcaggaattagtgtctccagtggactgagtcagtgttacgggggcagcggtttctccaaggcccttcaggaagacgatgacctcgacttttctctgcctgacatccgattagaagagggggccatggaagatgaagagctgaccaacctgaactggctgcacgagagcaagaacttgctgaagagctttggggagtcggtcctcaggagtgtcagccccgtccaggacctggacgatgacacccccccatcccctgcccactctgacatgccctacgatgccaggcagaaccccaactgcaaacccccctactccttcagctgcctcatatttatggccatcgaggactctccaaccaagcgcctgccagtgaaggatatctacaactggatcttggaacattttccgtattttgcaaatgcacctactgggtggaaaaactcagtgagacacaatttatcattgaataagtgttttaagaaagtggacaaagagaggagtcagagtattgggaaagggtcgttgtggtgcatagacccagagtatagacaaaatctaattcaggctttgaaaaagacaccttatcacccacacccacacgtgttcaatacacctcccacctgtcctcaggcatatcaaagcacatcaggtccacccatctggccgggcagtaccttcttcaagagaaatggagcccttctccaagatcctgacattgatgctgccagtgccatgatgcttttgaatactccccctgagatacaagcaggttttcctccaggagtgatccaaaatggagcgcgggtcctgagccgagggctgtttcctggcgtgcggccgctgccaatcactcccattggggtgacagcggccatgagacaaagtgtgtataccatgattcatctttgtgactctagcagccaaacatacattgtgccagaactttcagctacaagcattttcctccaccttcctcttttgggagaaagacgcaacagttctgtggagagcatcataattcagaggacatgcaggaacctcagccaacaacacaaacttcaggaccaagcatgatgttaacattttcaatagcagggcttgtagggggcaggaagaagaggagacaagaagtcaagactcctaatctcagctccgcatgaatggaaaaacctctttatgcttctgttattttcttccataaaagtagattggggaaagagtatagttgttcttcaaaaagtaaatataaaactaccatataacctagcaattccactcctaggtatatacacaaaagaattgaaaactgatacttaaacaaacatatatacatgcatgttcatagca

SEQ ID NO: 382243 - DNA, 1060 bp, Homo sapiens
gcggccgccccccgccgcccgccgccccgggctcgccgcgccgcgcccgcgcgtccttagcggggccaccgagcgatgcccgccgggcgcccgcgaaagtttgtcggctcctgctgaagggcagcggcgcccccgcacccccgtgccccgctccggccaggagccttcacgtaaatgggtccagtcatgcctcccagtaagaagccagaaagctcaggaattagtgtctccagtggactgagtcagtgttacgggggcagcggtttctccaaggcccttcaggaagacgatgacctcgacttttctctgcctgacatccgattagaagagggggccatggaagatgaagagctgaccaacctgaactggctgcacgagagcaagaacttgctgaagagctttggggagtcggtcctcaggagtgtcagccccgtccaggacctggacgatgacacccccccatcccctgcccactctgacatgccctacgatgccaggcagaaccccaactgcaaacccccctactccttcagctgcctcatatttatggccatcgaggactctccaaccaagcgcctgccagtgaaggatatctacaactggatcttggaacattttccgtattttgcaaatgcacctactgggtggaaaaactcagtgagacacaatttatcattgaataagtgttttaagaaagtggacaaagagaggagtcagagtattgggaaagggtcgttgtggtgcatagacccagagtatagacaaaatctaattcaggctttgaaaaagacaccttatcacccacacccacacgtgttcaatacacctcccacctgtcctcaggcatatcaaagcacatcaggtccacccatctggccgggcagtaccttcttcaagagaaatggagcccttctccaagaaaaatgaaaaccttcatctccattgagaaacaaggctgaacactgtaaggagggttacagaatttaaagcagatgtgacctctactatccaagaatgtttgtttatctatttatttaataaagagtgtgtggcgcctgtc

SEQ ID NO: 382244 - DNA, 1427 bp, Homo sapiens
gcggccgccccccgccgcccgccgccccgggctcgccgcgccgcgcccgcgcgtccttagcggggccaccgagcgatgcccgccgggcgcccgcgaaagtttgtcggctcctgctgaagggcagcggcgcccccgcacccccgtgccccgctccggccaggagccttcacgtaaatgggtccagtcatgcctcccagtaagaagccagaaagctcaggaattagtgtctccagtggactgagtcagtgttacgggggcagcggtttctccaaggcccttcaggaagacgatgacctcgacttttctctgcctgacatccgattagaagagggggccatggaagatgaagagctgaccaacctgaactggctgcacgagagcaagaacttgctgaagagctttggggagtcggtcctcaggagtgtcagccccgtccaggacctggacgatgacacccccccatcccctgcccactctgacatgccctacgatgccaggcagaaccccaactgcaaacccccctactccttcagctgcctcatatttatggccatcgaggactctccaaccaagcgcctgccagtgaaggatatctacaactggatcttggaacattttccgtattttgcaaatgcacctactgggtggaaaaactcagtgagacacaatttatcattgaataagtgttttaagaaagtggacaaagagaggagtcagagtattgggaaagggtcgttgtggtgcatagacccagagtatagacaaaatctaattcaggctttgaaaaagacaccacatcaggtccacccatctggccgggcagtaccttcttcaagagaaatggagcccttctccaagatggagtcttactcttgttgcccaggctggaatgcaatggcgtgatctcggctcactgcaacctctacagtatcctgggttcaagcaagattctcctgcctcagcctcccaagtagctgggactgcaggtgcctgccaccatgcctgactgatttttgtattttttagtagagacagggtttcaccatgttgatcaggctggtctcaaactcctgacttcaggcgatccccccacctcggcctcccaaagtgctgggattacaggcgtgaggcaccaccctggcaattacatggtaaattgtttgggaaaattcactgagctgtacacatacaagggctttgctggacatacgttattccaatagaaagtttcaaaactgattgggcagctgcaatttcattacacctatttgatttcagatttttattatgtacatgtagtgagcctcagaattcttacatggttaaaaaacaaagtaacaagaatttttatcacaattcaagcatattttataaagtctctccaaacctgcttgttattgatgttgttaatacaatatttagattcc

SEQ ID NO: 382245 - DNA, 335 bp, Homo sapiens
gagggtgggtcgaccccgggaattcggcgcgacccggcggcggggccacccgcgagtccagcgtcgccgcagccccccaatgcggccgcgagaagcagcgggggggcaggcgatcgaaggtaacgaaaatggggctcatttcctgcctcctaatctgctcgggtttagcattgtcacgagaagccctccgtgttcaggctgctgcattttggggcactctttgattttttttaaaggtgtccgcccccctatttccacctggtttcagattgatttatagcttgcagcccaaatgggaaagatccagccatggcaagttgcttattttcattagt

SEQ ID NO: 382246 - DNA, 677 bp, Homo sapiens
cacctcagggatctttggaaacgtctcttccccagcaaccagcgccgcacccggcccacctctcaccctcgactgcccagtgggagaattgctataaattccaaatcagatgctttctgaaagggacctaccaggggcttctggcaactttaagaaggaaagtctgagcaattggaggctcctggaggctgcccaggaatgcagttcagtcctcggaatttctaattcttcttcgccctgaggaagctcacaaaggtggacaagcaggccccttctcacccgaaatgtaggaagccatcagcaacctgcaccctgggcgatctcccaggagaacctgcccctggcctttgtggtgacctttgctgtgggaaaggggaggcaggaggccatggggtctggccttggaaccacagcccgtggtctgcacctgcccacccagggactagtgctcttcccactggaggccgacttcaggaccacccgacacagcctcgccagcttcccttccaccctcggcctcccatcctcatagatctagcatacagtggctcaactcaacttgtgcctcagtcacaagcctcacggtcattgagattgcaggaaataacagaccagtaagtaaatctggctctccagttcacattttttaaaaaccaagcccaggccagttgcggtgg

SEQ ID NO: 382247 - DNA, 178 bp, Homo sapiens
gtatagacaaaatctaattcaggctttgaaaaagacaccttatcacccacacccacacgtgttcaatacacctcccacctgtcctcaggcatatcaaaggtaagcaattcagacttcttttttttggtctactgaaatggcattattttggcagagacctgcgcggaaattaatttaa

SEQ ID NO: 382248 - DNA, 3035 bp, Homo sapiens
gcggccgccccccgccgcccgccgccccgggctcgccgcgccgcgcccgcgcgtccttagcggggccaccgagcgatgcccgccgggcgcccgcgaaagtttgtcggctcctgctgaagggcagcggcgcccccgcacccccgtgccccgctccggccaggagccttcacgtaaatgggtccagtcatgcctcccagtaagaagccagaaagctcaggaattagtgtctccagtggactgagtcagtgttacgggggcagcggtttctccaaggcccttcaggaagacgatgacctcgacttttctctgcctgacatccgattagaagagggggccatggaagatgaagagctgaccaacctgaactggctgcacgagagcaagaacttgctgaagagctttggggagtcggtcctcaggagtgtcagccccgtccaggacctggacgatgacacccccccatcccctgcccactctgacatgccctacgatgccaggcagaaccccaactgcaaacccccctactccttcagctgcctcatatttatggccatcgaggactctccaaccaagcgcctgccagtgaaggatatctacaactggatcttggaacattttccgtattttgcaaatgcacctactgggtggaaaaactcagtgagacacaatttatcattgaataagtgttttaagaaagtggacaaagagaggagtcagagtattgggaaagggtcgttgtggtgcatagacccagagtatagacaaaatctaattcaggctttgaaaaagacaccttatcacccacacccacacgtgttcaatacacctcccacctgtcctcaggcatatcaaagcacatcaggtccacccatctggccgggcagtaccttcttcaagagaaatggagcccttctccaagttcctccaggagtgatccaaaatggagcgcgggtcctgagccgagggctgtttcctggcgtgcggccgctgccaatcactcccattggggtgacagcggccatgaggaatggcatcaccagctgccggatgcggactgagagtgagccatcttgtggctccccagtggtcagcggagaccccaaggaggatcacaactacagcagtgccaagtcctccaacgcccggagcacctcgcccaccagcgactccatctcctcctcctcctcctcagccgacgaccactatgagtttgccaccaaggggagccaggagggcagcgagggcagcgaggggagcttccggagccacgagagccccagcgacacggaagaggacgacaggaagcacagccagaaggagcccaaggattctctgggggacagcgggtacgcatcccagcacaagaagcgccagcacttcgccaaggccaggaaggtccccagcgacacactgcccctcaaaaagagacgcaccgaaaagccccccgagagcgatgatgaggagatgaaagaagcggcagggtccctcctgcacttagcagggatccggtcctgtttgaataacatcaccaatcggacggcaaaggggcagaaagagcaaaaggaaaccacaaaaaattaaaaacaagtcactgatttgttttgaacttacgaccatttggtttcagcatgtcaggagatttctaatgatttgtggcaatatcagcaattttttttcttttttcttgtttttggtttggttttctttcttttcttttccttttattttgttttaatttgccccctcttctttgttttggacccttaagaattttatttttaaaggagattgaagccatagaactcatattgacactcagctgttttacaaaagcttttcattatctgaagacaaaaccgaaaaagccaaaattaccattgcttcctccagcttgtcagaaacctgtggctgaatccgcagggatgtcaacgtcaatatcacaggaacacacattcggcacctagaaggcacgtgggcaaagtaatcatcgttcaggcccaacccttaggtttaaaaagtcaggttgtccatcccattgggttcactgagtgaaggcacataaagcaattgaggaggaggaggaacccctcgtccccctaggagcagacccaagcttgtggcaccaggcatctgatggtgccaggaaagccactggaattgtcacacggcgagcacagagggccggccaccagtcctcgatgcttctgaaccctgaagcccgatgacatcttacgaggtggacgttggactgttcatgcgcatcgggtgtcagtgactcatggagaagaaatggggtaaatttttagtgatgttgctaatcattgaattctgttctctattaaattaagaaaatgttccaaaagccataagcctgaagattggccctgtgcacgcacgcacacacacacacacacacacacacacacacacacacacacgaaggagagagagagaaaactgatggggaaaacaagctgtgtcttcttaactgcccaagtgaaaagcaaccaagtccaggaaattacaatagctgttaaggaaaggaaataatggtacagatctttttctgtctatcaaaactatttgatccaagtgaaaaaaaaaaaaaactagaaagctacggaacctgccattagtattgtggtgtatttttaagattaaaggtacactgatggacaaaaaaaaaaagtaaaacatggcaaaaaataaaataactcctatactgccctcaaaatggagtttgcaattaatatcaggatttatctttgcaaaaatcagtgatttccacattcagccagtatagccagcagaaatttctgatccacaatgcatggattcctttgaagaaaaaaaagaaaaagagaaaaaaatcacaaaaacaaactttttttattcaaaagtaacaaagttcttgtaaggtaaataatgtatttagcatgaagcatgaattattttcatataaatatagaaaatagagaaaaggctatgctgtaatttttaagcccttaggcttagagtttcttttggttttcttc

SEQ ID NO: 382249 - DNA, 3247 bp, Homo sapiens
gcggccgccccccgccgcccgccgccccgggctcgccgcgccgcgcccgcgcgtccttagcggggccaccgagcgatgcccgccgggcgcccgcgaaagtttgtcggctcctgctgaagggcagcggcgcccccgcacccccgtgccccgctccggccaggagccttcacgtaaatgggtccagtcatgcctcccagtaagaagccagaaagctcaggaattagtgtctccagtggactgagtcagtgttacgggggcagcggtttctccaaggcccttcaggaagacgatgacctcgacttttctctgcctgacatccgattagaagagggggccatggaagatgaagagctgaccaacctgaactggctgcacgagagcaagaacttgctgaagagctttggggagtcggtcctcaggagtgtcagccccgtccaggacctggacgatgacacccccccatcccctgcccactctgacatgccctacgatgccaggcagaaccccaactgcaaacccccctactccttcagctgcctcatatttatggccatcgaggactctccaaccaagcgcctgccagtgaaggatatctacaactggatcttggaacattttccgtattttgcaaatgcacctactgggtggaaaaactcagtgagacacaatttatcattgaataagtgttttaagaaagtggacaaagagaggagtcagagtattgggaaagggtcgttgtggtgcatagacccagagtatagacaaaatctaattcaggctttgaaaaagacaccttatcacccacacccacacgtgttcaatacacctcccacctgtcctcaggcatatcaaagagacggggtttcaccatcttggccaggctggtcttgaactcctgacctcgtgatccacctgcctcggcttcccaagtgctgggattacaggcgtgagccaccgagcccggcctggtgctgaaccaaattacatttccaccaacaagcacatcaggtccacccatctggccgggcagtaccttcttcaagagaaatggagcccttctccaagatcctgacattgatgctgccagtgccatgatgcttttgaatactccccctgagatacaagcaggttttcctccaggagtgatccaaaatggagcgcgggtcctgagccgagggctgtttcctggcgtgcggccgctgccaatcactcccattggggtgacagcggccatgaggaatggcatcaccagctgccggatgcggactgagagtgagccatcttgtggctccccagtggtcagcggagaccccaaggaggatcacaactacagcagtgccaagtcctccaacgcccggagcacctcgcccaccagcgactccatctcctcctcctcctcctcagccgacgaccactatgagtttgccaccaaggggagccaggagggcagcgagggcagcgaggggagcttccggagccacgagagccccagcgacacggaagaggacgacaggaagcacagccagaaggagcccaaggattctctgggggacagcgggtacgcatcccagcacaagaagcgccagcacttcgccaaggccaggaaggtccccagcgacacactgcccctcaaaaagagacgcaccgaaaagccccccgagagcgatgatgaggagatgaaagaagcggcagggtccctcctgcacttagcagggatccggtcctgtttgaataacatcaccaatcggacggcaaaggggcagaaagagcaaaaggaaaccacaaaaaattaaaaacaagtcactgatttgttttgaacttacgaccatttggtttcagcatgtcaggagatttctaatgatttgtggcaatatcagcaattttttttcttttttcttgtttttggtttggttttctttcttttcttttccttttattttgttttaatttgccccctcttctttgttttggacccttaagaattttatttttaaaggagattgaagccatagaactcatattgacactcagctgttttacaaaagcttttcattatctgaagacaaaaccgaaaaagccaaaattaccattgcttcctccagcttgtcagaaacctgtggctgaatccgcagggatgtcaacgtcaatatcacaggaacacacattcggcacctagaaggcacgtgggcaaagtaatcatcgttcaggcccaacccttaggtttaaaaagtcaggttgtccatcccattgggttcactgagtgaaggcacataaagcaattgaggaggaggaggaacccctcgtccccctaggagcagacccaagcttgtggcaccaggcatctgatggtgccaggaaagccactggaattgtcacacggcgagcacagagggccggccaccagtcctcgatgcttctgaaccctgaagcccgatgacatcttacgaggtggacgttggactgttcatgcgcatcgggtgtcagtgactcatggagaagaaatggggtaaatttttagtgatgttgctaatcattgaattctgttctctattaaattaagaaaatgttccaaaagccataagcctgaagattggccctgtgcacgcacgcacacacacacacacacacacacacacacacacacacacacgaaggagagagagagaaaactgatggggaaaacaagctgtgtcttcttaactgcccaagtgaaaagcaaccaagtccaggaaattacaatagctgttaaggaaaggaaataatggtacagatctttttctgtctatcaaaactatttgatccaagtgaaaaaaaaaaaaaactagaaagctacggaacctgccattagtattgtggtgtatttttaagattaaaggtacactgatggacaaaaaaaaaaagtaaaacatggcaaaaaataaaataactcctatactgccctcaaaatggagtttgcaattaatatcaggatttatctttgcaaaaatcagtgatttccacattcagccagtatagccagcagaaatttctgatccacaatgcatggattcctttgaagaaaaaaaagaaaaagagaaaaaaatcacaaaaacaaactttttttattcaaaagtaacaaagttcttgtaaggtaaataatgtatttagcatgaagcatgaattattttcatataaatatagaaaatagagaaaaggctatgctgtaatttttaagcccttaggcttagagtttcttttggttttcttc

SEQ ID NO: 382250 - DNA, 3106 bp, Homo sapiens
agcggcgcgatctgctgcagctcggccgggagacggcgcgacccggcggcggggccacccgcgagtccagcgtcgccgcagccccccaatgcggccgcgagaagcagcgggggggcaggcgatcgaagcagcctctagaagaccagcattctcgtgattatggaggcccctctgtcttttctgtgacgggagcaatgctgacctcggtttcctggacccattccgactcaggagccttcacgtaaatgggtccagtcatgcctcccagtaagaagccagaaagctcaggaattagtgtctccagtggactgagtcagtgttacgggggcagcggtttctccaaggcccttcaggaagacgatgacctcgacttttctctgcctgacatccgattagaagagggggccatggaagatgaagagctgaccaacctgaactggctgcacgagagcaagaacttgctgaagagctttggggagtcggtcctcaggagtgtcagccccgtccaggacctggacgatgacacccccccatcccctgcccactctgacatgccctacgatgccaggcagaaccccaactgcaaacccccctactccttcagctgcctcatatttatggccatcgaggactctccaaccaagcgcctgccagtgaaggatatctacaactggatcttggaacattttccgtattttgcaaatgcacctactgggtggaaaaactcagtgagacacaatttatcattgaataagtgttttaagaaagtggacaaagagaggagtcagagtattgggaaagggtcgttgtggtgcatagacccagagtatagacaaaatctaattcaggctttgaaaaagacaccttatcacccacacccacacgtgttcaatacacctcccacctgtcctcaggcatatcaaagcacatcaggtccacccatctggccgggcagtaccttcttcaagagaaatggagcccttctccaagttcctccaggagtgatccaaaatggagcgcgggtcctgagccgagggctgtttcctggcgtgcggccgctgccaatcactcccattggggtgacagcggccatgaggaatggcatcaccagctgccggatgcggactgagagtgagccatcttgtggctccccagtggtcagcggagaccccaaggaggatcacaactacagcagtgccaagtcctccaacgcccggagcacctcgcccaccagcgactccatctcctcctcctcctcctcagccgacgaccactatgagtttgccaccaaggggagccaggagggcagcgagggcagcgaggggagcttccggagccacgagagccccagcgacacggaagaggacgacaggaagcacagccagaaggagcccaaggattctctgggggacagcgggtacgcatcccagcacaagaagcgccagcacttcgccaaggccaggaaggtccccagcgacacactgcccctcaaaaagagacgcaccgaaaagccccccgagagcgatgatgaggagatgaaagaagcggcagggtccctcctgcacttagcagggatccggtcctgtttgaataacatcaccaatcggacggcaaaggggcagaaagagcaaaaggaaaccacaaaaaattaaaaacaagtcactgatttgttttgaacttacgaccatttggtttcagcatgtcaggagatttctaatgatttgtggcaatatcagcaattttttttcttttttcttgtttttggtttggttttctttcttttcttttccttttattttgttttaatttgccccctcttctttgttttggacccttaagaattttatttttaaaggagattgaagccatagaactcatattgacactcagctgttttacaaaagcttttcattatctgaagacaaaaccgaaaaagccaaaattaccattgcttcctccagcttgtcagaaacctgtggctgaatccgcagggatgtcaacgtcaatatcacaggaacacacattcggcacctagaaggcacgtgggcaaagtaatcatcgttcaggcccaacccttaggtttaaaaagtcaggttgtccatcccattgggttcactgagtgaaggcacataaagcaattgaggaggaggaggaacccctcgtccccctaggagcagacccaagcttgtggcaccaggcatctgatggtgccaggaaagccactggaattgtcacacggcgagcacagagggccggccaccagtcctcgatgcttctgaaccctgaagcccgatgacatcttacgaggtggacgttggactgttcatgcgcatcgggtgtcagtgactcatggagaagaaatggggtaaatttttagtgatgttgctaatcattgaattctgttctctattaaattaagaaaatgttccaaaagccataagcctgaagattggccctgtgcacgcacgcacacacacacacacacacacacacacacacacacacacacgaaggagagagagagaaaactgatggggaaaacaagctgtgtcttcttaactgcccaagtgaaaagcaaccaagtccaggaaattacaatagctgttaaggaaaggaaataatggtacagatctttttctgtctatcaaaactatttgatccaagtgaaaaaaaaaaaaaactagaaagctacggaacctgccattagtattgtggtgtatttttaagattaaaggtacactgatggacaaaaaaaaaaagtaaaacatggcaaaaaataaaataactcctatactgccctcaaaatggagtttgcaattaatatcaggatttatctttgcaaaaatcagtgatttccacattcagccagtatagccagcagaaatttctgatccacaatgcatggattcctttgaagaaaaaaaagaaaaagagaaaaaaatcacaaaaacaaactttttttattcaaaagtaacaaagttcttgtaaggtaaataatgtatttagcatgaagcatgaattattttcatataaatatagaaaatagagaaaaggctatgctgtaatttttaagcccttaggcttagagtttcttttggttttcttc

SEQ ID NO: 382251 - DNA, 2988 bp, Homo sapiens
gtagcttgcaggtttctgatatcgcatcagtggacaggcggcatgcactatattaacagcctctagaagaccagcattctcgtgattatggaggcccctctgtcttttctgtgacgggagcaatgctgacctcggtttcctggacccattccgactcaggagccttcacgtaaatgggtccagtcatgcctcccagtaagaagccagaaagctcaggaattagtgtctccagtggactgagtcagtgttacgggggcagcggtttctccaaggcccttcaggaagacgatgacctcgacttttctctgcctgacatccgattagaagagggggccatggaagatgaagaagctttggggagtcggtcctcaggagtgtcagccccgtccaggacctggacgatgacacccccccatcccctgcccactctgacatgccctacgatgccaggcagaaccccaactgcaaacccccctactccttcagctgcctcatatttatggccatcgaggactctccaaccaagcgcctgccagtgaaggatatctacaactggatcttggaacattttccgtattttgcaaatgcacctactgggtggaaaaactcagtgagacacaatttatcattgaataagtgttttaagaaagtggacaaagagaggagtcagagtattgggaaagggtcgttgtggtgcatagacccagagtatagacaaaatctaattcaggctttgaaaaagacaccttatcacccacacccacacgtgttcaatacacctcccacctgtcctcaggcatatcaaagcacatcaggtccacccatctggccgggcagtaccttcttcaagagaaatggagcccttctccaagttcctccaggagtgatccaaaatggagcgcgggtcctgagccgagggctgtttcctggcgtgcggccgctgccaatcactcccattggggtgacagcggccatgaggaatggcatcaccagctgccggatgcggactgagagtgagccatcttgtggctccccagtggtcagcggagaccccaaggaggatcacaactacagcagtgccaagtcctccaacgcccggagcacctcgcccaccagcgactccatctcctcctcctcctcctcagccgacgaccactatgagtttgccaccaaggggagccaggagggcagcgagggcagcgaggggagcttccggagccacgagagccccagcgacacggaagaggacgacaggaagcacagccagaaggagcccaaggattctctgggggacagcgggtacgcatcccagcacaagaagcgccagcacttcgccaaggccaggaaggtccccagcgacacactgcccctcaaaaagagacgcaccgaaaagccccccgagagcgatgatgaggagatgaaagaagcggcagggtccctcctgcacttagcagggatccggtcctgtttgaataacatcaccaatcggacggcaaaggggcagaaagagcaaaaggaaaccacaaaaaattaaaaacaagtcactgatttgttttgaacttacgaccatttggtttcagcatgtcaggagatttctaatgatttgtggcaatatcagcaattttttttcttttttcttgtttttggtttggttttctttcttttcttttccttttattttgttttaatttgccccctcttctttgttttggacccttaagaattttatttttaaaggagattgaagccatagaactcatattgacactcagctgttttacaaaagcttttcattatctgaagacaaaaccgaaaaagccaaaattaccattgcttcctccagcttgtcagaaacctgtggctgaatccgcagggatgtcaacgtcaatatcacaggaacacacattcggcacctagaaggcacgtgggcaaagtaatcatcgttcaggcccaacccttaggtttaaaaagtcaggttgtccatcccattgggttcactgagtgaaggcacataaagcaattgaggaggaggaggaacccctcgtccccctaggagcagacccaagcttgtggcaccaggcatctgatggtgccaggaaagccactggaattgtcacacggcgagcacagagggccggccaccagtcctcgatgcttctgaaccctgaagcccgatgacatcttacgaggtggacgttggactgttcatgcgcatcgggtgtcagtgactcatggagaagaaatggggtaaatttttagtgatgttgctaatcattgaattctgttctctattaaattaagaaaatgttccaaaagccataagcctgaagattggccctgtgcacgcacgcacacacacacacacacacacacacacacacacacacacacgaaggagagagagagaaaactgatggggaaaacaagctgtgtcttcttaactgcccaagtgaaaagcaaccaagtccaggaaattacaatagctgttaaggaaaggaaataatggtacagatctttttctgtctatcaaaactatttgatccaagtgaaaaaaaaaaaaaactagaaagctacggaacctgccattagtattgtggtgtatttttaagattaaaggtacactgatggacaaaaaaaaaaagtaaaacatggcaaaaaataaaataactcctatactgccctcaaaatggagtttgcaattaatatcaggatttatctttgcaaaaatcagtgatttccacattcagccagtatagccagcagaaatttctgatccacaatgcatggattcctttgaagaaaaaaaagaaaaagagaaaaaaatcacaaaaacaaactttttttattcaaaagtaacaaagttcttgtaaggtaaataatgtatttagcatgaagcatgaattattttcatataaatatagaaaatagagaaaaggctatgctgtaatttttaagcccttaggcttagagtttcttttggttttcttc

SEQ ID NO: 382252 - DNA, 2480 bp, Homo sapiens
agtcatgtgagcgctgactctaatcgtggctatagtagagggggaagaaaagtcccgaatctccaagaatcaaggtacagggagcctggcacagagagtattgggaaagggtcgttgtggtgcatagacccagagtatagacaaaatctaattcaggctttgaaaaagacaccttatcacccacacccacacgtgttcaatacacctcccacctgtcctcaggcatatcaaagcacatcaggtccacccatctggccgggcagtaccttcttcaagagaaatggagcccttctccaagatcctgacattgatgctgccagtgccatgatgcttttgaatactccccctgagatacaagcaggttttcctccaggagtgatccaaaatggagcgcgggtcctgagccgagggctgtttcctggcgtgcggccgctgccaatcactcccattggggtgacagcggccatgaggaatggcatcaccagctgccggatgcggactgagagtgagccatcttgtggctccccagtggtcagcggagaccccaaggaggatcacaactacagcagtgccaagtcctccaacgcccggagcacctcgcccaccagcgactccatctcctcctcctcctcctcagccgacgaccactatgagtttgccaccaaggggagccaggagggcagcgagggcagcgaggggagcttccggagccacgagagccccagcgacacggaagaggacgacaggaagcacagccagaaggagcccaaggattctctgggggacagcgggtacgcatcccagcacaagaagcgccagcacttcgccaaggccaggaaggtccccagcgacacactgcccctcaaaaagagacgcaccgaaaagccccccgagagcgatgatgaggagatgaaagaagcggcagggtccctcctgcacttagcagggatccggtcctgtttgaataacatcaccaatcggacggcaaaggggcagaaagagcaaaaggaaaccacaaaaaattaaaaacaagtcactgatttgttttgaacttacgaccatttggtttcagcatgtcaggagatttctaatgatttgtggcaatatcagcaattttttttcttttttcttgtttttggtttggttttctttcttttcttttccttttattttgttttaatttgccccctcttctttgttttggacccttaagaattttatttttaaaggagattgaagccatagaactcatattgacactcagctgttttacaaaagcttttcattatctgaagacaaaaccgaaaaagccaaaattaccattgcttcctccagcttgtcagaaacctgtggctgaatccgcagggatgtcaacgtcaatatcacaggaacacacattcggcacctagaaggcacgtgggcaaagtaatcatcgttcaggcccaacccttaggtttaaaaagtcaggttgtccatcccattgggttcactgagtgaaggcacataaagcaattgaggaggaggaggaacccctcgtccccctaggagcagacccaagcttgtggcaccaggcatctgatggtgccaggaaagccactggaattgtcacacggcgagcacagagggccggccaccagtcctcgatgcttctgaaccctgaagcccgatgacatcttacgaggtggacgttggactgttcatgcgcatcgggtgtcagtgactcatggagaagaaatggggtaaatttttagtgatgttgctaatcattgaattctgttctctattaaattaagaaaatgttccaaaagccataagcctgaagattggccctgtgcacgcacgcacacacacacacacacacacacacacacacacacacacacgaaggagagagagagaaaactgatggggaaaacaagctgtgtcttcttaactgcccaagtgaaaagcaaccaagtccaggaaattacaatagctgttaaggaaaggaaataatggtacagatctttttctgtctatcaaaactatttgatccaagtgaaaaaaaaaaaaaactagaaagctacggaacctgccattagtattgtggtgtatttttaagattaaaggtacactgatggacaaaaaaaaaaagtaaaacatggcaaaaaataaaataactcctatactgccctcaaaatggagtttgcaattaatatcaggatttatctttgcaaaaatcagtgatttccacattcagccagtatagccagcagaaatttctgatccacaatgcatggattcctttgaagaaaaaaaagaaaaagagaaaaaaatcacaaaaacaaactttttttattcaaaagtaacaaagttcttgtaaggtaaataatgtatttagcatgaagcatgaattattttcatataaatatagaaaatagagaaaaggctatgctgtaatttttaagcccttaggcttagagtttcttttggttttcttc

SEQ ID NO: 382253 - DNA, 2453 bp, Homo sapiens
gcagtgctgctctgtttggctctcttcttatgtgtgaaggttgccctcttgctagttaaaaccagaaagcttaagagtccctctctaactgcagagaacgtggctgatggcaagtgtggggaagtgtggcgccaatgtccctcatcctgagagcctcaggggtgggtattctctcatctaaaagataaatacgtaactggcctaacctgcaaggatgatgctagaggcctgggccttgtctggagagagccacaaatccgaggaagaagttgactttcaacgtccagcccttttgatgtcttacatagctggaggccagtgcacttcagtacatcagttcctccaggagtgatccaaaatggagcgcgggtcctgagccgagggctgtttcctggcgtgcggccgctgccaatcactcccattggggtgacagcggccatgaggaatggcatcaccagctgccggatgcggactgagagtgagccatcttgtggctccccagtggtcagcggagaccccaaggaggatcacaactacagcagtgccaagtcctccaacgcccggagcacctcgcccaccagcgactccatctcctcctcctcctcctcagccgacgaccactatgagtttgccaccaaggggagccaggagggcagcgagggcagcgaggggagcttccggagccacgagagccccagcgacacggaagaggacgacaggaagcacagccagaaggagcccaaggattctctgggggacagcgggtacgcatcccagcacaagaagcgccagcacttcgccaaggccaggaaggtccccagcgacacactgcccctcaaaaagagacgcaccgaaaagccccccgagagcgatgatgaggagatgaaagaagcggcagggtccctcctgcacttagcagggatccggtcctgtttgaataacatcaccaatcggacggcaaaggggcagaaagagcaaaaggaaaccacaaaaaattaaaaacaagtcactgatttgttttgaacttacgaccatttggtttcagcatgtcaggagatttctaatgatttgtggcaatatcagcaattttttttcttttttcttgtttttggtttggttttctttcttttcttttccttttattttgttttaatttgccccctcttctttgttttggacccttaagaattttatttttaaaggagattgaagccatagaactcatattgacactcagctgttttacaaaagcttttcattatctgaagacaaaaccgaaaaagccaaaattaccattgcttcctccagcttgtcagaaacctgtggctgaatccgcagggatgtcaacgtcaatatcacaggaacacacattcggcacctagaaggcacgtgggcaaagtaatcatcgttcaggcccaacccttaggtttaaaaagtcaggttgtccatcccattgggttcactgagtgaaggcacataaagcaattgaggaggaggaggaacccctcgtccccctaggagcagacccaagcttgtggcaccaggcatctgatggtgccaggaaagccactggaattgtcacacggcgagcacagagggccggccaccagtcctcgatgcttctgaaccctgaagcccgatgacatcttacgaggtggacgttggactgttcatgcgcatcgggtgtcagtgactcatggagaagaaatggggtaaatttttagtgatgttgctaatcattgaattctgttctctattaaattaagaaaatgttccaaaagccataagcctgaagattggccctgtgcacgcacgcacacacacacacacacacacacacacacacacacacacacgaaggagagagagagaaaactgatggggaaaacaagctgtgtcttcttaactgcccaagtgaaaagcaaccaagtccaggaaattacaatagctgttaaggaaaggaaataatggtacagatctttttctgtctatcaaaactatttgatccaagtgaaaaaaaaaaaaaactagaaagctacggaacctgccattagtattgtggtgtatttttaagattaaaggtacactgatggacaaaaaaaaaaagtaaaacatggcaaaaaataaaataactcctatactgccctcaaaatggagtttgcaattaatatcaggatttatctttgcaaaaatcagtgatttccacattcagccagtatagccagcagaaatttctgatccacaatgcatggattcctttgaagaaaaaaaagaaaaagagaaaaaaatcacaaaaacaaactttttttattcaaaagtaacaaagttcttgtaaggtaaataatgtatttagcatgaagcatgaattattttcatataaatatagaaaatagagaaaaggctatgctgtaatttttaagcccttaggcttagagtttcttttggttttcttc

SEQ ID NO: 382254 - DNA, 1488 bp, Homo sapiens
gcggccgccccccgccgcccgccgccccgggctcgccgcgccgcgcccgcgcgtccttagcggggccaccgagcgatgcccgccgggcgcccgcgaaagtttgtcggctcctgctgaagggcagcggcgcccccgcacccccgtgccccgctccggccaggagccttcacgtaaatgggtccagtcatgcctcccagtaagaagccagaaagctcaggaattagtgtctccagtggactgagtcagtgttacgggggcagcggtttctccaaggcccttcaggaagacgatgacctcgacttttctctgcctgacatccgattagaagagggggccatggaagatgaagagctgaccaacctgaactggctgcacgagagcaagaacttgctgaagagctttggggagtcggtcctcaggagtgtcagccccgtccaggacctggacgatgacacccccccatcccctgcccactctgacatgccctacgatgccaggcagaaccccaactgcaaacccccctactccttcagctgcctcatatttatggccatcgaggactctccaaccaagcgcctgccagtgaaggatatctacaactggatcttggaacattttccgtattttgcaaatgcacctactgggtggaaaaactcagtgagacacaatttatcattgaataagtgttttaagaaagtggacaaagagaggagtcagagtattgggaaagggtcgttgtggtgcatagacccagagtatagacaaaatctaattcaggctttgaaaaagacaccttatcacccacacccacacgtgttcaatacacctcccacctgtcctcaggcatatcaaagcacatcaggtccacccatctggccgggcagtaccttcttcaagagaaatggagcccttctccaagatggagtcttactcttgttgcccaggctggaatgcaatggcgtgatctcggctcactgcaacctctacagtatcctgggttcaagcaagattctcctgcctcagcctcccaagtagctgggactgcaggtgcctgccaccatgcctgactgatttttgtattttttagtagagacagggtttcaccatgttgatcaggctggtctcaaactcctgacttcaggcgatccccccacctcggcctcccaaagtgctgggattacaggcgtgaggcaccaccctggcaattacatggtaaattgtttgggaaaattcactgagctgtacacatacaagggctttgctggacatacgttattccaatagaaagtttcaaaactgattgggcagctgcaatttcattacacctatttgatttcagatttttattatgtacatgtagtgagcctcagaattcttacatggttaaaaaacaaagtaacaagaatttttatcacaattcaagcatattttataaagtctctccaaacctgcttgttattgatgttgttaatacaatatttagattcc

SEQ ID NO: 382255 - DNA, 826 bp, Homo sapiens
tgcgatctccaactttttcagttttctttgataggagagtggtcccaatgaccttttctaccattactggaagttgaagtttgatgtgtctcttgatattcccatactcatctatgtacttattgccattaaaataaaacaaaaataacttaaatgtattcaacatcaaacataacacatgctgtcatatataacaatcaagactctcatttgcaagtttggggaccccaactcaaactgacttaagaggagaaggttcatataactgaaaagcccagagacatttctggtttcgctacagtcaaatcgaagggctgtaacaaagtcatgagatttggtctctctcttcaccctttgctgcttctgttagtgtcactttcaggcaggccttcagaacctgtaaatttggcatgtcacatggcaaaggggaattaagagtgctaatcagctgacattaaaatagggagatttagaagaaaaaaaggacaaagcaaaaaatggggagagtaccttggaattttgggtgggcccaatgtaatcacaagtgccattaaaaatggaagagtgagagagaagtgtgttagagataggagtaggagaatttcaggcagatgcaacattgctggcattgaagatggagggagagatcacagactgacgagtctaggtggcttctagcagcgaagaggcaaggaagcggattttcttttagaaactccagagaagaaaacaggcctgccgataccttgatttttagcccagcgaaacttgtgtcagacttctaaactacagaactgtaagaataaatttgtgttttatctaagcc

SEQ ID NO: 382256 - DNA, 2362 bp, Homo sapiens
  misc_feature (2337)..(2337): n is a, c, g, or t
tgttaggcagcaacagtgctgatgctggactgtggcaggcagagggtgctatcctgacacacttcaccttagtgcaggaaacttcaatttggtggaagaaaggcgatttcgaggttccaatctgggcgacacttcccagttggagagtcagcaaaagggagagggcaattccaagaagagggaaaagcttgtgcacagtgtacctcctttattcctgaagcccgggcagtgcttgacctggtcgaccagtgcccaaaacagatccagaaaggaaagttccaggttgttgccatcgaaggactggatgccacgggtaaaaccacggtgacccagtcagtggcagattcacttaaggctgtcctcttaaagtcaccaccctcttgcattggccagtggaggaagatctttgatgatgaaccaactatcattagaagagctttttactctttgggcaattatattgtggcctccgaaatagctaaagaatctgccaaatctcctgtgattgtagacaggtactggcacagcacggccacctatgccatagccactgaggtgagtgggggtctccagcacctgcccccagcccatcaccctgtgtaccagtggccagaggacctgctcaaacctgaccttatcctgctgctcactgtgagtcctgaggagaggttgcagaggctgcagggccggggcatggagaagaccagggaagaagcagaacttgaggccaacagtgtgtttcgtcaaaaggtagaaatgtcctaccagcggatggagaatcctggctgccatgtggttgatgccagcccctccagagaaaaggtcctgcagacggtattaagcctaatccagaatagttttagtgaaccgtagttactctggccaggtgccacgtctaactagattagatgttgtttgaaacatctacatccaccatttgttatgcagtgttcccaaatttctgttctacaagcatgttgtgtggcagaaaactggagaccaggcatcttaattttacttcagccatcgtaccctcttctgactgatggacccgtcatcacaaaggtccctctcatcatgttccagtgagaggccagcgattgctttcttcctggcatagtaaacattttcttggaacatatgtttcacttaatcactaccaaatatctggaagacctgtcttactcagacagcaccaggtgtacagaagcagcagacaagatcttccagatcagcagggagaccccggagcctctgcttctcctacactggcatgctgatgagatcgtgacatgcccacattggcttcttccacatctggttgcactcgtcatgatgggctcgctgcatctccctcagtcccaaattctagagccaagtgttcctgcagaggctgtctatgtgtcctggctgcccaaggacactcctgcagagccatttttgggtaaggaacacttacaaagaaggcattgatcttgtgtctgaggctcagagcccttttgataggcttctgagtcatatataaagacattcaagccaagatgctccaactgcaaatataccaaccttctctgaattatattttgcttatttatatttcttttctttttttctaaagtatggctctgaatagaatgcacattttccattgaactggatgcatttcatttagccaatccagtaatttatttatattaatctatacataatatgtttcctcagcataggagctatgattcattaattaaaagtggagtcaaaacgctaaatgcaatgtttgttgtgtattttcattacacaaacttaatttgtcttgttaaataagtacagtggatcttggagtgggatttcttggtaaattatcttgcacttgaatgtctcatgattacatatgaaatcgctttgacatatctttagacagaaaaaagtagctgagtgagggggaaattatagagctgtgtgactttagggagtaggttgaaccaggtgattacctaaaattccttccagttcaaaggcagataaatctgtaaattattttatcctatctaccatttcttaagaagacattactccaaaataattaaatttaaggctttatcaggtctgcatatagaatcttaaattctaataaagtttcatgttaatgtcataggatttttaaaagagctataggtaatttctgtataatatgtgtatattaaaatgtaattgatttcagttgaaagtattttaaagctgataaatagcattagggttctttgcaatgtggtatctagctgtattattggttttatttactttaaacattttgaaaagcttatactggcagccagntgagtgaatgggatctctagagcag

SEQ ID NO: 382257 - DNA, 2404 bp, Homo sapiens
tgttaggcagcaacagtgctgatgctggactgtggcaggcagagggtgctatcctgacacacttcaccttagtgcaggaaacttcaatttggtggaagaaaggcgatttcgaggttccaatctgggcgacacttcccagttggagagtcagcaaaagggagagggcaattccaagaagagggaaaagcttgtgcacagtgtacctcctttattcctgaagcccgggcagtgcttgacctggtcgaccagtgcccaaaacagatccagaaaggaaagttccaggttgttgccatcgaaggactggatgccacgggtaaaaccacggtgacccagtcagtggcagattcacttaaggctgtcctcttaaagtcaccaccctcttgcattggccagtggaggaagatctttgatgatgaaccaactatcattagaagagctttttactctttgggcaattatattgtggcctccgaaatagctaaagaatctgccaaatctcctgtgattgtagacaggtactggcacagcacggccacctatgccatagccactgaggtgagtgggggtctccagcacctgcccccagcccatcaccctgtgtaccagtggccagaggacctgctcaaacctgaccttatcctgctgctcactgtgagtcctgaggagaggttgcagaggctgcagggccggggcatggagaagaccagggaagaagcagaacttgaggccaacagtgtgtttcgtcaaaaggtagaaatgtcctaccagcggatggagaatcctggctgccatgtggttgatgccagcccctccagagaaaaggtcctgcagacggtattaagcctaatccagaatagttttagtgaaccgtagttactctggccaggtgccacgtctaactagattagatgttgtttgaaacatctacatccaccatttgttatgcagtgttcccaaatttctgttctacaagcatgttgtgtggcagaaaactggagaccaggcatcttaattttacttcagccatcgtaccctcttctgactgatggacccgtcatcacaaaggtccctctcatcatgttccagtgagaggccagcgattgctttcttcctggcatagtaaacattttcttggaacatatgtttcacttaatcactaccaaatatctggaagacctgtcttactcagacagcaccaggtgtacagaagcagcagacaagatcttccagatcagcagggagaccccggagcctctgcttctcctacactggcatgctgatgagatcgtgacatgcccacattggcttcttccacatctggttgcactcgtcatgatgggctcgctgcatctccctcagtcccaaattctagagccaagtgttcctgcagaggctgtctatgtgtcctggctgcccaaggacactcctgcagagccatttttgggtaaggaacacttacaaagaaggcattgatcttgtgtctgaggctcagagcccttttgataggcttctgagtcatatataaagacattcaagccaagatgctccaactgcaaatataccaaccttctctgaattatattttgcttatttatatttcttttctttttttctaaagtatggctctgaatagaatgcacattttccattgaactggatgcatttcatttagccaatccagtaatttatttatattaatctatacataatatgtttcctcagcataggagctatgattcattaattaaaagtggagtcaaaacgctaaatgcaatgtttgttgtgtattttcattacacaaacttaatttgtcttgttaaataagtacagtggatcttggagtgggatttcttggtaaattatcttgcacttgaatgtctcatgattacatatgaaatcgctttgacatatctttagacagaaaaaagtagctgagtgagggggaaattatagagctgtgtgactttagggagtaggttgaaccaggtgattacctaaaattccttccagttcaaaggcagataaatctgtaaattattttatcctatctaccatttcttaagaagacattactccaaaataattaaatttaaggctttatcaggtctgcatatagaatcttaaattctaataaagtttcatgttaatgtcataggatttttaaaagagctataggtaatttctgtataatatgtgtatattaaaatgtaattgatttcagttgaaagtattttaaagctgataaatagcattagggttctttgcaatgtggtatctagctgtattattggttttatttactttaaacattttgaaaagcttatactggcagcctagaaaaacaaacaattaatgtatctttatgtccctggcacatgaataaactttgctgtggtttactaat

SEQ ID NO: 382258 - DNA, 2898 bp, Homo sapiens
gcgtcgctgaggcgcccatggccttcgcccgccggctcctgcgcgggccactgtcggggccgctgctcgggcggcgcggggtctgcgctggggccatggctccgccgcgccgcttcgtcctggagcttcccgactgcaccctggctcacttcgccctaggcgccgacgcccccggcgacgcagacgcccccgacccccgcctggcggcgctgctggggcccccggagcgcagctactcgctgtgcgtgcccgtgaccccggacgccggctgcggggcccgggtccgggcggcgcggctgcaccagcgcctgctgcaccagctgcgccgcggccccttccagcggtgccagctgctcaggctgctctgctactgcccgggcggccaggccggcggcgcacagcaaggcttcctgctgcgcgaccccctggatgaccctgacacccggcaagcgctgctcgagctgctgggcgcctgccaggaggcaccacgcccgcacttgggcgagttcgaggccgacccgcgcggccagctgtggcagcgcctctgggaggtgcaagacggcaggcggctgcaggtgggctgcgcacaggtcgtgcccgtcccggagcccccgctgcacccggtggtgccagacttgcccagttccgtggtcttcccggaccgggaagccgcccgggccgttttggaggagtgtacctcctttattcctgaagcccgggcagtgcttgacctggtcgaccagtgcccaaaacagatccagaaaggaaagttccaggttgttgccatcgaaggactggatgccacgggtaaaaccacggtgacccagtcagtggcagattcacttaaggctgtcctcttaaagtcaccaccctcttgcattggccagtggaggaagatctttgatgatgaaccaactatcattagaagagctttttactctttgggcaattatattgtggcctccgaaatagctaaagaatctgccaaatctcctgtgattgtagacaggtactggcacagcacggccacctatgccatagccactgaggtgagtgggggtctccagcacctgcccccagcccatcaccctgtgtaccagtggccagaggacctgctcaaacctgaccttatcctgctgctcactgtgagtcctgaggagaggttgcagaggctgcagggccggggcatggagaagaccagggaagaagcagaacttgaggccaacagtgtgtttcgtcaaaaggtagaaatgtcctaccagcggatggagaatcctggctgccatgtggttgatgccagcccctccagagaaaaggtcctgcagacggtattaagcctaatccagaatagttttagtgaaccgtagttactctggccaggtgccacgtctaactagattagatgttgtttgaaacatctacatccaccatttgttatgcagtgttcccaaatttctgttctacaagcatgttgtgtggcagaaaactggagaccaggcatcttaattttacttcagccatcgtaccctcttctgactgatggacccgtcatcacaaaggtccctctcatcatgttccagtgagaggccagcgattgctttcttcctggcatagtaaacattttcttggaacatatgtttcacttaatcactaccaaatatctggaagacctgtcttactcagacagcaccaggtgtacagaagcagcagacaagatcttccagatcagcagggagaccccggagcctctgcttctcctacactggcatgctgatgagatcgtgacatgcccacattggcttcttccacatctggttgcactcgtcatgatgggctcgctgcatctccctcagtcccaaattctagagccaagtgttcctgcagaggctgtctatgtgtcctggctgcccaaggacactcctgcagagccatttttgggtaaggaacacttacaaagaaggcattgatcttgtgtctgaggctcagagcccttttgataggcttctgagtcatatataaagacattcaagccaagatgctccaactgcaaatataccaaccttctctgaattatattttgcttatttatatttcttttctttttttctaaagtatggctctgaatagaatgcacattttccattgaactggatgcatttcatttagccaatccagtaatttatttatattaatctatacataatatgtttcctcagcataggagctatgattcattaattaaaagtggagtcaaaacgctaaatgcaatgtttgttgtgtattttcattacacaaacttaatttgtcttgttaaataagtacagtggatcttggagtgggatttcttggtaaattatcttgcacttgaatgtctcatgattacatatgaaatcgctttgacatatctttagacagaaaaaagtagctgagtgagggggaaattatagagctgtgtgactttagggagtaggttgaaccaggtgattacctaaaattccttccagttcaaaggcagataaatctgtaaattattttatcctatctaccatttcttaagaagacattactccaaaataattaaatttaaggctttatcaggtctgcatatagaatcttaaattctaataaagtttcatgttaatgtcataggatttttaaaagagctataggtaatttctgtataatatgtgtatattaaaatgtaattgatttcagttgaaagtattttaaagctgataaatagcattagggttctttgcaatgtggtatctagctgtattattggttttatttactttaaacattttgaaaagcttatactggcagcctagaaaaacaaacaattaatgtatctttatgtccctggcacatgaataaactttgctgtggtttactaat

SEQ ID NO: 382259 - DNA, 729 bp, Homo sapiens
  misc_feature (1)..(1): n is a, c, g, or t
  misc_feature (726)..(729): n is a, c, g, or t
nctgccccagaacaaccagctggatcagttctcacaggagccacagctcagagactgggaaacatggttccaaaactgttcacttcccaaatttgtctgcttcttctgttggggcttatgggtgtggagggctcactccatgccagacccccacagtttacgagggctcagtggtttgccatccagcacatcagtctgaacccccctcgatgcaccattgcaatgcgggcaattaacaattatcgatggcgttgcaaaaaccaaaatacttttcttcgtacaacttttgctaatgtagttaatgtttgtggtaaccaaagtatacgctgccctcataacagaactctcaacaattgtcatcggagtagattccgggtgcctttactccactgtgacctcataaatccaggtgcacagaatatttcaaactgcacgtatgcagacagaccaggaaggaggttctatgtagttgcatgtgacaacagagatccacgggattctccacggtatcctgtggttccagttcacctggataccaccatctaagctcctgtatcagcagtcctcatcatcactcatctgccaagctcctcaatcatagccaagatcccatccctccatgtactctgggtatcagcaactgtcctcatcagtctccataccccttcagctttcctgagctgaagtcccttgtgaaccctgcaataaactgctttgcaaattcannnn

SEQ ID NO: 382260 - DNA, 412 bp, Homo sapiens
aagagacatggtcttgctctgtttcccaggatggactgcagtggcacaatcacagctcactataaccttgaactcctggactcaaaggctcaagcaatccccctgcttcaacctcccaaagtgttgggattaccaggtgtgagccaccaggtccagccaggaatcagtttctatgaaataaaatatgtgctaattactaggcatatttatggttgtgttttctattttttaggtaacatttagaggcaatgccttccaaattttattggtttttagaaatataaaatccagcatgcccacaccagaagtaaaagcattaaaaaacacactcaaaaagtagtacagaattatttcctctaaatggcctagtttgctaagattgtacaaactcagcaggtgccaaattatctaa

SEQ ID NO: 382261 - DNA, 405 bp, Homo sapiens
tagagacaaggtcttgctctgttgcccaggctggagtgcagtggtgccattatagctcactataaccttgacctcctgggtgcaagcaattctcccgcctctatcttccgagtagctcggactatgaacacgtgccaccacagctaaattttgttattttatttgtacagacaggtattgctatgtttcccagggtgctctcaaatttctgggctcaagcgatctgcccaccatggcctcccaaactgttgggattataaatatgagccacagagcccggccctgttttaaattcttttttttttttttttttgagatggagtctcgctttgtcaccaggctagagtgcagtggcgcaatctcggctcactgcaagctctgccttttgggttcaagtgattctcc

SEQ ID NO: 382262 - DNA, 709 bp, Homo sapiens
attttttttgagacagaatctcactctgtctcccaggctggtcggcagtggcacgatgttggctcactgcaacctccgcttcctaggctcaagcaatcctccagcctcagcctcctgagtagctgggaccacaggcatgagccaccatgcccagctaacttttttattttttgtggactcagggttttgccattttggtaaggctgttttcaaactcctgagctcaaagtgatccacatgcgtcaacctccctaagtgctgggattacagtcatgagccatggcacccagcctaagactggttttatatgttctttaaataggatagaattcaccaataaaactatctgtgcttgcttttctttgtggaaaatttctattttaaaactgaattatttttaatgatttatattttactaaactttaaaaaagacacttttgctttgttatttgtatttattattttcttgtttttaattttattgttttctgcttttatctttattttttctttttacaatttactttagtttttaatttattttttataggcttataaggttgaaaattaaatcattgatttcaaatcatttttttcttttaacataatcatataaagctacacattttcctttaagtactattttaactagatgtaatatctacatctagtagatattgacatattttatttttcttaacatttggtt

SEQ ID NO: 382263 - DNA, 475 bp, Homo sapiens
catgcccaccccatgcactctcacctgttactctgaggtttctctgtttgataacaaggcatagaaattcacagcaaccctcacacctgtaccatctgggagtgcaggagaatggacccattagaatgagcctttgaccaatgagatatgggagcaggggataaattcttcccgttttctcaccgaaagagacattcctgagacattttttacatggcttcattgaagataactctgtgatatcaaacaatccgttgtccttagtggtagccagttcaatacacttccttgtacctgtattggttttatctccttttctgtctcacgttatttatccttctctcccgatccttaatgtatgctccctaacaaaatcgtggcacgtaaacccttgcctcagactctactttctgaagaaaccagctaaggaaaaaatgtctctaaagaaagaaaaatagagtaatgtaaaaaaaaa

SEQ ID NO: 382264 - DNA, 285 bp, Homo sapiens
ttttatttccattacacttgggaagaacacagaagatattagtccctgcgtggcaagaatctcactctgtgagctggagtaaattttgcgtggtcttaccctgggtcaggttagggcttaggtgggaacagactagatgatgtccagaacgttttctggctcccaggtctctcagggtggtgaaaaaagaagtatgtgtagaattggtgcttatttctctctgactagcgctactgtgacacccaacaagtcccaaaaatccttagggtgctcatttacagaaag

SEQ ID NO: 382265 - DNA, 231 bp, Homo sapiens
aaaacttcacattaaatttaaacaaaaacattcaaataaaagtaaaaattctgatcagttttcttatgcatgccacaagacacatacagttaggttttaacctgggagaaaaaaacattccttcacccatgtccctactttgcctcttctagtaatctcaagcttggtccaagactaacatcaccacaaataagtgaggccttttctggcaccagcccatgcacatttagg

SEQ ID NO: 382266 - DNA, 341 bp, Homo sapiens
tgggccttcccttcaggtgtgtgtcagtctcctctaatgatcctggtccccactgtctgcccctgcccgtagcatctccactaaaggaaagaaatgataggagggatgggaatagaggcgagatgatagacctgctgttcagtactgtagccactagctacatgtggctgttgggcactggaaatacagctagtccaagttgagatgtgcgtaagtgtaaaatacaccatgctttgagactatataaaaaaatgtaaaatttcttatttaacaaattgtaatattggttacatgttgaaacagcaatagttttgatatagtaggttaaacaaaatatatta

SEQ ID NO: 382267 - DNA, 636 bp, Homo sapiens
ataattttctatgtcaaattagtgtcagtcgcccttttataccacagttttcccgttcgtgaatttttagtttaaacttacctctcaattagctgagtgcctcactcaagcaatcttttcaagaagggtagccgggcatggtggctcgtgtctgtaatgccagcactttgggaggccaaggcgggaggatcacttgaggtcaggagttgcactccagcctgggtgacagagcgaaacttcatctcaaaaaaaaagggtagcataaatgctattttaccttagctcatgtacacctgataatttctttctgtgctgtcacacttgagtagggcgtactttctttggggcactaactgttccactcccaattttgtaaatactactccactgactcttgcttagtatttaggattatggagaagtctgaggccattctcagactctttctcattctctttttgttccgttatcattaatgtgttttctctgcctagttgtcattaattgtatacctagaacatagtaatagctttccatctcagaactggttatttattttagatcaagaatattttattgtattatgtgtctgattactgtttctgatccatttatcgtaagttttttgagaactct

SEQ ID NO: 382268 - DNA, 384 bp, Homo sapiens
tttttttttctgagatgggtctcactctgttgcccaggctagagtacagtggtgtgatttcagctcactgcagcctttatctcctgggttcaagcgatcctcccacctcagcttcccaagtagctggcaccacaggcctgcagagccatactttgtcctcctctgccagccacagcctgatacctgcaacacagttcccagcaaaccccccactcccccttaccttgtgagccacagcaaactaaacctcccaacttcagcagggaaaaaaccctcaggaggatgactagagtgatccctctgtctaaataccaccttgttcctctaaatctactgcaaatatttccaaacatttcctcccttttcccagtggatatcctagac

SEQ ID NO: 382269 - DNA, 2768 bp, Homo sapiens
gctcatttgtaggctgaactaatgactgccgccataagaagacagagagaactgagtatcctcccaaaggtgacactggaagcaatgaacaccacagtgatgcaaggcttcaacagatctgagcggtgccccagagacactcggatagtacagctggtattcccagccctctacacagtggttttcttgaccggcatcctgctgaatactttggctctgtgggtgtttgttcacatccccagctcctccaccttcatcatctacctcaaaaacactttggtggccgacttgataatgacactcatgcttcctttcaaaatcctctctgactcacacctggcaccctggcagctcagagcttttgtgtgtcgtttttcttcggtgatattttatgagaccatgtatgtgggcatcgtgctgttagggctcatagcctttgacagattcctcaagatcatcagacctttgagaaatatttttctaaaaaaacctgtttttgcaaaaacggtctcaatcttcatctggttctttttgttcttcatctccctgccaaatatgatcttgagcaacaaggaagcaacaccatcgtctgtgaaaaagtgtgcttccttaaaggggcctctggggctgaaatggcatcaaatggtaaataacatatgccagtttattttctggactgtttttatcctaatgcttgtgttttatgtggttattgcaaaaaaagtatatgattcttatagaaagtccaaaagtaaggacagaaaaaacaacaaaaagctggaaggcaaagtatttgttgtcgtggctgtcttctttgtgtgttttgctccatttcattttgccagagttccatatactcacagtcaaaccaacaataagactgactgtagactgcaaaatcaactgtttattgctaaagaaacaactctctttttggcagcaactaacatttgtatggatcccttaatatacatattcttatgtaaaaaattcacagaaaagctaccatgtatgcaagggagaaagaccacagcatcaagccaagaaaatcatagcagtcagacagacaacataaccttaggctgacaactgtacatagggttaacttctatttattgatgagacttccgtagataatgtggaaatcaaatttaaccaagaaaaaaagattggaacaaatgctctcttacattttattatcctggtgtacagaaaagattatataaaatttaaatccacatagatctattcataagctgaatgaaccattactaagagaatgcaacaggatacaaatggccactagaggtcattatttctttctttcttttttttttttttaatttcaagagcatttcactttaacattttggaaaagactaaggagaaacgtatatccctacaaacctcccctccaaacaccttctcacattcttttccacaattcacataacactactgcttttgtgccccttaaatgtagatatgtgctgaaagaaaaaaaaaacgcccaactcttgaagtccattgctgaaaactgcagccaggggttgaaagggatgcagacttgaagagtctgaggaactgaagtgggtcagcaagacctctgaaatcctgggtaaaggattttctccttacaattacaaacagcctctttcacattacaataatataccataggaggcacaagcaccattattaagccactttgcttacaccttaagtgtgtacaattcaagtgtgagaatgctgtgttaactattctttggaattctccttctgtccagcaaatactctaatgatggttaaacatggcacctactcagcaatgccttcctggaccacaacccctatccccctgccccaccctcctcattaaaaacaaatacttctactgtttgggtgtgtgatagggttctcaatgcagatctcccttttctagttagctatattcttgactgcatccgctaaaaatgttaaagcttcttgagagacagacatgccagattttcttggtatctcccataatacgacctacagtccatggtctacagatgttttaaatagaattgctattctcgatacatacaaagacgtaattgctgacccacaatcagtaacatccatattgggagatttttcaaaggatggtgaccctgcttgtatttatttaccttggtattttttcttgcatccttctgtgattcaaaaaagtaaaatgtggctttctgaaatgatggataagagtctacatcttctagaaaaaatacataaaggagtagttaagctctgtaaatgtgccacgagctccaacacgaccatcgtagggtgaagcccacgttttcttccatggcctcaaaggccctagaacttgcctacctttctggccttacctcctagctacttatccatctcttgaactttatactcttgtataaatttctaactttcagaaaatgccatactctgttttggcaccacacatgtatatttccccctggtacacttggaagactcttatccatctgtgaaaccctatgttgtcatcacttggtccatgaaatattacctggccaatatcccaccatcacctcaaacccaatcaccccctcctctgtatgctgtcacacctatattattaaacttatcacattgcattgtaattacttcctgacctttgtatctactcttttagtaactgatgtatatatctgaaaggagagattgtttcattgtgcaatcaataaatgtttgataaaataaagccc

SEQ ID NO: 382270 - DNA, 2857 bp, Homo sapiens
aacagtattttccttttcaacacatctattgaaagtgttggataaatgcaggatgttaatatgctataaacataaagtctgtttttaaaaaatagcatttgaaaatcatgaagggctttttgttttcttttgtttgtatatatgtttattggtaacaggtgacactggaagcaatgaacaccacagtgatgcaaggcttcaacagatctgagcggtgccccagagacactcggatagtacagctggtattcccagccctctacacagtggttttcttgaccggcatcctgctgaatactttggctctgtgggtgtttgttcacatccccagctcctccaccttcatcatctacctcaaaaacactttggtggccgacttgataatgacactcatgcttcctttcaaaatcctctctgactcacacctggcaccctggcagctcagagcttttgtgtgtcgtttttcttcggtgatattttatgagaccatgtatgtgggcatcgtgctgttagggctcatagcctttgacagattcctcaagatcatcagacctttgagaaatatttttctaaaaaaacctgtttttgcaaaaacggtctcaatcttcatctggttctttttgttcttcatctccctgccaaatatgatcttgagcaacaaggaagcaacaccatcgtctgtgaaaaagtgtgcttccttaaaggggcctctggggctgaaatggcatcaaatggtaaataacatatgccagtttattttctggactgtttttatcctaatgcttgtgttttatgtggttattgcaaaaaaagtatatgattcttatagaaagtccaaaagtaaggacagaaaaaacaacaaaaagctggaaggcaaagtatttgttgtcgtggctgtcttctttgtgtgttttgctccatttcattttgccagagttccatatactcacagtcaaaccaacaataagactgactgtagactgcaaaatcaactgtttattgctaaagaaacaactctctttttggcagcaactaacatttgtatggatcccttaatatacatattcttatgtaaaaaattcacagaaaagctaccatgtatgcaagggagaaagaccacagcatcaagccaagaaaatcatagcagtcagacagacaacataaccttaggctgacaactgtacatagggttaacttctatttattgatgagacttccgtagataatgtggaaatcaaatttaaccaagaaaaaaagattggaacaaatgctctcttacattttattatcctggtgtacagaaaagattatataaaatttaaatccacatagatctattcataagctgaatgaaccattactaagagaatgcaacaggatacaaatggccactagaggtcattatttctttctttcttttttttttttttaatttcaagagcatttcactttaacattttggaaaagactaaggagaaacgtatatccctacaaacctcccctccaaacaccttctcacattcttttccacaattcacataacactactgcttttgtgccccttaaatgtagatatgtgctgaaagaaaaaaaaaacgcccaactcttgaagtccattgctgaaaactgcagccaggggttgaaagggatgcagacttgaagagtctgaggaactgaagtgggtcagcaagacctctgaaatcctgggtaaaggattttctccttacaattacaaacagcctctttcacattacaataatataccataggaggcacaagcaccattattaagccactttgcttacaccttaagtgtgtacaattcaagtgtgagaatgctgtgttaactattctttggaattctccttctgtccagcaaatactctaatgatggttaaacatggcacctactcagcaatgccttcctggaccacaacccctatccccctgccccaccctcctcattaaaaacaaatacttctactgtttgggtgtgtgatagggttctcaatgcagatctcccttttctagttagctatattcttgactgcatccgctaaaaatgttaaagcttcttgagagacagacatgccagattttcttggtatctcccataatacgacctacagtccatggtctacagatgttttaaatagaattgctattctcgatacatacaaagacgtaattgctgacccacaatcagtaacatccatattgggagatttttcaaaggatggtgaccctgcttgtatttatttaccttggtattttttcttgcatccttctgtgattcaaaaaagtaaaatgtggctttctgaaatgatggataagagtctacatcttctagaaaaaatacataaaggagtagttaagctctgtaaatgtgccacgagctccaacacgaccatcgtagggtgaagcccacgttttcttccatggcctcaaaggccctagaacttgcctacctttctggccttacctcctagctacttatccatctcttgaactttatactcttgtataaatttctaactttcagaaaatgccatactctgttttggcaccacacatgtatatttccccctggtacacttggaagactcttatccatctgtgaaaccctatgttgtcatcacttggtccatgaaatattacctggccaatatcccaccatcacctcaaacccaatcaccccctcctctgtatgctgtcacacctatattattaaacttatcacattgcattgtaattacttcctgacctttgtatctactcttttagtaactgatgtatatatctgaaaggagagattgtttcattgtgcaatcaataaatgtttgataaaataaagccc

SEQ ID NO: 382271 - DNA, 954 bp, Homo sapiens
acgtccaggctgtaaaagtcattttattctggaggaaatgcaacaccaaagttgtaacagtctttcaataaagtaaaacagaatcatcgaaagggctcctgggacaattgaggctagaatgatcttggtcagtcagtcctgtggacttgagggcaatcttccctcccactaccggttggggagccctgatgtcgcctcccgcagagcgccacttggcctggcctgcgcttcaccttcatttccgcccgcggaatcctccaggatcttcccgccaaggctggggtttccgctccgcggcgtccgagcgccagcggactgcgcatgtgcaggacccagcaggtctagagcttttctgtgtttctccggacttcgagccatggcggtgacggaagcgagcctgttgcgccagtgccccctgcttctgccccagaaccggtcgaaaaccgtgtatgagggattcatctcggctcagggaagagacttccaccttaggatagtgttgcctgaagatttacaactgaagaatgcaagattattatgtagttggcagctgagaacaatacttagtggataccatcgaatagtacaacagagaatgcagcactctcctgatctaatgagctttatgatggagttgaagatgcttttggaagttgccttaaagaatagacaagagctgtatgcactacctcctcctccccagttctactcaagccttattgaagagataggaactcttggttgggataaagacaaggttttgctgtattgcccaggcgagtctcacactcctgggctgaaatgattctcctgcctcagcctcccaaaatgctgggattaacaggtgttcgctgccatgcctggcctaggatgaataaatgactttcgatttagctgctgttacttaatcatttgttttatactgtttaaaaataaagaatgttttagcagaag

SEQ ID NO: 382272 - DNA, 738 bp, Homo sapiens
gcatcccagctactgctcaggtcgctctagagatcccccgttgacacttacggaagagacttccaccttaggatagtgttgcctgaagatttacaactgaagaatgcaagattattatgtagttggcagctgagaacaatacttagtggataccatcgaatagtacaacagagaatgcagcactctcctgatctaatgagctttatgatggagttgaagatgcttttggaagttgccttaaagaatagacaagagctgtatgcactacctcctcctccccagttctactcaagccttattgaagagataggaactcttggttgggataaacttgtgtatgcggatacctgcttcagtaccatcaagttaaaagcagaagatgcttctggtagagagcatttaatcactctcaagttgaaggcaaagtatcctgcagaatcaccagattattttgtggattttcctgttccattttgtgcctcctggacacctcaggaagagacttccaccttaggatagtgttgcctgaagatttacaactgaagaatgcaagattattatgtagttggcagctgagaacaatacttagtggataccatcgaatagtacaacagagaatgcagcactctcctgatctaatgagctttatgatggagttgaagatgcttttggaagttgccttaaagaatagacaagagctctatcagctacctcctcctccccagttctactggacca

SEQ ID NO: 382273 - DNA, 603 bp, Homo sapiens
tgcgctgtgtgggatcctctatatgccagagctcgcaggctgctaggcttggtattgttcgatctattgacaagtgtcatgagtgatactacctctggttgacggtaccattcctgatcaagtgtgtgataattcccagtgtggacaacctttccatcaaatatgcttatatgagtggctgagaggactactaactagtagacagagttttaacatcatatttggtgaatgtccatattgtagtaagccaattaccttaaaaatgtctggaaggaaacactgaaataagaatacaacatttcggtgaagagctggaaacttaaaaaattatcaaaaggaattttggtatcatcttcagagaaaaaataaagcaagaaatgagatgtaggaaggcctaccaacatctcatttcttcatttatagcatctcataactaattttctaaagtttggatagggacttatcaggtcctttttggagggcaaggaagtgcagctactctggggaaactgtaataaatccaaagacttgaaccacattccctgcacatgaacatgttgcttttatcccttctctcatgtctccttcccatcttagacctgt

SEQ ID NO: 382274 - DNA, 5056 bp, Homo sapiens
acgtccaggctgtaaaagtcattttattctggaggaaatgcaacaccaaagttgtaacagtctttcaataaagtaaaacagaatcatcgaaagggctcctgggacaattgaggctagaatgatcttggtcagtcagtcctgtggacttgagggcaatcttccctcccactaccggttggggagccctgatgtcgcctcccgcagagcgccacttggcctggcctgcgcttcaccttcatttccgcccgcggaatcctccaggatcttcccgccaaggctggggtttccgctccgcggcgtccgagcgccagcggactgcgcatgtgcaggacccagcaggtctagagcttttctgtgtttctccggacttcgagccatggcggtgacggaagcgagcctgttgcgccagtgccccctgcttctgccccagaaccggtcgaaaaccgtgtatgagggattcatctcggctcagggaagagacttccaccttaggatagtgttgcctgaagatttacaactgaagaatgcaagattattatgtagttggcagctgagaacaatacttagtggataccatcgaatagtacaacagagaatgcagcactctcctgatctaatgagctttatgatggagttgaagatgcttttggaagttgccttaaagaatagacaagagctgtatgcactacctcctcctccccagttctactcaagccttattgaagagataggaactcttggttgggataaacttgtgtatgcggatacctgcttcagtaccatcaagttaaaagcagaagatgcttctggtagagagcatttaatcactctcaagttgaaggcaaagtatcctgcagaatcaccagattattttgtggattttcctgttccattttgtgcctcctggacacctcagagctccttaataagcatttatagtcagtttttggcagcaatagaatcactaaaggcattctgggatgttatggatgaaatcgatgagaagacctgggtacttgagccagaaaaacctccacggagtgcaacagcacgcagaattgcattaggtaataatgtttccataaatatagaggtagaccccaggcatcctactatgcttcctgagtgcttctttcttggagctgaccatggtatgacatctgagatttaaacgttttttaatagagtcataaaatccttgcctagcattgttaaattattagacaatattagtatattaatggtagtttttattttttgtctgagacggagttttgctcttgttgcccagtatgtagtgtaatggcgcgatctcggttcaccgcaataatgatagttattttaaatgacaatgtctcagcattctgaactgtataattttgttttttaacataatacatataattttgattttctaatcaagtagttaagaaacattctgtatcaaatgtggctttagaaaccaagagtagagcatgcaattattaaattttttttttttaatctgaagtggtaaaacccctgggaattaagctgagcaggaacatacatttgtggtaggtaccttggcaatataatttttactttttggtgattttacaaagttcacagcataatttttttccccatgctttcagggatccagaaaatagtgtgttacaaaatttgaaagatgttttagaaattgattttccagctcgtgctatcctggaaaaatctgtaagttttatcagtgttttgatattccagacagtattgcataatgaagtttaaatgcttctctcagtgaaaaatgaggctgaaaaaggagggaattagaaaaatattataacacagacttctgatctgcatcaaaaaacttgtttacctttgattggttgttaagtacaactgtctcttggaacagggggattgatttcagggctgcccatggatacaaaaatccacagacattaaagttccacagttaccctgcaggacccatatatagaagaagtcggccctctgtatacagagatttcacataaacacaggttctgcatcttgtcagtactgtatttttgatctgcatttggttaaaaaaaaaatctgtgtataagtagacctgtgcagttcaaacccatgttgttcaagggtcaactatatacttttttcatggtcttcagtagtgacgtcattaatgacagacatttattaaaaataaggggagaactccaaagtagctaatgagatgtttggcttttctacatagtctgtttatggatggctcaaatactgattagcttgatgtaagtgtttgtgaagcagttatagtttctcaaaattgaatagataccactatactgcaaaaataatagaattgatttttgacaaggctgctaaggttgtagactactaaatggtagtgagtttctttttcctttagttacagaattgtgctgtttagtaatcactagctaatatcaattcctttctttaaatactatcagggacattataacaatgtatgatatgggaatattactgatgcccaaacatcttgccagccaaaaatggaatctctttttttagcctagctgtgtatatttgagtggaaaaggaaacaccctacaatagctttgctaggtgttaaatagtaatgtaattatatttcctataatacagcaatatagtcacctttataaaaactatatttataaaacattcttcctgatcttaccttgtgttttaaacacatagatgatttcgtattctaaagtagttagaagaattgtaatgttcccaacataaaaggtaaatgttgaggtgatgaatatcttaattatcctgatgtcatcattaaacactgtatacatgtatcaaaatatcacacataccctcccaaatatgtacaacgaataagttagtgagacacatacgctttttataaatatttttcttttgaaggattttactatggattgtggaatttgttatgcttatcaacttgacggtaccattcctgatcaagtgtgtgataattcccagtgtggacaacctttccatcaaatatgcttatatgaggtaaaaaataaaaatattgtcaagacttttttccgctaacacaacataggaagtattcctgtttgaaatacacagaatctaaaatctgttgagtcaatagtgatcctctcttttgccattaactccttttaccagtttattccagatgcttatgtgcttcatttcttcatcacagttactaatgagtggagaaatgttctgaagtatccaagggagaaaatctatccagaatatattcatggactagcttattgacacataacaaattaaattgatggtacattggaatctttctataaattccttgttaccacaatgtaagcttcataggtttacccgaggtggaggtggttgaaagtggcagtaatacagtgaaaatgaaattagtactatgtagtatctattacttttcaggctgcatttaagaatagaatatatccaatactactacttttcatgttgagaagaatgccttttgtgatctgagtctcacagcactcaggcaatgccactttacttactgtatgtgaagtctactttcattcctgtctttagtgcctggcttcaccttagggcctagttgatacatgataaactgtgtgtaactatatacagaacaccttgcaattgtatgttgccttcggtttcagtcttccttaatatcacatctttacttttgtgattagaggtagcagttggtgccgtctgtactttgccaatggagaacttaggcagaggcatctatttaccttatataaaatcatgaaattacagaaatacaggtcaaattacagaaatactctaagggaacatgtgatttcttttgtaattatgaatattcatttaatttttaaaaattcactggctcatgcttataatcaatgggttgaaaattaacccactgttagtgattcagaccagaactaagagggaaattttcaagagcctgtagtatctttaacagcaggagttgttaatttgtgattaatggatttagggaaagtctatgaatgccaggaacttagtatgcattatttttatgtatgtctattctggggataaagaaaatgcgtaattcttatcagattcttaaaggggcccataatctggttataaaccagtggtttaggccttcaattccatgttgatttcccttgttactcaacatcttaatagtctgctattggctcaggaaatacatcccttactcttgcaaaacaaaattaagctaagtcttctggaataaaaacataatgcacttaaaaacaaagggaatgacatttggagtatctgtaatttgtaatcatgctgacgcttctcctttatcttttaaaatttgcagtggctgagaggactactaactagtagacagagttttaacatcatatttggtgaatgtccatattgtagtaagccaattaccttaaaaatgtctggaaggaaacactgaaataagaatacaacatttcggtgaagagctggaaacttaaaaaattatcaaaaggaattttggtatcatcttcagagaaaaaataaagcaagaaatactaacatcaaaaggacaggtatgatgatgcgataataataaacatctgcgtttgtctcttcactaagagtaaactgggaaattgtaggccaaagtccagttgaactttctaagtctgtgatccccgtgctgactgtggaagtgtatttataccaagatggagatcttgacttcttgaatatatctggactggtaaaatcttgatgaggctcataaaatgagtttgggaattgtgtatagctgattttttgtgggaaactgtttacttcattcaaaggttcttgagactcttgatatttctgtcttctccttgtgctttcctatggaaaaaatacatatatagtttagtttgttagacgtgagttatccaagtatttattttgtgtagtgtgtaagaatgctaaataaaatgttatacaagatcaaaaaattgcgtgttatttttcc

SEQ ID NO: 382275 - DNA, 5363 bp, Homo sapiens
acgtccaggctgtaaaagtcattttattctggaggaaatgcaacaccaaagttgtaacagtctttcaataaagtaaaacagaatcatcgaaagggctcctgggacaattgaggctagaatgatcttggtcagtcagtcctgtggacttgagggcaatcttccctcccactaccggttggggagccctgatgtcgcctcccgcagagcgccacttggcctggcctgcgcttcaccttcatttccgcccgcggaatcctccaggatcttcccgccaaggctggggtttccgctccgcggcgtccgagcgccagcggactgcgcatgtgcaggacccagcaggtctagagcttttctgtgtttctccggacttcgagccatggcggtgacggaagcgagcctgttgcgccagtgccccctgcttctgccccagaaccggtcgaaaaccgtgtatgagggattcatctcggctcagggaagagacttccaccttaggatagtgttgcctgaagatttacaactgaagaatgcaagattattatgtagttggcagctgagaacaatacttagtggataccatcgaatagtacaacagagaatgcagcactctcctgatctaatgagctttatgatggagttgaagatgcttttggaagttgccttaaagaatagacaagagctgtatgcactacctcctcctccccagttctactcaagccttattgaagagataggaactcttggttgggataaacttgtgtatgcggatacctgcttcagtaccatcaagttaaaagcagaagatgcttctggtagagagcatttaatcactctcaagttgaaggcaaagtatcctgcagaatcaccagattattttgtggattttcctgttccattttgtgcctcctggacacctcagagctccttaataagcatttatagtcagtttttggcagcaatagaatcactaaaggcattctgggatgttatggatgaaatcgatgagaagacctgggtacttgagccagaaaaacctccacggagtgcaacagcacgcagaattgcattaggtaataatgtttccataaatatagaggtagaccccaggcatcctactatgcttcctgagtgcttctttcttggagctgaccatggtatgacatctgagatttaaacgttttttaatagagtcataaaatccttgcctagcattgttaaattattagacaatattagtatattaatggtagtttttattttttgtctgagacggagttttgctcttgttgcccagtatgtagtgtaatggcgcgatctcggttcaccgcaataatgatagttattttaaatgacaatgtctcagcattctgaactgtataattttgttttttaacataatacatataattttgattttctaatcaagtagttaagaaacattctgtatcaaatgtggctttagaaaccaagagtagagcatgcaattattaaattttttttttttaatctgaagtggtaaaacccctgggaattaagctgagcaggaacatacatttgtggtaggtaccttggcaatataatttttactttttggtgattttacaaagttcacagcataatttttttccccatgctttcagggatccagaaaatagtgtgttacaaaatttgaaagatgttttagaaattgattttccagctcgtgctatcctggaaaaatctgtaagttttatcagtgttttgatattccagacagtattgcataatgaagtttaaatgcttctctcagtgaaaaatgaggctgaaaaaggagggaattagaaaaatattataacacagacttctgatctgcatcaaaaaacttgtttacctttgattggttgttaagtacaactgtctcttggaacagggggattgatttcagggctgcccatggatacaaaaatccacagacattaaagttccacagttaccctgcaggacccatatatagaagaagtcggccctctgtatacagagatttcacataaacacaggttctgcatcttgtcagtactgtatttttgatctgcatttggttaaaaaaaaaatctgtgtataagtagacctgtgcagttcaaacccatgttgttcaagggtcaactatatacttttttcatggtcttcagtagtgacgtcattaatgacagacatttattaaaaataaggggagaactccaaagtagctaatgagatgtttggcttttctacatagtctgtttatggatggctcaaatactgattagcttgatgtaagtgtttgtgaagcagttatagtttctcaaaattgaatagataccactatactgcaaaaataatagaattgatttttgacaaggctgctaaggttgtagactactaaatggtagtgagtttctttttcctttagttacagaattgtgctgtttagtaatcactagctaatatcaattcctttctttaaatactatcagggacattataacaatgtatgatatgggaatattactgatgcccaaacatcttgccagccaaaaatggaatctctttttttagcctagctgtgtatatttgagtggaaaaggaaacaccctacaatagctttgctaggtgttaaatagtaatgtaattatatttcctataatacagcaatatagtcacctttataaaaactatatttataaaacattcttcctgatcttaccttgtgttttaaacacatagatgatttcgtattctaaagtagttagaagaattgtaatgttcccaacataaaaggtaaatgttgaggtgatgaatatcttaattatcctgatgtcatcattaaacactgtatacatgtatcaaaatatcacacataccctcccaaatatgtacaacgaataagttagtgagacacatacgctttttataaatatttttcttttgaaggattttactatggattgtggaatttgttatgcttatcaacttgacggtaccattcctgatcaagtgtgtgataattcccagtgtggacaacctttccatcaaatatgcttatatgaggtaaaaaataaaaatattgtcaagacttttttccgctaacacaacataggaagtattcctgtttgaaatacacagaatctaaaatctgttgagtcaatagtgatcctctcttttgccattaactccttttaccagtttattccagatgcttatgtgcttcatttcttcatcacagttactaatgagtggagaaatgttctgaagtatccaagggagaaaatctatccagaatatattcatggactagcttattgacacataacaaattaaattgatggtacattggaatctttctataaattccttgttaccacaatgtaagcttcataggtttacccgaggtggaggtggttgaaagtggcagtaatacagtgaaaatgaaattagtactatgtagtatctattacttttcaggctgcatttaagaatagaatatatccaatactactacttttcatgttgagaagaatgccttttgtgatctgagtctcacagcactcaggcaatgccactttacttactgtatgtgaagtctactttcattcctgtctttagtgcctggcttcaccttagggcctagttgatacatgataaactgtgtgtaactatatacagaacaccttgcaattgtatgttgccttcggtttcagtcttccttaatatcacatctttacttttgtgattagaggtagcagttggtgccgtctgtactttgccaatggagaacttaggcagaggcatctatttaccttatataaaatcatgaaattacagaaatacaggtcaaattacagaaatactctaagggaacatgtgatttcttttgtaattatgaatattcatttaatttttaaaaattcactggctcatgcttataatcaatgggttgaaaattaacccactgttagtgattcagaccagaactaagagggaaattttcaagagcctgtagtatctttaacagcaggagttgttaatttgtgattaatggatttagggaaagtctatgaatgccaggaacttagtatgcattatttttatgtatgtctattctggggataaagaaaatgcgtaattcttatcagattcttaaaggggcccataatctggttataaaccagtggtttaggccttcaattccatgttgatttcccttgttactcaacatcttaatagtctgctattggctcaggaaatacatcccttactcttgcaaaacaaaattaagctaagtcttctggaataaaaacataatgcacttaaaaacaaagggaatgacatttggagtatctgtaatttgtaatcatgctgacgcttctcctttatcttttaaaatttgcagtggctgagaggactactaactagtagacagagttttaacatcatatttggtgaatgtccatattgtagtaaggtaagcaaattgttaatcacatctcataaaatgtgcctagctttcagtaatatgttctagaagatagatctatatagtatatcagtttatctaaaacttttgaaactcattctctgtatttctatttttcaaattctctgatcaaaaacattaaactccttttctagatttcctaggtgatctgaaacttcagaagtgttttccaaactgtactatgacactattctatgacactatttctagtacaaagcaattttattttttagagtgtccacaaactttgttaaaatatgttctctttttaaagccaattaccttaaaaatgtctggaaggaaacactgaaataagaatacaacatttcggtgaagagctggaaacttaaaaaattatcaaaaggaattttggtatcatcttcagagaaaaaataaagcaagaaatactaacatcaaaaggacaggtatgatgatgcgataataataaacatctgcgtttgtctcttcactaagagtaaactgggaaattgtaggccaaagtccagttgaactttctaagtctgtgatccccgtgctgactgtggaagtgtatttataccaagatggagatcttgacttcttgaatatatctggactggtaaaatcttgatgaggctcataaaatgagtttgggaattgtgtatagctgattttttgtgggaaactgtttacttcattcaaaggttcttgagactcttgatatttctgtcttctccttgtgctttcctatggaaaaaatacatatatagtttagtttgttagacgtgagttatccaagtatttattttgtgtagtgtgtaagaatgctaaataaaatgttatacaagatcaaaaaattgcgtgttatttttcc

SEQ ID NO: 382276 - DNA, 4999 bp, Homo sapiens
acgtccaggctgtaaaagtcattttattctggaggaaatgcaacaccaaagttgtaacagtctttcaataaagtaaaacagaatcatcgaaagggctcctgggacaattgaggctagaatgatcttggtcagtcagtcctgtggacttgagggcaatcttccctcccactaccggttggggagccctgatgtcgcctcccgcagagcgccacttggcctggcctgcgcttcaccttcatttccgcccgcggaatcctccaggatcttcccgccaaggctggggtttccgctccgcggcgtccgagcgccagcggactgcgcatgtgcaggacccagcaggtctagagcttttctgtgtttctccggacttcgagccatggcggtgacggaagcgagcctgttgcgccagtgccccctgcttctgccccagaaccggtcgaaaaccgtgtatgagggattcatctcggctcagggaagagacttccaccttaggatagtgttgcctgaagatttacaactgaagaatgcaagattattatgtagttggcagctgagaacaatacttagtggataccatcgaatagtacaacaggaagttgccttaaagaatagacaagagctgtatgcactacctcctcctccccagttctactcaagccttattgaagagataggaactcttggttgggataaacttgtgtatgcggatacctgcttcagtaccatcaagttaaaagcagaagatgcttctggtagagagcatttaatcactctcaagttgaaggcaaagtatcctgcagaatcaccagattattttgtggattttcctgttccattttgtgcctcctggacacctcagagctccttaataagcatttatagtcagtttttggcagcaatagaatcactaaaggcattctgggatgttatggatgaaatcgatgagaagacctgggtacttgagccagaaaaacctccacggagtgcaacagcacgcagaattgcattaggtaataatgtttccataaatatagaggtagaccccaggcatcctactatgcttcctgagtgcttctttcttggagctgaccatggtatgacatctgagatttaaacgttttttaatagagtcataaaatccttgcctagcattgttaaattattagacaatattagtatattaatggtagtttttattttttgtctgagacggagttttgctcttgttgcccagtatgtagtgtaatggcgcgatctcggttcaccgcaataatgatagttattttaaatgacaatgtctcagcattctgaactgtataattttgttttttaacataatacatataattttgattttctaatcaagtagttaagaaacattctgtatcaaatgtggctttagaaaccaagagtagagcatgcaattattaaattttttttttttaatctgaagtggtaaaacccctgggaattaagctgagcaggaacatacatttgtggtaggtaccttggcaatataatttttactttttggtgattttacaaagttcacagcataatttttttccccatgctttcagggatccagaaaatagtgtgttacaaaatttgaaagatgttttagaaattgattttccagctcgtgctatcctggaaaaatctgtaagttttatcagtgttttgatattccagacagtattgcataatgaagtttaaatgcttctctcagtgaaaaatgaggctgaaaaaggagggaattagaaaaatattataacacagacttctgatctgcatcaaaaaacttgtttacctttgattggttgttaagtacaactgtctcttggaacagggggattgatttcagggctgcccatggatacaaaaatccacagacattaaagttccacagttaccctgcaggacccatatatagaagaagtcggccctctgtatacagagatttcacataaacacaggttctgcatcttgtcagtactgtatttttgatctgcatttggttaaaaaaaaaatctgtgtataagtagacctgtgcagttcaaacccatgttgttcaagggtcaactatatacttttttcatggtcttcagtagtgacgtcattaatgacagacatttattaaaaataaggggagaactccaaagtagctaatgagatgtttggcttttctacatagtctgtttatggatggctcaaatactgattagcttgatgtaagtgtttgtgaagcagttatagtttctcaaaattgaatagataccactatactgcaaaaataatagaattgatttttgacaaggctgctaaggttgtagactactaaatggtagtgagtttctttttcctttagttacagaattgtgctgtttagtaatcactagctaatatcaattcctttctttaaatactatcagggacattataacaatgtatgatatgggaatattactgatgcccaaacatcttgccagccaaaaatggaatctctttttttagcctagctgtgtatatttgagtggaaaaggaaacaccctacaatagctttgctaggtgttaaatagtaatgtaattatatttcctataatacagcaatatagtcacctttataaaaactatatttataaaacattcttcctgatcttaccttgtgttttaaacacatagatgatttcgtattctaaagtagttagaagaattgtaatgttcccaacataaaaggtaaatgttgaggtgatgaatatcttaattatcctgatgtcatcattaaacactgtatacatgtatcaaaatatcacacataccctcccaaatatgtacaacgaataagttagtgagacacatacgctttttataaatatttttcttttgaaggattttactatggattgtggaatttgttatgcttatcaacttgacggtaccattcctgatcaagtgtgtgataattcccagtgtggacaacctttccatcaaatatgcttatatgaggtaaaaaataaaaatattgtcaagacttttttccgctaacacaacataggaagtattcctgtttgaaatacacagaatctaaaatctgttgagtcaatagtgatcctctcttttgccattaactccttttaccagtttattccagatgcttatgtgcttcatttcttcatcacagttactaatgagtggagaaatgttctgaagtatccaagggagaaaatctatccagaatatattcatggactagcttattgacacataacaaattaaattgatggtacattggaatctttctataaattccttgttaccacaatgtaagcttcataggtttacccgaggtggaggtggttgaaagtggcagtaatacagtgaaaatgaaattagtactatgtagtatctattacttttcaggctgcatttaagaatagaatatatccaatactactacttttcatgttgagaagaatgccttttgtgatctgagtctcacagcactcaggcaatgccactttacttactgtatgtgaagtctactttcattcctgtctttagtgcctggcttcaccttagggcctagttgatacatgataaactgtgtgtaactatatacagaacaccttgcaattgtatgttgccttcggtttcagtcttccttaatatcacatctttacttttgtgattagaggtagcagttggtgccgtctgtactttgccaatggagaacttaggcagaggcatctatttaccttatataaaatcatgaaattacagaaatacaggtcaaattacagaaatactctaagggaacatgtgatttcttttgtaattatgaatattcatttaatttttaaaaattcactggctcatgcttataatcaatgggttgaaaattaacccactgttagtgattcagaccagaactaagagggaaattttcaagagcctgtagtatctttaacagcaggagttgttaatttgtgattaatggatttagggaaagtctatgaatgccaggaacttagtatgcattatttttatgtatgtctattctggggataaagaaaatgcgtaattcttatcagattcttaaaggggcccataatctggttataaaccagtggtttaggccttcaattccatgttgatttcccttgttactcaacatcttaatagtctgctattggctcaggaaatacatcccttactcttgcaaaacaaaattaagctaagtcttctggaataaaaacataatgcacttaaaaacaaagggaatgacatttggagtatctgtaatttgtaatcatgctgacgcttctcctttatcttttaaaatttgcagtggctgagaggactactaactagtagacagagttttaacatcatatttggtgaatgtccatattgtagtaagccaattaccttaaaaatgtctggaaggaaacactgaaataagaatacaacatttcggtgaagagctggaaacttaaaaaattatcaaaaggaattttggtatcatcttcagagaaaaaataaagcaagaaatactaacatcaaaaggacaggtatgatgatgcgataataataaacatctgcgtttgtctcttcactaagagtaaactgggaaattgtaggccaaagtccagttgaactttctaagtctgtgatccccgtgctgactgtggaagtgtatttataccaagatggagatcttgacttcttgaatatatctggactggtaaaatcttgatgaggctcataaaatgagtttgggaattgtgtatagctgattttttgtgggaaactgtttacttcattcaaaggttcttgagactcttgatatttctgtcttctccttgtgctttcctatggaaaaaatacatatatagtttagtttgttagacgtgagttatccaagtatttattttgtgtagtgtgtaagaatgctaaataaaatgttatacaagatcaaaaaattgcgtgttatttttcc

SEQ ID NO: 382277 - DNA, 4589 bp, Homo sapiens
tgcgaaattaggttacttattgttttggttattaatgaacaattgccaatgtgaatgaaatcttttgttaaattataagggaaagtttcacatgcagcaaaataatacagaaaatgtttttataaatttttataaaacttgaatctttaatgtttgtttttaccatttactgtattgttggtctttttacatttggccatagttctatgaaatgtaaactttttcaggaaagccatgaaaaataatttagatagttatttcttaaacatgtgacttgtgatagttttgatattaaagacctttatcactccacagaacatttttatttaaactttaatacagttgaccagaattgcaatctaattaaatatatcaatttgttgactggctgaaatttaagatcctttcaatgataatcatatcaaaattacttcttttggttcaattatatttaccattacataaaactacaaaacatttggttaatctttccgtgggtatacagtgaaataggtagccagaccaacacctctttattttttattgggttgtttgatgagctgttctacttctaaaagatttaatcttgtttcattctaggtaataatgtttccataaatatagaggtagaccccaggcatcctactatgcttcctgagtgcttctttcttggagctgaccatggtatgacatctgagatttaaacgttttttaatagagtcataaaatccttgcctagcattgttaaattattagacaatattagtatattaatggtagtttttattttttgtctgagacggagttttgctcttgttgcccagtatgtagtgtaatggcgcgatctcggttcaccgcaataatgatagttattttaaatgacaatgtctcagcattctgaactgtataattttgttttttaacataatacatataattttgattttctaatcaagtagttaagaaacattctgtatcaaatgtggctttagaaaccaagagtagagcatgcaattattaaattttttttttttaatctgaagtggtaaaacccctgggaattaagctgagcaggaacatacatttgtggtaggtaccttggcaatataatttttactttttggtgattttacaaagttcacagcataatttttttccccatgctttcagggatccagaaaatagtgtgttacaaaatttgaaagatgttttagaaattgattttccagctcgtgctatcctggaaaaatctgtaagttttatcagtgttttgatattccagacagtattgcataatgaagtttaaatgcttctctcagtgaaaaatgaggctgaaaaaggagggaattagaaaaatattataacacagacttctgatctgcatcaaaaaacttgtttacctttgattggttgttaagtacaactgtctcttggaacagggggattgatttcagggctgcccatggatacaaaaatccacagacattaaagttccacagttaccctgcaggacccatatatagaagaagtcggccctctgtatacagagatttcacataaacacaggttctgcatcttgtcagtactgtatttttgatctgcatttggttaaaaaaaaaatctgtgtataagtagacctgtgcagttcaaacccatgttgttcaagggtcaactatatacttttttcatggtcttcagtagtgacgtcattaatgacagacatttattaaaaataaggggagaactccaaagtagctaatgagatgtttggcttttctacatagtctgtttatggatggctcaaatactgattagcttgatgtaagtgtttgtgaagcagttatagtttctcaaaattgaatagataccactatactgcaaaaataatagaattgatttttgacaaggctgctaaggttgtagactactaaatggtagtgagtttctttttcctttagttacagaattgtgctgtttagtaatcactagctaatatcaattcctttctttaaatactatcagggacattataacaatgtatgatatgggaatattactgatgcccaaacatcttgccagccaaaaatggaatctctttttttagcctagctgtgtatatttgagtggaaaaggaaacaccctacaatagctttgctaggtgttaaatagtaatgtaattatatttcctataatacagcaatatagtcacctttataaaaactatatttataaaacattcttcctgatcttaccttgtgttttaaacacatagatgatttcgtattctaaagtagttagaagaattgtaatgttcccaacataaaaggtaaatgttgaggtgatgaatatcttaattatcctgatgtcatcattaaacactgtatacatgtatcaaaatatcacacataccctcccaaatatgtacaacgaataagttagtgagacacatacgctttttataaatatttttcttttgaaggattttactatggattgtggaatttgttatgcttatcaacttgacggtaccattcctgatcaagtgtgtgataattcccagtgtggacaacctttccatcaaatatgcttatatgaggtaaaaaataaaaatattgtcaagacttttttccgctaacacaacataggaagtattcctgtttgaaatacacagaatctaaaatctgttgagtcaatagtgatcctctcttttgccattaactccttttaccagtttattccagatgcttatgtgcttcatttcttcatcacagttactaatgagtggagaaatgttctgaagtatccaagggagaaaatctatccagaatatattcatggactagcttattgacacataacaaattaaattgatggtacattggaatctttctataaattccttgttaccacaatgtaagcttcataggtttacccgaggtggaggtggttgaaagtggcagtaatacagtgaaaatgaaattagtactatgtagtatctattacttttcaggctgcatttaagaatagaatatatccaatactactacttttcatgttgagaagaatgccttttgtgatctgagtctcacagcactcaggcaatgccactttacttactgtatgtgaagtctactttcattcctgtctttagtgcctggcttcaccttagggcctagttgatacatgataaactgtgtgtaactatatacagaacaccttgcaattgtatgttgccttcggtttcagtcttccttaatatcacatctttacttttgtgattagaggtagcagttggtgccgtctgtactttgccaatggagaacttaggcagaggcatctatttaccttatataaaatcatgaaattacagaaatacaggtcaaattacagaaatactctaagggaacatgtgatttcttttgtaattatgaatattcatttaatttttaaaaattcactggctcatgcttataatcaatgggttgaaaattaacccactgttagtgattcagaccagaactaagagggaaattttcaagagcctgtagtatctttaacagcaggagttgttaatttgtgattaatggatttagggaaagtctatgaatgccaggaacttagtatgcattatttttatgtatgtctattctggggataaagaaaatgcgtaattcttatcagattcttaaaggggcccataatctggttataaaccagtggtttaggccttcaattccatgttgatttcccttgttactcaacatcttaatagtctgctattggctcaggaaatacatcccttactcttgcaaaacaaaattaagctaagtcttctggaataaaaacataatgcacttaaaaacaaagggaatgacatttggagtatctgtaatttgtaatcatgctgacgcttctcctttatcttttaaaatttgcagtggctgagaggactactaactagtagacagagttttaacatcatatttggtgaatgtccatattgtagtaagccaattaccttaaaaatgtctggaaggaaacactgaaataagaatacaacatttcggtgaagagctggaaacttaaaaaattatcaaaaggaattttggtatcatcttcagagaaaaaataaagcaagaaatactaacatcaaaaggacaggtatgatgatgcgataataataaacatctgcgtttgtctcttcactaagagtaaactgggaaattgtaggccaaagtccagttgaactttctaagtctgtgatccccgtgctgactgtggaagtgtatttataccaagatggagatcttgacttcttgaatatatctggactggtaaaatcttgatgaggctcataaaatgagtttgggaattgtgtatagctgattttttgtgggaaactgtttacttcattcaaaggttcttgagactcttgatatttctgtcttctccttgtgctttcctatggaaaaaatacatatatagtttagtttgttagacgtgagttatccaagtatttattttgtgtagtgtgtaagaatgctaaataaaatgttatacaagatcaaaaaattgcgtgttatttttcc

SEQ ID NO: 382278 - DNA, 2487 bp, Homo sapiens
acgtccaggctgtaaaagtcattttattctggaggaaatgcaacaccaaagttgtaacagtctttcaataaagtaaaacagaatcatcgaaagggctcctgggacaattgaggctagaatgatcttggtcagtcagtcctgtggacttgagggcaatcttccctcccactaccggttggggagccctgatgtcgcctcccgcagagcgccacttggcctggcctgcgcttcaccttcatttccgcccgcggaatcctccaggatcttcccgccaaggctggggtttccgctccgcggcgtccgagcgccagcggactgcgcatgtgcaggacccagcaggtctagagcttttctgtgtttctccggacttcgagccatggcggtgacggaagcgagcctgttgcgccagtgccccctgcttctgccccagaaccggtcgaaaaccgtgtatgagggattcatctcggctcagggaagagacttccaccttaggatagtgttgcctgaagatttacaactgaagaatgcaagattattatgtagttggcagctgagaacaatacttagtggataccatcgaatagtacaacagagaatgcagcactctcctgatctaatgagctttatgatggagttgaagatgcttttggaagttgccttaaagaatagacaagagctgtatgcactacctcctcctccccagttctactcaagccttattgaagagataggaactcttggttgggataaacttgtgtatgcggatacctgcttcagtaccatcaagttaaaagcagaagatgcttctggtagagagcatttaatcactctcaagttgaaggcaaagtatcctgcagaatcaccagattattttgtggattttcctgttccattttgtgcctcctggacacctcagagctccttaataagcatttatagtcagtttttggcagcaatagaatcactaaaggcattctgggatgttatggatgaaatcgatgagaagacctgggtacttgagccagaaaaacctccacggagtgcaacagcacgcagaattgcattaggtaataatgtttccataaatatagaggtagaccccaggcatcctactatgcttcctgagtgcttctttcttggagctgaccatggtatgacatctgagatttaaacgttttttaatagagtcataaaatccttgcctagcattgttaaattattagacaatattagtatattaatggtagtttttattttttgtctgagacggagttttgctcttgttgcccagtatgtagtgtaatggcgcgatctcggttcaccgcaataatgatagttattttaaatgacaatgtctcagcattctgaactgtataattttgttttttaacataatacatataattttgattttctaatcaagtagttaagaaacattctgtatcaaatgtggctttagaaaccaagagtagagcatgcaattattaaattttttttttttaatctgaagtggtaaaacccctgggaattaagctgagcaggaacatacatttgtggtaggtaccttggcaatataatttttactttttggtgattttacaaagttcacagcataatttttttccccatgctttcagggatccagaaaatagtgtgttacaaaatttgaaagatgttttagaaattgattttccagctcgtgctatcctggaaaaatctgattttactatggattgtggaatttgttatgcttatcaacttgacggtaccattcctgatcaagtgtgtgataattcccagtgtggacaacctttccatcaaatatgcttatatgagtggctgagaggactactaactagtagacagagttttaacatcatatttggtgaatgtccatattgtagtaagccaattaccttaaaaatgtctggaaggaaacactgaaataagaatacaacatttcggtgaagagctggaaacttaaaaaattatcaaaaggaattttggtatcatcttcagagaaaaaataaagcaagaaatactaacatcaaaaggacaggtatgatgatgcgataataataaacatctgcgtttgtctcttcactaagagtaaactgggaaattgtaggccaaagtccagttgaactttctaagtctgtgatccccgtgctgactgtggaagtgtatttataccaagatggagatcttgacttcttgaatatatctggactggtaaaatcttgatgaggctcataaaatgagtttgggaattgtgtatagctgattttttgtgggaaactgtttacttcattcaaaggttcttgagactcttgatatttctgtcttctccttgtgctttcctatggaaaaaatacatatatagtttagtttgttagacgtgagttatccaagtatttattttgtgtagtgtgtaagaatgctaaataaaatgttatacaagatcaaaaaattgcgtgttatttttcc

SEQ ID NO: 382279 - DNA, 5482 bp, Homo sapiens
acgtccaggctgtaaaagtcattttattctggaggaaatgcaacaccaaagttgtaacagtctttcaataaagtaaaacagaatcatcgaaagggctcctgggacaattgaggctagaatgatcttggtcagtcagtcctgtggacttgagggcaatcttccctcccactaccggttggggagccctgatgtcgcctcccgcagagcgccacttggcctggcctgcgcttcaccttcatttccgcccgcggaatcctccaggatcttcccgccaaggctggggtttccgctccgcggcgtccgagcgccagcggactgcgcatgtgcaggacccagcaggtctagagcttttctgtgtttctccggacttcgagccatggcggtgacggaagcgagcctgttgcgccagtgccccctgcttctgccccagaaccggtcgaaaaccgtgtatgagggattcatctcggctcagggaagagacttccaccttaggatagtgttgcctgaagatttacaactgaagaatgcaagattattatgtagttggcagctgagaacaatacttagtggataccatcgaatagtacaacagagaatgcagcactctcctgatctaatgagctttatgatggagttgaagatgcttttggaagttgccttaaagaatagacaagagctgtatgcactacctcctcctccccagttctactcaagccttattgaagagataggaactcttggttgggataaacttgtgtatgcggatacctgcttcagtaccatcaagttaaaagcagaagatgcttctggtagagagcatttaatcactctcaagttgaaggcaaagtatcctgcagaatcaccagattattttgtggattttcctgttccattttgtgcctcctggacacctcagagctccttaataagcatttatagtcagtttttggcagcaatagaatcactaaaggcattctgggatgttatggatgaaatcgatgagaagacctgggtacttgagccagaaaaacctccacggagtgcaacagcacgcagaattgcattaggtaataatgtttccataaatatagaggtagaccccaggcatcctactatgcttcctgagtgcttctttcttggagctgaccatggtatgacatctgagatttaaacgttttttaatagagtcataaaatccttgcctagcattgttaaattattagacaatattagtatattaatggtagtttttattttttgtctgagacggagttttgctcttgttgcccagtatgtagtgtaatggcgcgatctcggttcaccgcaataatgatagttattttaaatgacaatgtctcagcattctgaactgtataattttgttttttaacataatacatataattttgattttctaatcaagtagttaagaaacattctgtatcaaatgtggctttagaaaccaagagtagagcatgcaattattaaattttttttttttaatctgaagtggtaaaacccctgggaattaagctgagcaggaacatacatttgtggtaggtaccttggcaatataatttttactttttggtgattttacaaagttcacagcataatttttttccccatgctttcagggatccagaaaatagtgtgttacaaaatttgaaagatgttttagaaattgattttccagctcgtgctatcctggaaaaatctgtaagttttatcagtgttttgatattccagacagtattgcataatgaagtttaaatgcttctctcagtgaaaaatgaggctgaaaaaggagggaattagaaaaatattataacacagacttctgatctgcatcaaaaaacttgtttacctttgattggttgttaagtacaactgtctcttggaacagggggattgatttcagggctgcccatggatacaaaaatccacagacattaaagttccacagttaccctgcaggacccatatatagaagaagtcggccctctgtatacagagatttcacataaacacaggttctgcatcttgtcagtactgtatttttgatctgcatttggttaaaaaaaaaatctgtgtataagtagacctgtgcagttcaaacccatgttgttcaagggtcaactatatacttttttcatggtcttcagtagtgacgtcattaatgacagacatttattaaaaataaggggagaactccaaagtagctaatgagatgtttggcttttctacatagtctgtttatggatggctcaaatactgattagcttgatgtaagtgtttgtgaagcagttatagtttctcaaaattgaatagataccactatactgcaaaaataatagaattgatttttgacaaggctgctaaggttgtagactactaaatggtagtgagtttctttttcctttagttacagaattgtgctgtttagtaatcactagctaatatcaattcctttctttaaatactatcagggacattataacaatgtatgatatgggaatattactgatgcccaaacatcttgccagccaaaaatggaatctctttttttagcctagctgtgtatatttgagtggaaaaggaaacaccctacaatagctttgctaggtgttaaatagtaatgtaattatatttcctataatacagcaatatagtcacctttataaaaactatatttataaaacattcttcctgatcttaccttgtgttttaaacacatagatgatttcgtattctaaagtagttagaagaattgtaatgttcccaacataaaaggtaaatgttgaggtgatgaatatcttaattatcctgatgtcatcattaaacactgtatacatgtatcaaaatatcacacataccctcccaaatatgtacaacgaataagttagtgagacacatacgctttttataaatatttttcttttgaaggattttactatggattgtggaatttgttatgcttatcaacttgacggtaccattcctgatcaagtgtgtgataattcccagtgtggacaacctttccatcaaatatgcttatatgaggtaaaaaataaaaatattgtcaagacttttttccgctaacacaacataggaagtattcctgtttgaaatacacagaatctaaaatctgttgagtcaatagtgatcctctcttttgccattaactccttttaccagtttattccagatgcttatgtgcttcatttcttcatcacagttactaatgagtggagaaatgttctgaagtatccaagggagaaaatctatccagaatatattcatggactagcttattgacacataacaaattaaattgatggtacattggaatctttctataaattccttgttaccacaatgtaagcttcataggtttacccgaggtggaggtggttgaaagtggcagtaatacagtgaaaatgaaattagtactatgtagtatctattacttttcaggctgcatttaagaatagaatatatccaatactactacttttcatgttgagaagaatgccttttgtgatctgagtctcacagcactcaggcaatgccactttacttactgtatgtgaagtctactttcattcctgtctttagtgcctggcttcaccttagggcctagttgatacatgataaactgtgtgtaactatatacagaacaccttgcaattgtatgttgccttcggtttcagtcttccttaatatcacatctttacttttgtgattagaggtagcagttggtgccgtctgtactttgccaatggagaacttaggcagaggcatctatttaccttatataaaatcatgaaattacagaaatacaggtcaaattacagaaatactctaagggaacatgtgatttcttttgtaattatgaatattcatttaatttttaaaaattcactggctcatgcttataatcaatgggttgaaaattaacccactgttagtgattcagaccagaactaagagggaaattttcaagagcctgtagtatctttaacagcaggagttgttaatttgtgattaatggatttagggaaagtctatgaatgccaggaacttagtatgcattatttttatgtatgtctattctggggataaagaaaatgcgtaattcttatcagattcttaaaggggcccataatctggttataaaccagtggtttaggccttcaattccatgttgatttcccttgttactcaacatcttaatagtctgctattggctcaggaaatacatcccttactcttgcaaaacaaaattaagctaagtcttctggaataaaaacataatgcacttaaaaacaaagggaatgacatttggagtatctgtaatttgtaatcatgctgacgcttctcctttatcttttaaaatttgcagtggctgagaggactactaactagtagacagagttttaacatcatatttggtgaatgtccatattgtagtaaggtaagcaaattgttaatcacatctcataaaatgtgcctagctttcagtaatatgttctagaagatagatctatatagtatatcagtttatctaaaacttttgaaactcattctctgtatttctatttttcaaattctctgatcaaaaacattaaactccttttctagatttcctaggtgatctgaaacttcagaagtgttttccaaactgtactatgacactattctatgacactatttctagtacaaagcaattttattttttagagtgtccacaaactttgttaaaatatgttctctttttaaagccaattaccttaaaaatgtctggaaggaaacactgaaataagaatacaacatttcggtgaagagctggaaacttaaaaaattatcaaaaggaattttggtatcatcttcagagaaaaaataaagcaagaaatactaacatcaaaaggacaggtatgatgatgcgataataataaacatctgcgtttgtctcttcactaagagtaaactgggaaattgtaggccaaagtccagttgaactttctaagtctgtgatccccgtgctgactgtggaagtgtatttataccaagatggagatcttgacttcttgaatatatctggactggtaaaatcttgatgaggctcataaaatgagtttgggaattgtgtatagctgattttttgtgggaaactgtttacttcattcaaaggttcttgagactcttgatatttctgtcttctccttgtgctttcctgagctgcttcattgttcatcaatccaatcagtttctcctctttctgcactttccatgttgcacaggactcagcgcttctctcactgtggacttttttttcgattaacctattgtgtgccttgttgacttgctttgttgcagccttttgtgaatcaactttttgactgtttggagtatggacatttatactctgtccttttgtggaaaagtccagtggtcctaaaggtattccatgagggttcaa

SEQ ID NO: 382280 - DNA, 5293 bp, Homo sapiens
  misc_feature (5221)..(5221): n is a, c, g, or t
  misc_feature (5281)..(5281): n is a, c, g, or t
acgtccaggctgtaaaagtcattttattctggaggaaatgcaacaccaaagttgtaacagtctttcaataaagtaaaacagaatcatcgaaagggctcctgggacaattgaggctagaatgatcttggtcagtcagtcctgtggacttgagggcaatcttccctcccactaccggttggggagccctgatgtcgcctcccgcagagcgccacttggcctggcctgcgcttcaccttcatttccgcccgcggaatcctccaggatcttcccgccaaggctggggtttccgctccgcggcgtccgagcgccagcggactgcgcatgtgcaggacccagcaggtctagagcttttctgtgtttctccggacttcgagccatggcggtgacggaagcgagcctgttgcgccagtgccccctgcttctgccccagaaccggtcgaaaaccgtgtatgagggattcatctcggctcagggaagagacttccaccttaggatagtgttgcctgaagatttacaactgaagaatgcaagattattatgtagttggcagctgagaacaatacttagtggataccatcgaatagtacaacagagaatgcagcactctcctgatctaatgagctttatgatggagttgaagatgcttttggaagttgccttaaagaatagacaagagctgtatgcactacctcctcctccccagttctactcaagccttattgaagagataggaactcttggttgggataaacttgtgtatgcggatacctgcttcagtaccatcaagttaaaagcagaagatgcttctggtagagagcatttaatcactctcaagttgaaggcaaagtatcctgcagaatcaccagattattttgtggattttcctgttccattttgtgcctcctggacacctcagagctccttaataagcatttatagtcagtttttggcagcaatagaatcactaaaggcattctgggatgttatggatgaaatcgatgagaagacctgggtacttgagccagaaaaacctccacggagtgcaacagcacgcagaattgcattaggtaataatgtttccataaatatagaggtagaccccaggcatcctactatgcttcctgagtgcttctttcttggagctgaccatggtatgacatctgagatttaaacgttttttaatagagtcataaaatccttgcctagcattgttaaattattagacaatattagtatattaatggtagtttttattttttgtctgagacggagttttgctcttgttgcccagtatgtagtgtaatggcgcgatctcggttcaccgcaataatgatagttattttaaatgacaatgtctcagcattctgaactgtataattttgttttttaacataatacatataattttgattttctaatcaagtagttaagaaacattctgtatcaaatgtggctttagaaaccaagagtagagcatgcaattattaaattttttttttttaatctgaagtggtaaaacccctgggaattaagctgagcaggaacatacatttgtggtaggtaccttggcaatataatttttactttttggtgattttacaaagttcacagcataatttttttccccatgctttcagggatccagaaaatagtgtgttacaaaatttgaaagatgttttagaaattgattttccagctcgtgctatcctggaaaaatctgtaagttttatcagtgttttgatattccagacagtattgcataatgaagtttaaatgcttctctcagtgaaaaatgaggctgaaaaaggagggaattagaaaaatattataacacagacttctgatctgcatcaaaaaacttgtttacctttgattggttgttaagtacaactgtctcttggaacagggggattgatttcagggctgcccatggatacaaaaatccacagacattaaagttccacagttaccctgcaggacccatatatagaagaagtcggccctctgtatacagagatttcacataaacacaggttctgcatcttgtcagtactgtatttttgatctgcatttggttaaaaaaaaaatctgtgtataagtagacctgtgcagttcaaacccatgttgttcaagggtcaactatatacttttttcatggtcttcagtagtgacgtcattaatgacagacatttattaaaaataaggggagaactccaaagtagctaatgagatgtttggcttttctacatagtctgtttatggatggctcaaatactgattagcttgatgtaagtgtttgtgaagcagttatagtttctcaaaattgaatagataccactatactgcaaaaataatagaattgatttttgacaaggctgctaaggttgtagactactaaatggtagtgagtttctttttcctttagttacagaattgtgctgtttagtaatcactagctaatatcaattcctttctttaaatactatcagggacattataacaatgtatgatatgggaatattactgatgcccaaacatcttgccagccaaaaatggaatctctttttttagcctagctgtgtatatttgagtggaaaaggaaacaccctacaatagctttgctaggtgttaaatagtaatgtaattatatttcctataatacagcaatatagtcacctttataaaaactatatttataaaacattcttcctgatcttaccttgtgttttaaacacatagatgatttcgtattctaaagtagttagaagaattgtaatgttcccaacataaaaggtaaatgttgaggtgatgaatatcttaattatcctgatgtcatcattaaacactgtatacatgtatcaaaatatcacacataccctcccaaatatgtacaacgaataagttagtgagacacatacgctttttataaatatttttcttttgaaggattttactatggattgtggaatttgttatgcttatcaacttgacggtaccattcctgatcaagtgtgtgataattcccagtgtggacaacctttccatcaaatatgcttatatgaggtaaaaaataaaaatattgtcaagacttttttccgctaacacaacataggaagtattcctgtttgaaatacacagaatctaaaatctgttgagtcaatagtgatcctctcttttgccattaactccttttaccagtttattccagatgcttatgtgcttcatttcttcatcacagttactaatgagtggagaaatgttctgaagtatccaagggagaaaatctatccagaatatattcatggactagcttattgacacataacaaattaaattgatggtacattggaatctttctataaattccttgttaccacaatgtaagcttcataggtttacccgaggtggaggtggttgaaagtggcagtaatacagtgaaaatgaaattagtactatgtagtatctattacttttcaggctgcatttaagaatagaatatatccaatactactacttttcatgttgagaagaatgccttttgtgatctgagtctcacagcactcaggcaatgccactttacttactgtatgtgaagtctactttcattcctgtctttagtgcctggcttcaccttagggcctagttgatacatgataaactgtgtgtaactatatacagaacaccttgcaattgtatgttgccttcggtttcagtcttccttaatatcacatctttacttttgtgattagaggtagcagttggtgccgtctgtactttgccaatggagaacttaggcagaggcatctatttaccttatataaaatcatgaaattacagaaatacaggtcaaattacagaaatactctaagggaacatgtgatttcttttgtaattatgaatattcatttaatttttaaaaattcactggctcatgcttataatcaatgggttgaaaattaacccactgttagtgattcagaccagaactaagagggaaattttcaagagcctgtagtatctttaacagcaggagttgttaatttgtgattaatggatttagggaaagtctatgaatgccaggaacttagtatgcattatttttatgtatgtctattctggggataaagaaaatgcgtaattcttatcagattcttaaaggggcccataatctggttataaaccagtggtttaggccttcaattccatgttgatttcccttgttactcaacatcttaatagtctgctattggctcaggaaatacatcccttactcttgcaaaacaaaattaagctaagtcttctggaataaaaacataatgcacttaaaaacaaagggaatgacatttggagtatctgtaatttgtaatcatgctgacgcttctcctttatcttttaaaatttgcagtggctgagaggactactaactagtagacagagttttaacatcatatttggtgaatgtccatattgtagtaaggtaagcaaattgttaatcacatctcataaaatgtgcctagctttcagtaatatgttctagaagatagatctatatagtatatcagtttatctaaaacttttgaaactcattctctgtatttctatttttcaaattctctgatcaaaaacattaaactccttttctagatttcctaggtgatctgaaacttcagaagtgttttccaaactgtactatgacactattctatgacactatttctagtacaaagcaattttattttttagagtgtccacaaactttgttaaaatatgttctctttttaaagccaattaccttaaaaatgtctggaaggaaacactgaaataagaatacaacatttcggtgaagagctggaaacttaaaaaattatcaaaaggaattttggtatcatcttcagagaaaaaataaagcaagaaatactaacatcaaaaggacaggtatgatgatgcgataataataaacatctgcgtttgtctcttcactaagagtaaactgggaaattgtaggccaaagtccagttgaactttctaagtctgtgatccccgtgctgactgtggaagtgtatttataccaagatggagatcttgacttcttgaatatatctggactggtaaaatcttgatgaggctcataaaatgagtttgggaattgtgtatagctgattttttgtgggaaactgtttacttcattcaaaggttcttgagactcttgataaatcttgtncctggtccccacaaagcggcgtaaaagcggccctcacccctcctctcctcttgggggaanacactcaactct

SEQ ID NO: 382281 - DNA, 697 bp, Homo sapiens
ctagaggacccatgcgcgacgcttccatcaaatatgcttatatgagtggctgagaggactactaactagtagacagagttttaacatcatatttggtgaatgtccatattgtagtaagccaattaccttaaaaatgtctggaaggaaacactgaaataagaatacaacatttcggtgaagagctggaaacttaaaaaattatcaaaaggaattttggtatcatcttcagagaaaaaataaagcaagaaatactaacatcaaaaggacaggtatgatgatgcgataataataaacatctgcgtttgtctcttcactaagagtaaactgggaaattgtaggccaaagtccagttgaactttctaagtctgtgatccccgtgctgactgtggaagtgtatttataccaagatggagatcttgacttcttgaatatatctggactggtaaaatcttgatgaggctcataaaatgagtttgggaattgtgtatagctgattttttgtgggaaactgtttacttcattcaaaggttcttgagactcttgatatttctgtcttctccttgtgctttcctatggaaaaaatacatatatagtttagtttgttagacgtgagttatccaagtatttattttgtgtagtgtgtaagaatgctaaataaaatgttatacaagatcaaaaaattgcgtgttatttttcc

SEQ ID NO: 382282 - DNA, 1159 bp, Homo sapiens
acgtccaggctgtaaaagtcattttattctggaggaaatgcaacaccaaagttgtaacagtctttcaataaagtaaaacagaatcatcgaaagggctcctgggacaattgaggctagaatgatcttggtcagtcagtcctgtggacttgagggcaatcttccctcccactaccggttggggagccctgatgtcgcctcccgcagagcgccacttggcctggcctgcgcttcaccttcatttccgcccgcggaatcctccaggatcttcccgccaaggctggggtttccgctccgcggcgtccgagcgccagcggactgcgcatgtgcaggacccagcaggtctagagcttttctgtgtttctccggacttcgagccatggcggtgacggaagcgagcctgttgcgccagtgccccctgcttctgccccagaaccggtcgaaaaccgtgtatgagggattcatctcggctcagggaagagacttccaccttaggatagtgttgcctgaagatttacaactgaagaatgcaagattattatgtagttggcagctgagaacaatacttagtggataccatcgaatagtacaacagagaatgcagcactctcctgatctaatgagctttatgatggagttgaagatgcttttggaagttgccttaaagaatagacaagagctgtatgcactacctcctcctccccagttctactcaagccttattgaagagataggaactcttggttgggataaacttgtgtatgcggatacctgcttcagtaccatcaagttaaaagcagaagatgcttctggtagagagcatttaatcactctcaagttgaaggcaaagtatcctgcagaatcaccagattattttgtggattttcctgttccattttgtgcctcctggacacctcaggaagagacttccaccttaggatagtgttgcctgaagatttacaactgaagaatgcaagattattatgtagttggcagctgagaacaatacttagtggataccatcgaatagtacaacagagaatgcagcactctcctgatctaatgagctttatgatggagttgaagatgcttttggaagttgccttaaagaatagacaagagctctatcagctacctcctcctccccagttctactggacca

SEQ ID NO: 382283 - DNA, 930 bp, Homo sapiens
acgtccaggctgtaaaagtcattttattctggaggaaatgcaacaccaaagttgtaacagtctttcaataaagtaaaacagaatcatcgaaagggctcctgggacaattgaggctagaatgatcttggtcagtcagtcctgtggacttgagggcaatcttccctcccactaccggttggggagccctgatgtcgcctcccgcagagcgccacttggcctggcctgcgcttcaccttcatttccgcccgcggaatcctccaggatcttcccgccaaggctggggtttccgctccgcggcgtccgagcgccagcggactgcgcatgtgcaggacccagcaggtctagagcttttctgtgtttctccggacttcgagccatggcggtgacggaagcgagcctgttgcgccagtgccccctgcttctgccccagaaccggtcgaaaaccgtgtatgagggattcatctcggctcagggaagagacttccaccttaggatagtgttgcctgaagatttacaactgaagaatgcaagattattatgtagttggcagctgagaacaatacttagtggataccatcgaatagtacaacagagaatgcagcactctcctgatctaatgagctttatgatggagttgaagatgcttttggaagttgccttaaagaatagacaagagctgtatgcactacctcctcctccccagttctactcaagccttattgaagagataggaactcttggttgggataattttaaaatatttttcttgctggcagccaccagaaactggaagaggcaaggaatagattctctcctagagcctccagagggagcacatctttgctgacaccttgatttttgcccagtgaacagatgtggaacccctggcctccagaactatgagagaataaattcctcttgttttagcca

SEQ ID NO: 382284 - DNA, 2047 bp, Homo sapiens
acgtccaggctgtaaaagtcattttattctggaggaaatgcaacaccaaagttgtaacagtctttcaataaagtaaaacagaatcatcgaaagggctcctgggacaattgaggctagaatgatcttggtcagtcagtcctgtggacttgagggcaatcttccctcccactaccggttggggagccctgatgtcgcctcccgcagagcgccacttggcctggcctgcgcttcaccttcatttccgcccgcggaatcctccaggatcttcccgccaaggctggggtttccgctccgcggcgtccgagcgccagcggactgcgcatgtgcaggacccagcaggtctagagcttttctgtgtttctccggacttcgagccatggcggtgacggaagcgagcctgttgcgccagtgccccctgcttctgccccagaaccggtcgaaaaccgtgtatgagggattcatctcggctcagggaagagacttccaccttaggatagtgttgcctgaagatttacaactgaagaatgcaagattattatgtagttggcagctgagaacaatacttagtggataccatcgaatagtacaacagagaatgcagcactctcctgatctaatgagctttatgatggagttgaagatgcttttggaagttgccttaaagaatagacaagagctgtatgcactacctcctcctccccagttctactcaagccttattgaagagataggaactcttggttgggataaacttgtgtatgcggatacctgcttcagtaccatcaagttaaaagcagaagatgcttctggtagagagcatttaatcactctcaagttgaaggcaaagtatcctgcagaatcaccagattattttgtggattttcctgttccattttgtgcctcctggacacctcagagctccttaataagcatttatagtcagtttttggcagcaatagaatcactaaaggcattctgggatgttatggatgaaatcgatgagaagacctgggtacttgagccagaaaaacctccacggagtgcaacagcacgcagaattgcattaggtaataatgtttccataaatatagaggtagaccccaggcatcctactatgcttcctgagtgcttctttcttggagctgaccatgtggtaaaacccctgggaattaagctgagcaggaacatacatttgtgggatccagaaaatagtgtgttacaaaatttgaaagatgttttagaaattgattttccagctcgtgctatcctggaaaaatctgattttactatggattgtggaatttgttatgcttatcaacttgacggtaccattcctgatcaagtgtgtgataattcccagtgtggacaacctttccatcaaatatgcttatatgagtggctgagaggactactaactagtagacagagttttaacatcatatttggtgaatgtccatattgtagtaagccaattaccttaaaaatgtctggaaggaaacactgaaataagaatacaacatttcggtgaagagctggaaacttaaaaaattatcaaaaggaattttggtatcatcttcagagaaaaaataaagcaagaaatactaacatcaaaaggacaggtatgatgatgcgataataataaacatctgcgtttgtctcttcactaagagtaaactgggaaattgtaggccaaagtccagttgaactttctaagtctgtgatccccgtgctgactgtggaagtgtatttataccaagatggagatcttgacttcttgaatatatctggactggtaaaatcttgatgaggctcataaaatgagtttgggaattgtgtatagctgattttttgtgggaaactgtttacttcattcaaaggttcttgagactcttgatatttctgtcttctccttgtgctttcctatggaaaaaatacatatatagtttagtttgttagacgtgagttatccaagtatttattttgtgtagtgtgtaagaatgctaaataaaatgttatacaagatcaaaaaattgcgtgttatttttcc

SEQ ID NO: 382285 - DNA, 3714 bp, Homo sapiens
acgtccaggctgtaaaagtcattttattctggaggaaatgcaacaccaaagttgtaacagtctttcaataaagtaaaacagaatcatcgaaagggctcctgggacaattgaggctagaatgatcttggtcagtcagtcctgtggacttgagggcaatcttccctcccactaccggttggggagccctgatgtcgcctcccgcagagcgccacttggcctggcctgcgcttcaccttcatttccgcccgcggaatcctccaggatcttcccgccaaggctggggtttccgctccgcggcgtccgagcgccagcggactgcgcatgtgcaggacccagcaggtctagagcttttctgtgtttctccggacttcgagccatggcggtgacggaagcgagcctgttgcgccagtgccccctgcttctgccccagaaccggtcgaaaaccgtgtatgagggattcatctcggctcagggaagagacttccaccttaggatagtgttgcctgaagatttacaactgaagaatgcaagattattatgtagttggcagctgagaacaatacttagtggataccatcgaatagtacaacagagaatgcagcactctcctgatctaatgagctttatgatggagttgaagatgcttttggaagttgccttaaagaatagacaagagctgtatgcactacctcctcctccccagttctactcaagccttattgaagagataggaactcttggttgggataaacttgtgtatgcggatacctgcttcagtaccatcaagttaaaagcagaagatgcttctggtagagagcatttaatcactctcaagttgaaggcaaagtatcctgcagaatcaccagattattttgtggattttcctgttccattttgtgcctcctggacacctcagagctccttaataagcatttatagtcagtttttggcagcaatagaatcactaaaggcattctgggatgttatggatgaaatcgatgagaagacctgggtacttgagccagaaaaacctccacggagtgcaacagcacgcagaattgcattaggtaataatgtttccataaatatagaggtagaccccaggcatcctactatgcttcctgagtgcttctttcttggagctgaccatggtatgacatctgagatttaaacgttttttaatagagtcataaaatccttgcctagcattgttaaattattagacaatattagtatattaatggtagtttttattttttgtctgagacggagttttgctcttgttgcccagtatgtagtgtaatggcgcgatctcggttcaccgcaataatgatagttattttaaatgacaatgtctcagcattctgaactgtataattttgttttttaacataatacatataattttgattttctaatcaagtagttaagaaacattctgtatcaaatgtggctttagaaaccaagagtagagcatgcaattattaaattttttttttttaatctgaagtggtaaaacccctgggaattaagctgagcaggaacatacatttgtggtaggtaccttggcaatataatttttactttttggtgattttacaaagttcacagcataatttttttccccatgctttcagggatccagaaaatagtgtgttacaaaatttgaaagatgttttagaaattgattttccagctcgtgctatcctggaaaaatctgtaagttttatcagtgttttgatattccagacagtattgcataatgaagtttaaatgcttctctcagtgaaaaatgaggctgaaaaaggagggaattagaaaaatattataacacagacttctgatctgcatcaaaaaacttgtttacctttgattggttgttaagtacaactgtctcttggaacagggggattgatttcagggctgcccatggatacaaaaatccacagacattaaagttccacagttaccctgcaggacccatatatagaagaagtcggccctctgtatacagagatttcacataaacacaggttctgcatcttgtcagtactgtatttttgatctgcatttggttaaaaaaaaaatctgtgtataagtagacctgtgcagttcaaacccatgttgttcaagggtcaactatatacttttttcatggtcttcagtagtgacgtcattaatgacagacatttattaaaaataaggggagaactccaaagtagctaatgagatgtttggcttttctacatagtctgtttatggatggctcaaatactgattagcttgatgtaagtgtttgtgaagcagttatagtttctcaaaattgaatagataccactatactgcaaaaataatagaattgatttttgacaaggctgctaaggttgtagactactaaatggtagtgagtttctttttcctttagttacagaattgtgctgtttagtaatcactagctaatatcaattcctttctttaaatactatcagggacattataacaatgtatgatatgggaatattactgatgcccaaacatcttgccagccaaaaatggaatctctttttttagcctagctgtgtatatttgagtggaaaaggaaacaccctacaatagctttgctaggtgttaaatagtaatgtaattatatttcctataatacagcaatatagtcacctttataaaaactatatttataaaacattcttcctgatcttaccttgtgttttaaacacatagatgatttcgtattctaaagtagttagaagaattgtaatgttcccaacataaaaggtaaatgttgaggtgatgaatatcttaattatcctgatgtcatcattaaacactgtatacatgtatcaaaatatcacacataccctcccaaatatgtacaacgaataagttagtgagacacatacgctttttataaatatttttcttttgaaggattttactatggattgtggaatttgttatgcttatcaacttgacggtaccattcctgatcaagtgtgtgataattcccagtgtggacaacctttccatcaaatatgcttatatgagtggctgagaggactactaactagtagacagagttttaacatcatatttggtgaatgtccatattgtagtaagccaattaccttaaaaatgtctggaaggaaacactgaaataagaatacaacatttcggtgaagagctggaaacttaaaaaattatcaaaaggaattttggtatcatcttcagagaaaaaataaagcaagaaatactaacatcaaaaggacaggtatgatgatgcgataataataaacatctgcgtttgtctcttcactaagagtaaactgggaaattgtaggccaaagtccagttgaactttctaagtctgtgatccccgtgctgactgtggaagtgtatttataccaagatggagatcttgacttcttgaatatatctggactggtaaaatcttgatgaggctcataaaatgagtttgggaattgtgtatagctgattttttgtgggaaactgtttacttcattcaaaggttcttgagactcttgatatttctgtcttctccttgtgctttcctatggaaaaaatacatatatagtttagtttgttagacgtgagttatccaagtatttattttgtgtagtgtgtaagaatgctaaataaaatgttatacaagatcaaaaaattgcgtgttatttttcc

SEQ ID NO: 382286 - DNA, 4879 bp, Homo sapiens
acgtccaggctgtaaaagtcattttattctggaggaaatgcaacaccaaagttgtaacagtctttcaataaagtaaaacagaatcatcgaaagggctcctgggacaattgaggctagaatgatcttggtcagtcagtcctgtggacttgagggcaatcttccctcccactaccggttggggagccctgatgtcgcctcccgcagagcgccacttggcctggcctgcgcttcaccttcatttccgcccgcggaatcctccaggatcttcccgccaaggctggggtttccgctccgcggcgtccgagcgccagcggactgcgcatgtgcaggacccagcaggtctagagcttttctgtgtttctccggacttcgagccatggcggtgacggaagcgagcctgttgcgccagtgccccctgcttctgccccagaaccggtcgaaaaccgtgtatgagggattcatctcggctcaggaagttgccttaaagaatagacaagagctgtatgcactacctcctcctccccagttctactcaagccttattgaagagataggaactcttggttgggataaacttgtgtatgcggatacctgcttcagtaccatcaagttaaaagcagaagatgcttctggtagagagcatttaatcactctcaagttgaaggcaaagtatcctgcagaatcaccagattattttgtggattttcctgttccattttgtgcctcctggacacctcagagctccttaataagcatttatagtcagtttttggcagcaatagaatcactaaaggcattctgggatgttatggatgaaatcgatgagaagacctgggtacttgagccagaaaaacctccacggagtgcaacagcacgcagaattgcattaggtaataatgtttccataaatatagaggtagaccccaggcatcctactatgcttcctgagtgcttctttcttggagctgaccatggtatgacatctgagatttaaacgttttttaatagagtcataaaatccttgcctagcattgttaaattattagacaatattagtatattaatggtagtttttattttttgtctgagacggagttttgctcttgttgcccagtatgtagtgtaatggcgcgatctcggttcaccgcaataatgatagttattttaaatgacaatgtctcagcattctgaactgtataattttgttttttaacataatacatataattttgattttctaatcaagtagttaagaaacattctgtatcaaatgtggctttagaaaccaagagtagagcatgcaattattaaattttttttttttaatctgaagtggtaaaacccctgggaattaagctgagcaggaacatacatttgtggtaggtaccttggcaatataatttttactttttggtgattttacaaagttcacagcataatttttttccccatgctttcagggatccagaaaatagtgtgttacaaaatttgaaagatgttttagaaattgattttccagctcgtgctatcctggaaaaatctgtaagttttatcagtgttttgatattccagacagtattgcataatgaagtttaaatgcttctctcagtgaaaaatgaggctgaaaaaggagggaattagaaaaatattataacacagacttctgatctgcatcaaaaaacttgtttacctttgattggttgttaagtacaactgtctcttggaacagggggattgatttcagggctgcccatggatacaaaaatccacagacattaaagttccacagttaccctgcaggacccatatatagaagaagtcggccctctgtatacagagatttcacataaacacaggttctgcatcttgtcagtactgtatttttgatctgcatttggttaaaaaaaaaatctgtgtataagtagacctgtgcagttcaaacccatgttgttcaagggtcaactatatacttttttcatggtcttcagtagtgacgtcattaatgacagacatttattaaaaataaggggagaactccaaagtagctaatgagatgtttggcttttctacatagtctgtttatggatggctcaaatactgattagcttgatgtaagtgtttgtgaagcagttatagtttctcaaaattgaatagataccactatactgcaaaaataatagaattgatttttgacaaggctgctaaggttgtagactactaaatggtagtgagtttctttttcctttagttacagaattgtgctgtttagtaatcactagctaatatcaattcctttctttaaatactatcagggacattataacaatgtatgatatgggaatattactgatgcccaaacatcttgccagccaaaaatggaatctctttttttagcctagctgtgtatatttgagtggaaaaggaaacaccctacaatagctttgctaggtgttaaatagtaatgtaattatatttcctataatacagcaatatagtcacctttataaaaactatatttataaaacattcttcctgatcttaccttgtgttttaaacacatagatgatttcgtattctaaagtagttagaagaattgtaatgttcccaacataaaaggtaaatgttgaggtgatgaatatcttaattatcctgatgtcatcattaaacactgtatacatgtatcaaaatatcacacataccctcccaaatatgtacaacgaataagttagtgagacacatacgctttttataaatatttttcttttgaaggattttactatggattgtggaatttgttatgcttatcaacttgacggtaccattcctgatcaagtgtgtgataattcccagtgtggacaacctttccatcaaatatgcttatatgaggtaaaaaataaaaatattgtcaagacttttttccgctaacacaacataggaagtattcctgtttgaaatacacagaatctaaaatctgttgagtcaatagtgatcctctcttttgccattaactccttttaccagtttattccagatgcttatgtgcttcatttcttcatcacagttactaatgagtggagaaatgttctgaagtatccaagggagaaaatctatccagaatatattcatggactagcttattgacacataacaaattaaattgatggtacattggaatctttctataaattccttgttaccacaatgtaagcttcataggtttacccgaggtggaggtggttgaaagtggcagtaatacagtgaaaatgaaattagtactatgtagtatctattacttttcaggctgcatttaagaatagaatatatccaatactactacttttcatgttgagaagaatgccttttgtgatctgagtctcacagcactcaggcaatgccactttacttactgtatgtgaagtctactttcattcctgtctttagtgcctggcttcaccttagggcctagttgatacatgataaactgtgtgtaactatatacagaacaccttgcaattgtatgttgccttcggtttcagtcttccttaatatcacatctttacttttgtgattagaggtagcagttggtgccgtctgtactttgccaatggagaacttaggcagaggcatctatttaccttatataaaatcatgaaattacagaaatacaggtcaaattacagaaatactctaagggaacatgtgatttcttttgtaattatgaatattcatttaatttttaaaaattcactggctcatgcttataatcaatgggttgaaaattaacccactgttagtgattcagaccagaactaagagggaaattttcaagagcctgtagtatctttaacagcaggagttgttaatttgtgattaatggatttagggaaagtctatgaatgccaggaacttagtatgcattatttttatgtatgtctattctggggataaagaaaatgcgtaattcttatcagattcttaaaggggcccataatctggttataaaccagtggtttaggccttcaattccatgttgatttcccttgttactcaacatcttaatagtctgctattggctcaggaaatacatcccttactcttgcaaaacaaaattaagctaagtcttctggaataaaaacataatgcacttaaaaacaaagggaatgacatttggagtatctgtaatttgtaatcatgctgacgcttctcctttatcttttaaaatttgcagtggctgagaggactactaactagtagacagagttttaacatcatatttggtgaatgtccatattgtagtaagccaattaccttaaaaatgtctggaaggaaacactgaaataagaatacaacatttcggtgaagagctggaaacttaaaaaattatcaaaaggaattttggtatcatcttcagagaaaaaataaagcaagaaatactaacatcaaaaggacaggtatgatgatgcgataataataaacatctgcgtttgtctcttcactaagagtaaactgggaaattgtaggccaaagtccagttgaactttctaagtctgtgatccccgtgctgactgtggaagtgtatttataccaagatggagatcttgacttcttgaatatatctggactggtaaaatcttgatgaggctcataaaatgagtttgggaattgtgtatagctgattttttgtgggaaactgtttacttcattcaaaggttcttgagactcttgatatttctgtcttctccttgtgctttcctatggaaaaaatacatatatagtttagtttgttagacgtgagttatccaagtatttattttgtgtagtgtgtaagaatgctaaataaaatgttatacaagatcaaaaaattgcgtgttatttttcc

SEQ ID NO: 382287 - DNA, 5298 bp, Homo sapiens
  misc_feature (5278)..(5278): n is a, c, g, or t
  misc_feature (5280)..(5281): n is a, c, g, or t
  misc_feature (5292)..(5292): n is a, c, g, or t
acgtccaggctgtaaaagtcattttattctggaggaaatgcaacaccaaagttgtaacagtctttcaataaagtaaaacagaatcatcgaaagggctcctgggacaattgaggctagaatgatcttggtcagtcagtcctgtggacttgagggcaatcttccctcccactaccggttggggagccctgatgtcgcctcccgcagagcgccacttggcctggcctgcgcttcaccttcatttccgcccgcggaatcctccaggatcttcccgccaaggctggggtttccgctccgcggcgtccgagcgccagcggactgcgcatgtgcaggacccagcaggtctagagcttttctgtgtttctccggacttcgagccatggcggtgacggaagcgagcctgttgcgccagtgccccctgcttctgccccagaaccggtcgaaaaccgtgtatgagggattcatctcggctcagggaagagacttccaccttaggatagtgttgcctgaagatttacaactgaagaatgcaagattattatgtagttggcagctgagaacaatacttagtggataccatcgaatagtacaacagagaatgcagcactctcctgatctaatgagctttatgatggagttgaagatgcttttggaagttgccttaaagaatagacaagagctgtatgcactacctcctcctccccagttctactcaagccttattgaagagataggaactcttggttgggataaacttgtgtatgcggatacctgcttcagtaccatcaagttaaaagcagaagatgcttctggtagagagcatttaatcactctcaagttgaaggcaaagtatcctgcagaatcaccagattattttgtggattttcctgttccattttgtgcctcctggacacctcagagctccttaataagcatttatagtcagtttttggcagcaatagaatcactaaaggcattctgggatgttatggatgaaatcgatgagaagacctgggtacttgagccagaaaaacctccacggagtgcaacagcacgcagaattgcattaggtaataatgtttccataaatatagaggtagaccccaggcatcctactatgcttcctgagtgcttctttcttggagctgaccatggtatgacatctgagatttaaacgttttttaatagagtcataaaatccttgcctagcattgttaaattattagacaatattagtatattaatggtagtttttattttttgtctgagacggagttttgctcttgttgcccagtatgtagtgtaatggcgcgatctcggttcaccgcaataatgatagttattttaaatgacaatgtctcagcattctgaactgtataattttgttttttaacataatacatataattttgattttctaatcaagtagttaagaaacattctgtatcaaatgtggctttagaaaccaagagtagagcatgcaattattaaattttttttttttaatctgaagtggtaaaacccctgggaattaagctgagcaggaacatacatttgtggtaggtaccttggcaatataatttttactttttggtgattttacaaagttcacagcataatttttttccccatgctttcagggatccagaaaatagtgtgttacaaaatttgaaagatgttttagaaattgattttccagctcgtgctatcctggaaaaatctgtaagttttatcagtgttttgatattccagacagtattgcataatgaagtttaaatgcttctctcagtgaaaaatgaggctgaaaaaggagggaattagaaaaatattataacacagacttctgatctgcatcaaaaaacttgtttacctttgattggttgttaagtacaactgtctcttggaacagggggattgatttcagggctgcccatggatacaaaaatccacagacattaaagttccacagttaccctgcaggacccatatatagaagaagtcggccctctgtatacagagatttcacataaacacaggttctgcatcttgtcagtactgtatttttgatctgcatttggttaaaaaaaaaatctgtgtataagtagacctgtgcagttcaaacccatgttgttcaagggtcaactatatacttttttcatggtcttcagtagtgacgtcattaatgacagacatttattaaaaataaggggagaactccaaagtagctaatgagatgtttggcttttctacatagtctgtttatggatggctcaaatactgattagcttgatgtaagtgtttgtgaagcagttatagtttctcaaaattgaatagataccactatactgcaaaaataatagaattgatttttgacaaggctgctaaggttgtagactactaaatggtagtgagtttctttttcctttagttacagaattgtgctgtttagtaatcactagctaatatcaattcctttctttaaatactatcagggacattataacaatgtatgatatgggaatattactgatgcccaaacatcttgccagccaaaaatggaatctctttttttagcctagctgtgtatatttgagtggaaaaggaaacaccctacaatagctttgctaggtgttaaatagtaatgtaattatatttcctataatacagcaatatagtcacctttataaaaactatatttataaaacattcttcctgatcttaccttgtgttttaaacacatagatgatttcgtattctaaagtagttagaagaattgtaatgttcccaacataaaaggtaaatgttgaggtgatgaatatcttaattatcctgatgtcatcattaaacactgtatacatgtatcaaaatatcacacataccctcccaaatatgtacaacgaataagttagtgagacacatacgctttttataaatatttttcttttgaaggattttactatggattgtggaatttgttatgcttatcaacttgacggtaccattcctgatcaagtgtgtgataattcccagtgtggacaacctttccatcaaatatgcttatatgaggtaaaaaataaaaatattgtcaagacttttttccgctaacacaacataggaagtattcctgtttgaaatacacagaatctaaaatctgttgagtcaatagtgatcctctcttttgccattaactccttttaccagtttattccagatgcttatgtgcttcatttcttcatcacagttactaatgagtggagaaatgttctgaagtatccaagggagaaaatctatccagaatatattcatggactagcttattgacacataacaaattaaattgatggtacattggaatctttctataaattccttgttaccacaatgtaagcttcataggtttacccgaggtggaggtggttgaaagtggcagtaatacagtgaaaatgaaattagtactatgtagtatctattacttttcaggctgcatttaagaatagaatatatccaatactactacttttcatgttgagaagaatgccttttgtgatctgagtctcacagcactcaggcaatgccactttacttactgtatgtgaagtctactttcattcctgtctttagtgcctggcttcaccttagggcctagttgatacatgataaactgtgtgtaactatatacagaacaccttgcaattgtatgttgccttcggtttcagtcttccttaatatcacatctttacttttgtgattagaggtagcagttggtgccgtctgtactttgccaatggagaacttaggcagaggcatctatttaccttatataaaatcatgaaattacagaaatacaggtcaaattacagaaatactctaagggaacatgtgatttcttttgtaattatgaatattcatttaatttttaaaaattcactggctcatgcttataatcaatgggttgaaaattaacccactgttagtgattcagaccagaactaagagggaaattttcaagagcctgtagtatctttaacagcaggagttgttaatttgtgattaatggatttagggaaagtctatgaatgccaggaacttagtatgcattatttttatgtatgtctattctggggataaagaaaatgcgtaattcttatcagattcttaaaggggcccataatctggttataaaccagtggtttaggccttcaattccatgttgatttcccttgttactcaacatcttaatagtctgctattggctcaggaaatacatcccttactcttgcaaaacaaaattaagctaagtcttctggaataaaaacataatgcacttaaaaacaaagggaatgacatttggagtatctgtaatttgtaatcatgctgacgcttctcctttatcttttaaaatttgcagtggctgagaggactactaactagtagacagagttttaacatcatatttggtgaatgtccatattgtagtaaggtaagcaaattgttaatcacatctcataaaatgtgcctagctttcagtaatatgttctagaagatagatctatatagtatatcagtttatctaaaacttttgaaactcattctctgtatttctatttttcaaattctctgatcaaaaacattaaactccttttctagatttcctaggtgatctgaaacttcagaagtgttttccaaactgtactatgacactattctatgacactatttctagtacaaagcaattttattttttagagtgtccacaaactttgttaaaatatgttctctttttaaagccaattaccttaaaaatgtctggaaggaaacactgaaataagaatacaacatttcggtgaagagctggaaacttaaaaaattatcaaaaggaattttggtatcatcttcagagaaaaaataaagcaagaaatactaacatcaaaaggacaggtatgatgatgcgataataataaacatctgcgtttgtctcttcactaagagtaaactgggaaattgtaggccaaagtccagttgaactttctaagtctgtgatccccgtgctgactgtggaagtgtatttataccaagatggagatcttgacttcttgaatatatctggactggtaaaatcttgatgaggctcataaaatgagtttgggaattgtgtatagctgattttttgtgggaaactgtttacttcattcaaaggttcttgagactcttgataattcaatattctacctggcgtacgggagatttatttaggacgaaccggaagaagtgaagagagggngnntggggaggggnttgtgg

SEQ ID NO: 382288 - DNA, 1603 bp, Homo sapiens
acgtccaggctgtaaaagtcattttattctggaggaaatgcaacaccaaagttgtaacagtctttcaataaagtaaaacagaatcatcgaaagggctcctgggacaattgaggctagaatgatcttggtcagtcagtcctgtggacttgagggcaatcttccctcccactaccggttggggagccctgatgtcgcctcccgcagagcgccacttggcctggcctgcgcttcaccttcatttccgcccgcggaatcctccaggatcttcccgccaaggctggggtttccgctccgcggcgtccgagcgccagcggactgcgcatgtgcaggacccagcaggtctagagcttttctgtgtttctccggacttcgagccatggcggtgacggaagcgagcctgttgcgccagtgccccctgcttctgccccagaaccggtcgaaaaccgtgtatgagggattcatctcggctcagagctccttaataagcatttatagtcagtttttggcagcaatagaatcactaaaggcattctgggatgttatggatgaaatcgatgagaagacctgggtacttgagccagaaaaacctccacggagtgcaacagcacgcagaattgcattaggtaataatgtttccataaatatagaggtagaccccaggcatcctactatgcttcctgagtgcttctttcttggagctgaccatgtggtaaaacccctgggaattaagctgagcaggaacatacatttgtgggatccagaaaatagtgtgttacaaaatttgaaagatgttttagaaattgattttccagctcgtgctatcctggaaaaatctgattttactatggattgtggaatttgttatgcttatcaacttgacggtaccattcctgatcaagtgtgtgataattcccagtgtggacaacctttccatcaaatatgcttatatgagtggctgagaggactactaactagtagacagagttttaacatcatatttggtgaatgtccatattgtagtaagccaattaccttaaaaatgtctggaaggaaacactgaaataagaatacaacatttcggtgaagagctggaaacttaaaaaattatcaaaaggaattttggtatcatcttcagagaaaaaataaagcaagaaatactaacatcaaaaggacaggtatgatgatgcgataataataaacatctgcgtttgtctcttcactaagagtaaactgggaaattgtaggccaaagtccagttgaactttctaagtctgtgatccccgtgctgactgtggaagtgtatttataccaagatggagatcttgacttcttgaatatatctggactggtaaaatcttgatgaggctcataaaatgagtttgggaattgtgtatagctgattttttgtgggaaactgtttacttcattcaaaggttcttgagactcttgatatttctgtcttctccttgtgctttcctatggaaaaaatacatatatagtttagtttgttagacgtgagttatccaagtatttattttgtgtagtgtgtaagaatgctaaataaaatgttatacaagatcaaaaaattgcgtgttatttttcc

SEQ ID NO: 382289 - DNA, 481 bp, Homo sapiens
ttgccaatagatggcaccaagaggaatgcccccaagtagagtttgggcaacactgaaggctctagatttccccagaccttcaaaaaagcaacaaggtaaaccaggattgagactttgctaacttctagtttcttcccaagacattaaaaaaaatggtgattgagagtagactttcctaacttggagtctgtaaaagaacttctggtgtagagtctgtatgttttctacaataatctatgcatattcctgggaaggaattgcctttcactagattttcaaaaaggttcttgatccaaaaacatattcacaggcttcagtaatataaatcaaagagagaaatacataatgtgtgtgttgaagacattttgtattgctgatgaaaagctataaagctgtgaggctgggcacggtggcctaaacctgtaatcccagcactttgggagtctgaacctggtgtaacacgcgagctaggacgaggttt

SEQ ID NO: 382290 - DNA, 442 bp, Homo sapiens
gctgaaaggaccaattaagaggctcccatgacaattcaggttaacacacctggtctaggaactgcaaaggagagggcagaggaaagagctctcccatgaccaaaaagttacagagccttttctggtatggagacactgattgtgatcccatcttcagagtacatgtggctggaagaacaactgcagcaacaggaggggcaagctctctggaaaaagctggaggggaaataatgaattagatcttggcaggtgagtttgagtctaccatgggcagaaggatggcagcacagcaccctgatgtagacgaccagcaggtagactaactttgagtccagagccaaggagacgtcaacctgggatgtactgattccagagagccacagaggatcccctgccatggatgccacacttctccccacaatacagcacttgccagaggtgc

SEQ ID NO: 382291 - DNA, 1710 bp, Homo sapiens
gacttccgctttgaaggcgaggaccccagcgagcgtaagggcgcagtgtccgcctggcggatttgggtcagcaggcggaagtcgtcccaggctgctagatactaaggtgccacatctcctgcctttctgctcactttcctgcctgttttgcctgaccacagccatcatgcctcggggtcagaagagtaagctccgtgctcgtgagaaacgccgcaaggcgcgagaggagacccagggtctcaaggttgctcacgccactgcagcagagaaagaggagtgcccctcctcctctcctgttttaggggatactcccacaagctcccctgctgctggcattccccagaagcctcagggagctccacccaccaccactgctgctgcagctgtgtcatgtaccgaatctgacgaaggtgccaaatgccaaggtgaggaaaatgcaagtttctcccaggccacaacatccactgagagctcagtcaaagatcctgtagcctgggaggcaggaatgctgatgcacttcattctacgtaagtataaaatgagagagcccattatgaaggcagatatgctgaaggttgttgatgaaaagtacaaggatcacttcactgagatcctcaatggagcctctcgccgcttggagctcgtctttggccttgatttgaaggaagacaaccctagtggccacacctacaccctcgtcagtaagctaaacctcaccaatgatggaaacctgagcaatgattgggactttcccaggaatgggcttctgatgcctctcctgggtgtgatcttcttaaagggcaactctgccaccgaggaagagatctggaaattcatgaatgtgttgggagcctatgatggagaggagcacttaatctatggggaaccccgtaagttcatcacccaagatctggtgcaggaaaaatatctgaagtacgagcaggtgcccaacagtgatcccccacgctatcaattcctatggggtccgagagcctatgctgaaaccaccaagatgaaagtcctcgagtttttggccaagatgaatggtgccactccccgtgacttcccatcccattatgaagaggctttgagagatgaggaagagagagcccaagtccgatccagtgttagagccaggcgtcgcactactgccacgacttttagagcgcgttctagagccccattcagcaggtcctcccaccccatgtgagaactcaggcagattgttcactttgtttttgtggcaagatgccaaccttttgaagtagtgagcagccaagatatggctagagagatcatcatatatatctcctttgtgttcctgttaaacattagtatctttcaagtgtttttcttttaatagaatgtttatttagagttgggatctatgtctatgagcgacatggatcacacatttattggtgctgccagctttaagcataagagttttgatattctatatttttcaaatccttgaatcttttttgggttgaagaagaagaaagcatagctttagaatagagattttctcagaaatgtgtgaaagaacctcacacaacataattggagtcttaaaatagaggaagagtaagcaaagcatgtcaagtttttgttttctgcattcagttttgtttttgtaaaatccaaagatacatacctggttgtttttagccttttcaagaatgcagataaaataaatagtaataaatt

SEQ ID NO: 382292 - DNA, 3550 bp, Homo sapiens
  misc_feature (995)..(995): n is a, c, g, or t
  misc_feature (1684)..(1684): n is a, c, g, or t
ttctcaggatttcatttgctcttctccaggaaccacatcacctgcccttctgcctacactcctgcctgctgtgcctaaccacagccatcatgcctcggggtcagaagagtaagctccgtgcccgtgagaaacgccagcggacccgtggtcagacccaggatctcaaggttggtcagcctactgcagcagagaaagaagagtctccttcctcttcctcatctgttttgagggatactgcctccagctcccttgcttttggcattccccaggagcctcagagagagccacccaccacctctgctgctgcagctatgtcatgcactggatctgataaaggcgacgagagccaagatgaggaaaatgcaagttcctcccaggcctcaacatccactgagagatcactcaaagattctctaaccaggaagacgaagatgttagtgcagttcctgctgtacaagtataaaatgaaagagcccactacaaaggcagaaatgctgaagatcatcagcaaaaagtacaaggagcacttccctgagatcttcaggaaagtctctcagcgcacggagctggtctttggccttgccttgaaggaggtcaaccccaccactcactcctacatcctcgtcagcatgctaggccccaacgatggaaaccagagcagtgcctggacccttccaaggaatgggcttctgatgcctctactgagtgtgatcttcttaaatggcaactgtgcccgtgaagaggaaatctgggaattcctgaatatgctggggatctatgatggaaagaggcaccttatctttggggaaccccgaaagctcatcacccaagatctggtgcaggaaaaatatctggaataccagcaggtgcccaacagtgatcccccacgctatcaattcctgtggggtccaagagctcatgcagaaaccagcaagatgaaagtcctggagtttttggccaaggtgaatgacaccacccccaataacttcccactnctttatgaagaggctttgagagatgaagaagagagagctggagcccggcccagagttgcagccaggcgtggcactacagccatgactagtgcgtattccagggccacatccagtagctcttcccaacccatgtgagatctaaggcaaattgttcactttgtggttgaaagacctgctgctttctctgttcctgtgatgcatgaataactcattgatttatctctttgttgtattttccatgatgtttcttaaaatagaaagtttatttagattcagaatataaatttagaaatggcatgcatcacacatttattgctgtttatcaggttggtttagtgataataattttgtttttgaaatacaaatagaaaatcctgaaataatttttgtgatacagagcaaaataacacggcatgggagtaaggttatccttagaaatttaaaataactccacagtaaaataggtagaatctgaagatagaaagggaagaaaagtaaaagttgctttattcgtggtttgtcttactcagttcagtctttttttgctcataaatttaaaagttacatacctggtttgcttagattattcaagaatgtggaggcctgggccaaggtcaatgacagtgtctccattgtcttccctccattaagagaagactttaagagatgagggagagagagccagaganagtgttgcaactgggcctggcatgtttcagtgtggtgtccagcagtgtctcccactccttgtgaagtctgaggttgcaaaaggactgtgatcatatgaagatcatccaggagtacaactcgaaattctcagaaaacaggaccttgatgtgagaggagcaggttcaggtaaacaaagggcgaggacccgagcgagcttaaggccagtggggtgcagcgtctggtcagccgagggtgaattctcaggactggtcgggagtcaaggtgccacatctcctgcctttctgctcactttcctgcctgttttgcctgaccacagccatcatgcctcggggtcagaagagtaagctccgtgctcgtgagaaacgccgcaaggcgcgagaggagacccagggtctcaaggttgctcacgccactgcagcagagaaagaggagtgcccctcctcctctcctgttttaggggatactcccacaagctcccctgctgctggcattccccagaagcctcagggagctccacccaccaccactgctgctgcagctgtgtcatgtaccgaatctgacgaaggtgccaaatgccaaggtgaggaaaatgcaagtttctcccaggccacaacatccactgagagctcagtcaaagatcctgtagcctgggaggcaggaatgctgatgcacttcattctacgtaagtataaaatgagagagcccattatgaaggcagatatgctgaaggttgttgatgaaaagtacaaggatcacttcactgagatcctcaatggagcctctcgccgcttggagctcgtctttggccttgatttgaaggaagacaaccctagtggccacacctacaccctcgtcagtaagctaaacctcaccaatgatggaaacctgagcaatgattgggactttcccaggaatgggcttctgatgcctctcctgggtgtgatcttcttaaagggcaactctgccaccgaggaagagatctggaaattcatgaatgtgttgggagcctatgatggagaggagcacttaatctatggggaaccccgtaagttcatcacccaagatctggtgcaggaaaaatatctgaagtacgagcaggtgcccaacagtgatcccccacgctatcaattcctatggggtccgagagcctatgctgaaaccaccaagatgaaagtcctcgagtttttggccaagatgaatggtgccactccccgtgacttcccatcccattatgaagaggctttgagagatgaggaagagagagcccaagtccgatccagtgttagagccaggcgtcgcactactgccacgacttttagagcgcgttctagagccccattcagcaggtcctcccaccccatgtgagaactcaggcagattgttcactttgtttttgtggcaagatgccaaccttttgaagtagtgagcagccaagatatggctagagagatcatcatatatatctcctttgtgttcctgttaaacattagtatctttcaagtgtttttcttttaatagaatgtttatttagagttgggatctatgtctatgagcgacatggatcacacatttattggtgctgccagctttaagcataagagttttgatattctatatttttcaaatccttgaatcttttttgggttgaagaagaagaaagcatagctttagaatagagattttctcagaaatgtgtgaaagaacctcacacaacataattggagtcttaaaatagaggaagagtaagcaaagcatgtcaagtttttgttttctgcattcagttttgtttttgtaaaatccaaagatacatacctggttgtttttagccttttcaagaatgcagataaaataaatagtaataaatt

SEQ ID NO: 382293 - DNA, 2146 bp, Homo sapiens
  misc_feature (995)..(995): n is a, c, g, or t
  misc_feature (1684)..(1684): n is a, c, g, or t
ttctcaggatttcatttgctcttctccaggaaccacatcacctgcccttctgcctacactcctgcctgctgtgcctaaccacagccatcatgcctcggggtcagaagagtaagctccgtgcccgtgagaaacgccagcggacccgtggtcagacccaggatctcaaggttggtcagcctactgcagcagagaaagaagagtctccttcctcttcctcatctgttttgagggatactgcctccagctcccttgcttttggcattccccaggagcctcagagagagccacccaccacctctgctgctgcagctatgtcatgcactggatctgataaaggcgacgagagccaagatgaggaaaatgcaagttcctcccaggcctcaacatccactgagagatcactcaaagattctctaaccaggaagacgaagatgttagtgcagttcctgctgtacaagtataaaatgaaagagcccactacaaaggcagaaatgctgaagatcatcagcaaaaagtacaaggagcacttccctgagatcttcaggaaagtctctcagcgcacggagctggtctttggccttgccttgaaggaggtcaaccccaccactcactcctacatcctcgtcagcatgctaggccccaacgatggaaaccagagcagtgcctggacccttccaaggaatgggcttctgatgcctctactgagtgtgatcttcttaaatggcaactgtgcccgtgaagaggaaatctgggaattcctgaatatgctggggatctatgatggaaagaggcaccttatctttggggaaccccgaaagctcatcacccaagatctggtgcaggaaaaatatctggaataccagcaggtgcccaacagtgatcccccacgctatcaattcctgtggggtccaagagctcatgcagaaaccagcaagatgaaagtcctggagtttttggccaaggtgaatgacaccacccccaataacttcccactnctttatgaagaggctttgagagatgaagaagagagagctggagcccggcccagagttgcagccaggcgtggcactacagccatgactagtgcgtattccagggccacatccagtagctcttcccaacccatgtgagatctaaggcaaattgttcactttgtggttgaaagacctgctgctttctctgttcctgtgatgcatgaataactcattgatttatctctttgttgtattttccatgatgtttcttaaaatagaaagtttatttagattcagaatataaatttagaaatggcatgcatcacacatttattgctgtttatcaggttggtttagtgataataattttgtttttgaaatacaaatagaaaatcctgaaataatttttgtgatacagagcaaaataacacggcatgggagtaaggttatccttagaaatttaaaataactccacagtaaaataggtagaatctgaagatagaaagggaagaaaagtaaaagttgctttattcgtggtttgtcttactcagttcagtctttttttgctcataaatttaaaagttacatacctggtttgcttagattattcaagaatgtggaggcctgggccaaggtcaatgacagtgtctccattgtcttccctccattaagagaagactttaagagatgagggagagagagccagaganagtgttgcaactgggcctggcatgtttcagtgtggtgtccagcagtgtctcccactccttgtgaagtctgaggtatattctttacttttgattaagaaaacacttaaccttctaattaatggagagccaaaggggagttggtgggaacaccatgtataacatatttgtatgtaaaatgatttatcttttctttttcctgtttttcagtgttctttttttaaattgtagatttatttagtttcagaatctaagtttatgaatggcatgaatcactcatttattaaaatatatcaggttggagagtgagaatttttgcattatgtaaaacaatttaaaaatcttttaagtctttttctgtgatctagaacaagataatatggcattggaatatggaatttgtgaaaaggaaattaccttgcaataaagttggtgggaccaggaagtagagaaaaaaaaagtaaa

SEQ ID NO: 382294 - DNA, 3465 bp, Homo sapiens
  misc_feature (995)..(995): n is a, c, g, or t
  misc_feature (1684)..(1684): n is a, c, g, or t
ttctcaggatttcatttgctcttctccaggaaccacatcacctgcccttctgcctacactcctgcctgctgtgcctaaccacagccatcatgcctcggggtcagaagagtaagctccgtgcccgtgagaaacgccagcggacccgtggtcagacccaggatctcaaggttggtcagcctactgcagcagagaaagaagagtctccttcctcttcctcatctgttttgagggatactgcctccagctcccttgcttttggcattccccaggagcctcagagagagccacccaccacctctgctgctgcagctatgtcatgcactggatctgataaaggcgacgagagccaagatgaggaaaatgcaagttcctcccaggcctcaacatccactgagagatcactcaaagattctctaaccaggaagacgaagatgttagtgcagttcctgctgtacaagtataaaatgaaagagcccactacaaaggcagaaatgctgaagatcatcagcaaaaagtacaaggagcacttccctgagatcttcaggaaagtctctcagcgcacggagctggtctttggccttgccttgaaggaggtcaaccccaccactcactcctacatcctcgtcagcatgctaggccccaacgatggaaaccagagcagtgcctggacccttccaaggaatgggcttctgatgcctctactgagtgtgatcttcttaaatggcaactgtgcccgtgaagaggaaatctgggaattcctgaatatgctggggatctatgatggaaagaggcaccttatctttggggaaccccgaaagctcatcacccaagatctggtgcaggaaaaatatctggaataccagcaggtgcccaacagtgatcccccacgctatcaattcctgtggggtccaagagctcatgcagaaaccagcaagatgaaagtcctggagtttttggccaaggtgaatgacaccacccccaataacttcccactnctttatgaagaggctttgagagatgaagaagagagagctggagcccggcccagagttgcagccaggcgtggcactacagccatgactagtgcgtattccagggccacatccagtagctcttcccaacccatgtgagatctaaggcaaattgttcactttgtggttgaaagacctgctgctttctctgttcctgtgatgcatgaataactcattgatttatctctttgttgtattttccatgatgtttcttaaaatagaaagtttatttagattcagaatataaatttagaaatggcatgcatcacacatttattgctgtttatcaggttggtttagtgataataattttgtttttgaaatacaaatagaaaatcctgaaataatttttgtgatacagagcaaaataacacggcatgggagtaaggttatccttagaaatttaaaataactccacagtaaaataggtagaatctgaagatagaaagggaagaaaagtaaaagttgctttattcgtggtttgtcttactcagttcagtctttttttgctcataaatttaaaagttacatacctggtttgcttagattattcaagaatgtggaggcctgggccaaggtcaatgacagtgtctccattgtcttccctccattaagagaagactttaagagatgagggagagagagccagaganagtgttgcaactgggcctggcatgtttcagtgtggtgtccagcagtgtctcccactccttgtgaagtctgaggttgcaaaaggactgtgatcatatgaagatcatccaggagtacaactcgaaattctcagaaaacaggaccttgatgtgagaggagcaggttcaggtaaacaaagggtgccacatctcctgcctttctgctcactttcctgcctgttttgcctgaccacagccatcatgcctcggggtcagaagagtaagctccgtgctcgtgagaaacgccgcaaggcgcgagaggagacccagggtctcaaggttgctcacgccactgcagcagagaaagaggagtgcccctcctcctctcctgttttaggggatactcccacaagctcccctgctgctggcattccccagaagcctcagggagctccacccaccaccactgctgctgcagctgtgtcatgtaccgaatctgacgaaggtgccaaatgccaaggtgaggaaaatgcaagtttctcccaggccacaacatccactgagagctcagtcaaagatcctgtagcctgggaggcaggaatgctgatgcacttcattctacgtaagtataaaatgagagagcccattatgaaggcagatatgctgaaggttgttgatgaaaagtacaaggatcacttcactgagatcctcaatggagcctctcgccgcttggagctcgtctttggccttgatttgaaggaagacaaccctagtggccacacctacaccctcgtcagtaagctaaacctcaccaatgatggaaacctgagcaatgattgggactttcccaggaatgggcttctgatgcctctcctgggtgtgatcttcttaaagggcaactctgccaccgaggaagagatctggaaattcatgaatgtgttgggagcctatgatggagaggagcacttaatctatggggaaccccgtaagttcatcacccaagatctggtgcaggaaaaatatctgaagtacgagcaggtgcccaacagtgatcccccacgctatcaattcctatggggtccgagagcctatgctgaaaccaccaagatgaaagtcctcgagtttttggccaagatgaatggtgccactccccgtgacttcccatcccattatgaagaggctttgagagatgaggaagagagagcccaagtccgatccagtgttagagccaggcgtcgcactactgccacgacttttagagcgcgttctagagccccattcagcaggtcctcccaccccatgtgagaactcaggcagattgttcactttgtttttgtggcaagatgccaaccttttgaagtagtgagcagccaagatatggctagagagatcatcatatatatctcctttgtgttcctgttaaacattagtatctttcaagtgtttttcttttaatagaatgtttatttagagttgggatctatgtctatgagcgacatggatcacacatttattggtgctgccagctttaagcataagagttttgatattctatatttttcaaatccttgaatcttttttgggttgaagaagaagaaagcatagctttagaatagagattttctcagaaatgtgtgaaagaacctcacacaacataattggagtcttaaaatagaggaagagtaagcaaagcatgtcaagtttttgttttctgcattcagttttgtttttgtaaaatccaaagatacatacctggttgtttttagccttttcaagaatgcagataaaataaatagtaataaatt

SEQ ID NO: 382295 - DNA, 384 bp, Homo sapiens
aaactctcacttaaagtcagcagttaaaagcagactccacacttgctacaaacagcagtagtgaaggaaaaggctcggtgtagaaataaatacagagtagcttaaatgccatgaggaggggggcataaaaaaattcaagaaaatgtatatagagtaataatttggggtggaaaaacaggtaatggtcacagaaaagggagaagaaagtgtggaaagattattctgatgagcttactttctcttctagccctcagattatattagccatgaaagtaacaggtcatggaaatgaaatgtgtacatgatgggtgcattaatttgcttcactacagtaacctgtttactgtctatatttaattcataacatcatgttgtatgccttaa

SEQ ID NO: 382296 - DNA, 343 bp, Homo sapiens
tagctcccaccactctcttggggttctctcccaggaaaacagctcatttctgcatcagcccttcaagcagactgcgctttctccactcttccttccctttcccactctagggctgtgaccgctgagcctgatagaaatgtatctccagctagcagataaccatggctcaaggttagctctctgtgagtcacacaatagcaaaaggccctgggtgagccaagagccatctggagcccaggcgtagggaaaaaccctgacaagttgcagacaaaggacaaagccaggcctcagggtggaaggaggaggtctttcttttttttttttgggacggagtctcgctctt

SEQ ID NO: 382297 - DNA, 752 bp, Homo sapiens
ggcaaggacttattcaaagtaatgtagttttattttatcctcatgttcaccacagtatctcttgctctcttagtttgagggttaaaggtacttcttgttggagaaataagaagtgagctgatgaagagagaataaaacctggtagattgctatctgcggaccttaatcctgtttagaagccctaacttaactctgaaggggatactgtctcttttaactcttgctataatcatttgtatggaaggtagataatactgataacattgcctgatttctctgcgtattattacatttaaccctttgaggccttgctgcatataatttcaactaggctgttttttccccctgactaaatttaatctgcggcactgaagcatcttgacgtgcagtcattaaaatcatatggttttattggcagcaagagctgaccctcatctgtgacattttcaaagggttagcaagacttctgtagctacctacctacctatctgtaaagtagctcttctttgacattgaaaatctttgtattttaattagcacctttttttttttttggctgcttttctgatgtctttttttcaatttagacattttctgtgtgaatgtgccttcaaatttactttagtatattcctctgcaaatactgatctgcatgcttattctgatgacttcttttccagctcttctgtatcactctcttttgtgatctgtaagtcttgtgttaataaataattctttggcatattttgaaa

SEQ ID NO: 382298 - DNA, 442 bp, Homo sapiens
gctagggcaacagagtgacaccctgtctcaaaacaaaaatagaaaaagatcaagcattaacgaatcaagctaagactaggccccagccaagatggatatttacatctgtccccacagggaggatatgcatttgtttagcaaatactactatgtatgtcaggcattctccaaagctctgcaacatggcagtaaatagaactaacccatgattcttcatctggctcacattctaatggaaacaaaggcatagataatgtcagctgctagcagtactataaagaaaaaataaaacaggacatggggaaagtgattagagagagaagacaatgcatgttgactgtgtcattagagggttgaaaaccaaaatatctcatgatcatttacattttacaggtaaatttataactcctaagaacagaaaagatgagttttgaatgattca

SEQ ID NO: 382299 - DNA, 546 bp, Homo sapiens
tgttattggggagttgcgtttccctactattattgcgtggctacttgagtcttattgtaggtctagcagtacttgttgtataactctatgttccccaaagttgggtgcatctacatttaggatagttaagtcttcttgttgaattgaaccctctatcgttatgcaatgcctttctttgttttattttactattaatgatttaaagtccttttttcttaaaagagaaacaattccaggtatggtgctcatgccagcactttcagactgaggcagtaggattgcctgagaccaggagtttgagaccagccgaggcaacataacaacattctgtttgtacagattcttttaaagaaactatacaggtgtggtagtgtgcccaactgtggtcatatttactcaggagacataggaggcatgactgctttacttcagaaatttgaggttacagtgagctgtgattgcaccactgcaatctgtcccaggagatagagtaagatcctgtgtataaaatgaaaaaataaagaaaaataaaatgattttaagtta

SEQ ID NO: 382300 - DNA, 496 bp, Homo sapiens
atggtaacatgaattgactgagtacatatcaagtcttacactgtatacttcacatgcactaactctcctactcttcacaacaagcatgcaaggtgggaaaatagaggctgagagaaattgagtaacttgcctcaagccatatattcggcaccgagatgtgatctgagccagagccaacaactgaggtccaaacagcgtgccttgcgcaaggccacacaagagataatggcattggctgtaccagtggcccagatccttcacctgcagaagagcttcccagagaggagcaagccttcctgccgtcacctctggtgtcatcctataggacattaaaaccaactcaagattgtgttgaaaactgttttccttttgaggatgctaataagaacaagatcatatcaacgggtatggatcatggcaggattttccttcagctgagtcttttaatgagccgtttcataatgagggctgaatctacacacagtatctacatgct

SEQ ID NO: 382301 - DNA, 234 bp, Homo sapiens
ggtcacagcaaaagaagtaaatgtaagttacttagattttccaaaagcctttgataaaattccagtcagcagttggaggggaaagcacattatgtaataataactgggaaaatgacttttaagaacatgaaaaataggctatgcatggtggctcattcttatgtataatcacagcaccttgggaggttcaggtgggaggactgattgagcccaggagttggagaccagcctggg

SEQ ID NO: 382302 - DNA, 436 bp, Homo sapiens
aaatatgtgctgagtcttggatttgcatctttatcgtgactccacggagacccaccctctaagaccagagccagtgtcctattcatcttttgtctctgcagcgttcagcatggcactgtcttggcttacaaaatctgctctatgcttgctgactgctgaatgaatgaatgaatgaataggtagtcacaaagaatgtttagaatgtttctcagacaggctgagaaaaaacacaacgaaacattatttccgtttggaaagtttttttatttttgtgttcagtactgaagtaaaacaaaaatctgaataacagctgcaccgttaaaaatgaaattaccaatatatgaactctaggcatcatgcatatataattttttgtagataacttttcttctcattttccttctcattctcttcatctttttctttttgtttgagc

SEQ ID NO: 382303 - DNA, 819 bp, Homo sapiens
tcaggaaggaaaaaatgcagctgttcttattgcacatcaaatccacaaggaggaaaatatgccttcttttcaggagtcaggctcgggcttgcaagtaaaatgcacaggccttcttcctctcagttaggagagcaaggctttcgctgtccccagaggtctgcccgagactgaagccctctgactcttgacctcagtgggctctgccaggcttcctcatgcattaggatcacctgctccacagtgaaacactcactatcaaagttttcccgcaacttctgagcaagcgaataaattcagctctagcacactctcaggtcaccctgagtcctctcactcccatgaccgaacatgtggggcacgtgaggtcctgagtcttgaaccctgctctatggagcagagtttaatgagcgccactcatggcgggcgagcgggtgaggccaacccctaggacgcaagagcgcagaggagccgcggcgtccccggtacaggaaacgcgtccccacggctcgcctcctgtgccgcagccctagcagaacagctacacggcactcatttgttccctttccctagcttgcatagcaacagcaattgcacaccccatagatgattttgatggttatcagagtcctccccagatctgtagcgaaacagccctatcattcccaaagcgagatcttcattagatgcagacaaaaaccgcaaaatgtgaatgaaatgctgtttgtgtgaatgaaaaggctagcgagcgagccagcgtttctgtgaatgaagcagggccttgcagccggtgccaggcaatcccctgggctccagcggcct

SEQ ID NO: 382304 - DNA, 538 bp, Homo sapiens
gtcctaatgttgaaacttgtttggcttcctagactaaaccaagcttaattgtgaagtaatattcattgtaatacttaactggatgcaaacactaatgagtattttattatctgtgatatttgcacctgttttcagaagtaagatatctatacttttgttattttgttttcattttttgcttctatcttcagttttgagtatctaggtatgctgacttggtataatacattgggaagtttttcatgtttctctatgctctagagcagtttcttaatattgaaatgttctcttccttgaagatctgggtaaatttattctataaaataatctgagtagatccttttgtagcttttcaatcttttgtattgttttgggtttgtttacattttccacttcttcctgagtcaatgttggtgattaacctattctcgagaattaattcacccatgcttttcaagtgtatttcataagtgtgaacacgatactctcatatttaaatatcctttgtatctgtatatgtgttattttctttattctt

SEQ ID NO: 382305 - DNA, 460 bp, Homo sapiens
caaagtggatgaagcgagcagagcatgggatgggaggagagaggagaaaacctgcctctgaaggggtgatgaattagggtaaacccctaagagatgagaaggatgagagggtgaaaagcatcgccaggcacagggagctgcatgtccaactgttcctcaggggagaaagtttggccttctctaggaacagacggagagaaggcaagggatcctaagggagatggtgcaagggcttttggggagtttggggtttatccaaaatgtagtagagaagagggttcttgaagagttttcagcagggatgggacatgtgggatttgtgtaaagcagggagcaaactatggctcaagggcctgctttggctcactgcctgtttttggaaacaaagttttattggatcacagacacaccattagttttcttaggagctacaaaggcagaatttatgaaaaaagaaaat

SEQ ID NO: 382306 - DNA, 415 bp, Homo sapiens
ataaacattcatggccctggaaagaaattaacgcttccatagtttgagggattccaaaatttcctttttgccagttcttactcctgggtgtgatctgttatagagtacggagggcagtacagaggactggacttgggttcttgcctgtttcctgctgcattgttgttctgtgatttggggtctcgtaagaatttttctgagttttttctttgtaagagagggatcagccctgtcatacctaccataaagaattgctgaagctcaaatcagatcgcttaagtaaaaatgacttgaaaagcccaaagagatctataatttttaggacaagaaaaaatgattttaagaatttttttgaaaattttagagcattccttgaaaataactagaagaaccctggggcactgcaaaaaaaaaa

SEQ ID NO: 382307 - DNA, 339 bp, Homo sapiens
gaagaaggaggcatcttggctctagtggacaagggccctgagctttacacagccctccatatttattaggcaaaagagatagtgagaaggcgggtggaagaaggggtcagctgctcagtctagagtaggcttgcaagactgcattccttgaacaaaaggttctagatgttgcagtagagaaccttggcgccagggagtgattgcctccagcaaaccttctgttggcaggagcagtcggccggagcagtcgtgagtttgctcatatcctgcattcatgatgaacggtttgctgtttgatcatatagtctccaggggaatgctgagttggtcacgtcccat

SEQ ID NO: 382308 - DNA, 427 bp, Homo sapiens
caagttttttacatctgaatatatacatatgtacatatggctttggcatggccgagaaaaagaatcgataagcaaattcttttatgtacttcctataaaagatacgatacataagacagtttttattttttttttttctctctctctcttccctaaacagtcccgaggccccctgggtgctgaaggcagcaccgcagtgcaacgtgtcctctctcggttccatttctggaggagctgatgcaattccaaggcgcggggctgggccagagctcggttcttgtgctacagtagaatagtgttccagcgtggctgcctctgcagcgcctggcaattctagaaattttgccatctgcagctcagctcaggaatactgagcttgcagccatcagctttgagtgccattatctgaaccggccctgcgtgccag

SEQ ID NO: 382309 - DNA, 4838 bp, Homo sapiens
  misc_feature (5)..(5): n is a, c, g, or t
agtgnggcgcgcgaggtctaagggcgcgagggaagtggcgggcggggactaaggcggggcgtgcaggtagccggccggccgggggtcgcgggtatggccgaggccaggaagcggcgggagctacttcccctgatctaccaccatctgctgcgggctggctatgtgcgtgcggcgcgggaagtgaaggagcagagcggccagaagtgtttcctggctcagcccgtaacccttctggacatctatacacactggcaacaaacctcagagcttggtcggaagcggaaggcagaggaagatgcggcactgcaagctaagaaaacccgtgtgtcagaccccatcagcacctcggagagctcggaagaggaggaagaagcagaagccgaaaccgccaaagccaccccaagactagcatctaccaactcctcagtcctgggggcggacttgccatcaagcatgaaagaaaaagccaaggcagagacagagaaagctggcaagactgggaattccatgccacaccctgccactgggaagacggtggccaaccttctttctgggaagtctcccaggaagtcagcagagccctcagcaaatactacgttggtctcagaaactgaggaggagggcagcgtcccggcctttggagctgctgccaagcctgggatggtgtcagcgggccaggccgacagctccagcgaggacacctccagctccagtgatgagacagacgtggaggtaaaggcctctgaaaaaattctccaggtcagagctgcctcagcccctgccaaggggacccctgggaaaggggctaccccagcaccccctgggaaggcaggggctgtagcctcccagaccaaggcagggaagccagaggaggactcagagagcagcagcgaggagtcatctgacagtgaggaggagacgccagctgccaaggccctgcttcaggcgaaggcctcaggaaaaacctctcaggtcggagctgcctcagcccctgccaaggagtcccccaggaaaggagctgccccagcgccccctgggaagacagggcctgcagttgccaaggcccaggcggggaagcgggaggaggactcgcagagcagcagcgaggaatcggacagtgaggaggaggcgcctgctcaggcgaagccttcagggaaggccccccaggtcagagccgcctcggcccctgccaaggagtcccccaggaaaggggctgccccagcacctcctaggaaaacagggcctgcagccgcccaggtccaggtggggaagcaggaggaggactcaagaagcagcagcgaggagtcagacagtgacagagaggcactggcagccatgaatgcagctcaggtgaagcccttggggaaaagcccccaggtgaaacctgcctctaccatgggcatggggcccttggggaaaggcgccggcccagtgccacccgggaaggtggggcctgcaaccccctcagcccaggtggggaagtgggaggaggactcagagagcagtagtgaggagtcatcagacagcagtgatggagaggtgcccacagctgtggccccggctcaggaaaagtccttggggaacatcctccaggccaaacccacctccagtcctgccaaggggccccctcagaaggcagggcctgtagccgtccaggtcaaggctgaaaagcccatggacaactcggagagcagcgaggagtcatcggacagtgcggacagtgaggaggcaccagcagccatgactgcagctcaggcaaaaccagctctgaaaattcctcagaccaaggcctgcccaaagaaaaccaataccactgcatctgccaaggtcgcccctgtgcgagtgggcacccaagccccccggaaagcaggaactgcgacttctccagcaggctcatccccagctgtggctgggggcacccagagaccagcagaggattcttcaagcagtgaggaatcagatagtgaggaagagaagacaggtcttgcagtaaccgtgggacaggcaaagtctgtggggaaaggcctccaggtgaaagcagcctcagtgcctgtcaaggggtccttggggcaagggactgctccagtactccctgggaagacggggcctacagtcacccaggtgaaagctgaaaagcaggaagactctgagagcagtgaggaggaatcagacagtgaggaagcagctgcatctccagcacaggtgaaaacctcagtaaagaaaacccaggccaaagccaacccagctgccgccagagcaccttcagcaaaagggacaatttcagcccctggaaaagttgtcactgcagctgctcaagccaagcagaggtctccatccaaggtgaagccaccagtgagaaacccccagaacagtaccgtcttggcgaggggcccagcatctgtgccatctgtggggaaggccgtggctacagcagctcaggcccagacagggccagaggaggactcagggagcagtgaggaggagtcagacagtgaggaggaggcggagacgctggctcaggtgaagccttcagggaagacccaccagatcagagctgccttggctcctgccaaggagtcccccaggaaaggggctgccccaacacctcctgggaagacagggccttcggctgcccaggcagggaagcaggatgactcagggagcagcagcgaggaatcagacagtgatggggaggcaccggcagctgtgacctctgcccaggtgattaaaccccctctgatttttgtcgaccctaatcgtagtccagctggcccagctgctacacccgcacaagcccaggctgcaagcaccccgaggaaggcccgagcctcggagagcacagccaggagctcctcctccgagagcgaggatgaggacgtgatccccgctacacagtgcttgactcctggcatcagaaccaatgtggtgaccatgcccactgcccacccaagaatagcccccaaagccagcatggctggggccagcagcagcaaggagtccagtcggatatcagatggcaagaaacaggagggaccagccactcaggtgtcaaagaagaacccagcttccctcccactgacccaggctgccctgaaggtcctcgcccagaaagccagtgaggctcagcctcctgttgccaggacccagccttcaagtggggttgacagtgctgtgggaacactccctgcaacaagtccccagagcacctccgtccaggccaaagggaccaacaagctcagaaaacctaagcttcctgaggtccagcaggccaccaaagcccctgagagctcagatgacagtgaggacagcagcgacagttcttcagggagtgaggaagatggtgaagggccccagggggccaagtcagcccacacgctggtaggtcccaccccctccaggacagagaccctggtggaggagaccgcagcagagtccagcgaggatgatgtggtggcgccatcccagtctctcctctcaggttatatgacccctggactaaccccagccaattcccaggcctcaaaagccactcccaagctagactccagcccctcagtttcctctactctggccgccaaagatgacccagatggcaagcaggaggcaaagccccaacaggcagcaggcatgttgtcccctaaaacaggtggaaaagaggctgcttcaggcaccacacctcagaagtcccggaagcccaagaaaggggctgggaacccccaagcctcaaccctggcgctgcaaagcaacatcacccagtgcctcctgggccaaccctggcccctgaatgaggcccaggtgcaggcctcagtggtgaaggtcctgactgagctgctggaacaggaaagaaagaaggtggtggacaccaccaaggagagcagcaggaagggctgggagagccgcaagcggaagctatcgggagaccagccagctgccaggacccccaggagcaagaagaagaagaagctgggggccggggaaggtggggaggcctctgtttccccagaaaagacctccacgacttccaaggggaaagcaaagagagacaaagcaagtggtgatgtcaaggagaagaaagggaaggggtctcttggctcccaaggggccaaggacgagccagaagagaagacgacagaaggggatggggacggttgaaggtggagatcaaagcaacccaaagagcaagaaggagaagaagaaatccgacaagagaaaaaaagacaaagaaaaaaaagaaaagaagaagaaagcaaaaaaggcctcaaccaaagattctgagtcaccgtcccagaagaaaaagaagaaaaagaagaagacagcagagcagactgtatgacgagcaccagcaccaggcacagggatttcctagccgagcagtggccatccccatgcctctgacctccaccgacctctgcccaccatgggttggaactaaactgttaccttccctcgctccacagaagaagacagccagcttcaggggtccctgtgctggccaagccagtgagcctgcggggaggctggtccaaggagaaagtggaccagctcccatgacctcaccccactcccccaacacaggacgcttcatatagatgtgtacagtatatgtatttttttaagtgacctcctctccttccacagaccccacatgcccaaaggcctcgggacttcccaccaccttgctccacagatccagctaggcctgacctgtgcctcatcccgtgccgctcggtctctggctgatcccgaggctttgtcttcctctcgtcagttcttttggttgtgttttttgttttttttttaataactcaaaaaaaaaataaaagacttggaggaagggt

SEQ ID NO: 382310 - DNA, 3463 bp, Homo sapiens
  misc_feature (5)..(5): n is a, c, g, or t
agtgnggcgcgcgaggtctaagggcgcgagggaagtggcgggcggggactaaggcggggcgtgcaggtagccggccggccgggggtcgcgggtatggccgaggccaggaagcggcgggagctacttcccctgatctaccaccatctgctgcgggctggctatgtgcgtgcggcgcgggaagtgaaggagcagagcggccagaagtgtttcctggctcagcccgtaacccttctggacatctatacacactggcaacaaacctcagagcttggtcggaagcggaaggcagaggaagatgcggcactgcaagctaagaaaacccgtgtgtcagaccccatcagcacctcggagagctcggaagaggaggaagaagcagaagccgaaaccgccaaagccaccccaagactagcatctaccaactcctcagtcctgggggcggacttgccatcaagcatgaaagaaaaagccaaggcagagacagagaaagctggcaagactgggaattccatgccacaccctgccactgggaagacggtggccaaccttctttctgggaagtctcccaggaagtcagcagagccctcagcaaatactacgttggtctcagaaactgaggaggagggcagcgtcccggcctttggagctgctgccaagcctgggatggtgtcagcgggccaggccgacagctccagcgaggacacctccagctccagtgatgagacagacgtggaggggaaaccctcagtaaaaccagcccaggtcaaagcctcatcagtttctactaaggagtctccagcaagaaaggcggccccagcccctgggaaggtgggggatgtgacaccccaggtcaaaggaggggccctgcccccagccaagagggccaagaagccagaagaggagtcagagagtagtgaggagggatctgaaagtgaggaggaggcccctgcagggacacgaagccaggtaaaggcctctgaaaaaattctccaggtcagagctgcctcagcccctgccaaggggacccctgggaaaggggctaccccagcaccccctgggaaggcaggggctgtagcctcccagaccaaggcagggaagccagaggaggactcagagagcagcagcgaggagtcatctgacagtgaggaggagacgccagctgccaaggccctgcttcaggcgaaggcctcaggaaaaacctctcaggtcggagctgcctcagcccctgccaaggagtcccccaggaaaggagctgccccagcgccccctgggaagacagggcctgcagttgccaaggcccaggcggggaagcgggaggaggactcgcagagcagcagcgaggaatcggacagtgaggaggaggcgcctgctcaggcgaagccttcagggaaggccccccaggtcagagccgcctcggcccctgccaaggagtcccccaggaaaggggctgccccagcacctcctaggaaaacagggcctgcagccgcccaggtccaggtggggaagcaggaggaggactcaagaagcagcagcgaggagtcagacagtgacagagaggcactggcagccatgaatgcagctcaggtgaagcccttggggaaaagcccccaggtgaaacctgcctctaccatgggcatggggcccttggggaaaggcgccggcccagtgccacccgggaaggtggggcctgcaaccccctcagcccaggtggggaagtgggaggaggactcagagagcagtagtgaggagtcatcagacagcagtgatggagaggtgcccacagctgtggccccggctcaggaaaagtccttggggaacatcctccaggccaaacccacctccagtcctgccaaggggccccctcagaaggcagggcctgtagccgtccaggtcaaggctgaaaagcccatggacaactcggagagcagcgaggagtcatcggacagtgcggacagtgaggaggcaccagcagccatgactgcagctcaggcaaaaccagctctgaaaattcctcagaccaaggcctgcccaaagaaaaccaataccactgcatctgccaaggtcgcccctgtgcgagtgggcacccaagccccccggaaagcaggaactgcgacttctccagcaggctcatccccagctgtggctgggggcacccagagaccagcagaggattcttcaagcagtgaggaatcagatagtgaggaagagaagacaggtcttgcagtaaccgtgggacaggcaaagtctgtggggaaaggcctccaggtgaaagcagcctcagtgcctgtcaaggggtccttggggcaagggactgctccagtactccctgggaagacggggcctacagtcacccaggtgaaagctgaaaagcaggaagactctgagagcagtgaggaggaatcagacagtgaggaagcagctgcatctccagcacaggtgaaaacctcagtaaagaaaacccaggccaaagccaacccagctgccgccagagcaccttcagcaaaagggacaatttcagcccctggaaaagttgtcactgcagctgctcaagccaagcagaggtctccatccaaggtgaagccaccagtgagaaacccccagaacagtaccgtcttggcgaggggcccagcatctgtgccatctgtggggaaggccgtggctacagcagctcaggcccagacagggccagaggaggactcagggagcagtgaggaggagtcagacagtgaggaggaggcggagacgctggctcaggtgaagccttcagggaagacccaccagatcagagctgccttggctcctgccaaggagtcccccaggaaaggggctgccccaacacctcctgggaagacagggccttcggctgcccaggcagggaagcaggatgactcagggagcagcagcgaggaatcagacagtgatggggaggcaccggcagctgtgacctctgcccaggaccaggagtcttcttgaatcccatgagctctgcccaggaccctctctcaagcacctgtggcataccttcatgtgctccactgcacccagagcttaagccacagtcctgctcaggctacacctccaagggtgggaccaggcccaccttatcttcctgtactccagaggcccaagtcagccatgctggtgtggtccaagcttctgtgtgaaccctggcccttccatcagacagcattaccctttgtcctcctctagccccaagctcccagaagcttctgccaggcacctcagagcaccagctcccctgtcccagggcctaaccacagatcctggagttctgcaacctccagaccagagcggtctcatgaaccacctccccttgaatatcacataccacattgttatcaattcatcagtaaggtcagatgctgtttgcacacctccagcaatagggtgctcactgcctctcactttccaatggcacagattacaaaagtaaagaacaaccacc

SEQ ID NO: 382311 - DNA, 222 bp, Homo sapiens
aattcaagcttctaacgatgtacggggacatgcccaaaggcctcgggacttcccaccaccttgctccacagatccagctaggcctgacctgtgcctcatcccgtgccgctcggtctctggctgatcccgaggctttgtcttcctctcgtcagttcttttggttgtgttttttgttttttttttaataactcaaaaaaaaaataaaagacttggaggaagggt

SEQ ID NO: 382312 - DNA, 5516 bp, Homo sapiens
  misc_feature (5)..(5): n is a, c, g, or t
agtgnggcgcgcgaggtctaagggcgcgagggaagtggcgggcggggactaaggcggggcgtgcaggtagccggccggccgggggtcgcgggtatggccgaggccaggaagcggcgggagctacttcccctgatctaccaccatctgctgcgggctggctatgtgcgtgcggcgcgggaagtgaaggagcagagcggccagaagtgtttcctggctcagcccgtaacccttctggacatctatacacactggcaacaaacctcagagcttggtcggaagcggaaggcagaggaagatgcggcactgcaagctaagaaaacccgtgtgtcagaccccatcagcacctcggagagctcggaagaggaggaagaagcagaagccgaaaccgccaaagccaccccaagactagcatctaccaactcctcagtcctgggggcggacttgccatcaagcatgaaagaaaaagccaaggcagagacagagaaagctggcaagactgggaattccatgccacaccctgccactgggaagacggtggccaaccttctttctgggaagtctcccaggaagtcagcagagccctcagcaaatactacgttggtctcagaaactgaggaggagggcagcgtcccggcctttggagctgctgccaagcctgggatggtgtcagcgggccaggccgacagctccagcgaggacacctccagctccagtgatgagacagacgtggaggggaaaccctcagtaaaaccagcccaggtcaaagcctcatcagtttctactaaggagtctccagcaagaaaggcggccccagcccctgggaaggtgggggatgtgacaccccaggtcaaaggaggggccctgcccccagccaagagggccaagaagccagaagaggagtcagagagtagtgaggagggatctgaaagtgaggaggaggcccctgcagggacacgaagccaggtaaaggcctctgaaaaaattctccaggtcagagctgcctcagcccctgccaaggggacccctgggaaaggggctaccccagcaccccctgggaaggcaggggctgtagcctcccagaccaaggcagggaagccagaggaggactcagagagcagcagcgaggagtcatctgacagtgaggaggagacgccagctgccaaggccctgcttcaggcgaaggcctcaggaaaaacctctcaggtcggagctgcctcagcccctgccaaggagtcccccaggaaaggagctgccccagcgccccctgggaagacagggcctgcagttgccaaggcccaggcggggaagcgggaggaggactcgcagagcagcagcgaggaatcggacagtgaggaggaggcgcctgctcaggcgaagccttcagggaaggccccccaggtcagagccgcctcggcccctgccaaggagtcccccaggaaaggggctgccccagcacctcctaggaaaacagggcctgcagccgcccaggtccaggtggggaagcaggaggaggactcaagaagcagcagcgaggagtcagacagtgacagagaggcactggcagccatgaatgcagctcaggtgaagcccttggggaaaagcccccaggtgaaacctgcctctaccatgggcatggggcccttggggaaaggcgccggcccagtgccacccgggaaggtggggcctgcaaccccctcagcccaggtggggaagtgggaggaggactcagagagcagtagtgaggagtcatcagacagcagtgatggagaggtgcccacagctgtggccccggctcaggaaaagtccttggggaacatcctccaggccaaacccacctccagtcctgccaaggggccccctcagaaggcagggcctgtagccgtccaggtcaaggctgaaaagcccatggacaactcggagagcagcgaggagtcatcggacagtgcggacagtgaggaggcaccagcagccatgactgcagctcaggcaaaaccagctctgaaaattcctcagaccaaggcctgcccaaagaaaaccaataccactgcatctgccaaggtcgcccctgtgcgagtgggcacccaagccccccggaaagcaggaactgcgacttctccagcaggctcatccccagctgtggctgggggcacccagagaccagcagaggattcttcaagcagtgaggaatcagatagtgaggaagagaagacaggtcttgcagtaaccgtgggacaggcaaagtctgtggggaaaggcctccaggtgaaagcagcctcagtgcctgtcaaggggtccttggggcaagggactgctccagtactccctgggaagacggggcctacagtcacccaggtgaaagctgaaaagcaggaagactctgagagcagtgaggaggaatcagacagtgaggaagcagctgcatctccagcacaggtgaaaacctcagtaaagaaaacccaggccaaagccaacccagctgccgccagagcaccttcagcaaaagggacaatttcagcccctggaaaagttgtcactgcagctgctcaagccaagcagaggtctccatccaaggtgaagccaccagtgagaaacccccagaacagtaccgtcttggcgaggggcccagcatctgtgccatctgtggggaaggccgtggctacagcagctcaggcccagacagggccagaggaggactcagggagcagtgaggaggagtcagacagtgaggaggaggcggagacgctggctcaggtgaagccttcagggaagacccaccagatcagagctgccttggctcctgccaaggagtcccccaggaaaggggctgccccaacacctcctgggaagacagggccttcggctgcccaggcagggaagcaggatgactcagggagcagcagcgaggaatcagacagtgatggggaggcaccggcagctgtgacctctgcccaggtgattaaaccccctctgatttttgtcgaccctaatcgtagtccagctggcccagctgctacacccgcacaagcccaggctgcaagcaccccgaggaaggcccgagcctcggagagcacagccaggagctcctcctccgagagcgaggatgaggacgtgatccccgctacacagtgcttgactcctggcatcagaaccaatgtggtgaccatgcccactgcccacccaagaatagcccccaaagccagcatggctggggccagcagcagcaaggagtccagtcggatatcagatggcaagaaacaggagggaccagccactcaggtgtcaaagaagaacccagcttccctcccactgacccaggctgccctgaaggtcctcgcccagaaagccagtgaggctcagcctcctgttgccaggacccagccttcaagtggggttgacagtgctgtgggaacactccctgcaacaagtccccagagcacctccgtccaggccaaagggaccaacaagctcagaaaacctaagcttcctgaggtccagcaggccaccaaagcccctgagagctcagatgacagtgaggacagcagcgacagttcttcagggagtgaggaagatggtgaagggccccagggggccaagtcagcccacacgctggtaggtcccaccccctccaggacagagaccctggtggaggagaccgcagcagagtccagcgaggatgatgtggtggcgccatcccagtctctcctctcaggttatatgacccctggactaaccccagccaattcccaggcctcaaaagccactcccaagctagactccagcccctcagtttcctctactctggccgccaaagatgacccagatggcaagcaggaggcaaagccccaacaggcagcaggcatgttgtcccctaaaacaggtggaaaagaggctgcttcaggcaccacacctcagaagtcccggaagcccaagaaaggggctgggaacccccaagcctcaaccctggcgctgcaaagcaacatcacccagtgcctcctgggccaaccctggcccctgaatgaggcccaggtgcaggcctcagtggtgaaggtcctgactgagctgctggaacaggaaagaaagaaggtggtggacaccaccaaggagagcagcaggaagggctgggagagccgcaagcggaagctatcgggagaccagccagctgccaggacccccaggagcaagaagaagaagaagctgggggccggggaaggtggggaggcctctgtttccccagaaaagacctccacgacttccaaggggaaagcaaagagagacaaagcaagtggtgatgtcaaggagaagaaagggaaggggtctcttggctcccaaggggccaaggacgagccagaagagaagacgacagaaggggatggggacggttgaaggtggagatcaaagcaacccaaagagcaagaaggagaagaagaaatccgacaagagaaaaaaagacaaagaaaaaaaagaaaagaagaagaaagcaaaaaaggcctcaaccaaagattctgagtcaccgtcccagaagaaaaagaagaaaaagaagaagacagcagagcagactgtatgacgagcaccagcaccaggcacagggatttcctagccgagcagtggccatccccatgcctctgacctccaccgacctctgcccaccatgggttggaactaaactgttaccttccctcgctccacagaagaagacagccagcttcaggggtccctgtgctggccaagccagtgagcctgcggggaggctggtccaaggagaaagtggaccagctcccatgacctcaccccactcccccaacacaggacgcttcatatagatgtgtacagtatatgtatttttttaagtgacctcctctccttccacagaccccacatgcccaaaggcctcgggacttcccaccaccttgctccacagatccagctaggcctgacctgtgcctcatcccgtgccgctcggtctctggctgatcccgaggctttgtcttcctctcgtcagttcttttggttgtgttttttgttttttttttaataactcaaaaaaaaaataaaagacttggaggaagggtgcaagctcccagtgcatctggggcacatgtttcttggaagggactgtctcgccgacactcgggattccctcttgcctgcatgttgaggctatgggtgaccgtggttagtgggacaggcagtgagcagtgaagtgcctgagtgccgaattggtggggaaggcttcctggatgaggtggcatctaaactaaaggatggtcatggttgatttcctgttgccagagtaagtcatgtaaatacccaaagacaagaaatggaaggggctgagaatcctcgagttaggcctcgagctaggggcaggctccctggaggtgcctggtgaacagctgtggcaggcacagcaggtctaggaaaatcggaagtgagttgcccctcaaatcgagctcaccatggttctgtggtggtgagggcaagaagtggatgaacatgaaagacaggatgatgtcttg

SEQ ID NO: 382313 - DNA, 4568 bp, Homo sapiens
  misc_feature (5)..(5): n is a, c, g, or t
agtgnggcgcgcgaggtctaagggcgcgagggaagtggcgggcggggactaaggcggggcgtgcaggtagccggccggccgggggtcgcgggtatggccgaggccaggaagcggcgggagctacttcccctgatctaccaccatctgctgcgggctggctatgtgcgtgcggcgcgggaagtgaaggagcagagcggccagaagtgtttcctggctcagcccgtaacccttctggacatctatacacactggcaacaaacctcagagcttggtcggaagcggaaggcagaggaagatgcggcactgcaagctaagaaaacccgtgtgtcagaccccatcagcacctcggagagctcggaagaggaggaagaagcagaagccgaaaccgccaaagccaccccaagactagcatctaccaactcctcagtcctgggggcggacttgccatcaagcatgaaagaaaaagccaaggcagagacagagaaagctggcaagactgggaattccatgccacaccctgccactgggaagacggtggccaaccttctttctgggaagtctcccaggaagtcagcagagccctcagcaaatactacgttggtctcagaaactgaggaggagggcagcgtcccggcctttggagctgctgccaagcctgggatggtgtcagcgggccaggccgacagctccagcgaggacacctccagctccagtgatgagacagacgtggaggggaaaccctcagtaaaaccagcccaggtcaaagcctcatcagtttctactaaggagtctccagcaagaaaggcggccccagcccctgggaaggtgggggatgtgacaccccaggtcaaaggaggggccctgcccccagccaagagggccaagaagccagaagaggagtcagagagtagtgaggagggatctgaaagtgaggaggaggcccctgcagggacacgaagccaggtaaaggcctctgaaaaaattctccaggtcagagctgcctcagcccctgccaaggggacccctgggaaaggggctaccccagcaccccctgggaaggcaggggctgtagcctcccagaccaaggcagggaagccagaggaggactcagagagcagcagcgaggagtcatctgacagtgaggaggagacgccagctgccaaggccctgcttcaggcgaaggcctcaggaaaaacctctcaggtcggagctgcctcagcccctgccaaggagtcccccaggaaaggagctgccccagcgccccctgggaagacagggcctgcagttgccaaggcccaggcggggaagcgggaggaggactcgcagagcagcagcgaggaatcggacagtgaggaggaggcgcctgctcaggcgaagccttcagggaaggccccccaggtcagagccgcctcggcccctgccaaggagtcccccaggaaaggggctgccccagcacctcctaggaaaacagggcctgcagccgcccaggtccaggtggggaagcaggaggaggactcaagaagcagcagcgaggagtcagacagtgacagagaggcactggcagccatgaatgcagctcaggtgaagcccttggggaaaagcccccaggtgaaacctgcctctaccatgggcatggggcccttggggaaaggcgccggcccagtgccacccgggaaggtggggcctgcaaccccctcagcccaggtggggaagtgggaggaggactcagagagcagtagtgaggagtcatcagacagcagtgatggagaggtgcccacagctgtggccccggctcaggaaaagtccttggggaacatcctccaggccaaacccacctccagtcctgccaaggggccccctcagaaggcagggcctgtagccgtccaggtcaaggctgaaaagcccatggacaactcggagagcagcgaggagtcatcggacagtgcggacagtgaggaggcaccagcagccatgactgcagctcaggcaaaaccagctctgaaaattcctcagaccaaggcctgcccaaagaaaaccaataccactgcatctgccaaggtcgcccctgtgcgagtgggcacccaagccccccggaaagcaggaactgcgacttctccagcaggctcatccccagctgtggctgggggcacccagagaccagcagaggattcttcaagcagtgaggaatcagatagtgaggaagagaagacaggtcttgcagtaaccgtgggacaggcaaagtctgtggggaaaggcctccaggtgaaagcagcctcagtgcctgtcaaggggtccttggggcaagggactgctccagtactccctgggaagacggggcctacagtcacccaggtgaaagctgaaaagcaggaagactctgagagcagtgaggaggaatcagacagtgaggaagcagctgcatctccagcacaggtgaaaacctcagtaaagaaaacccaggccaaagccaacccagctgccgccagagcaccttcagcaaaagggacaatttcagcccctggaaaagttgtcactgcagctgctcaagccaagcagaggtctccatccaaggtgaagccaccagtgagaaacccccagaacagtaccgtcttggcgaggggcccagcatctgtgccatctgtggggaaggccgtggctacagcagctcaggcccagacagggccagaggaggactcagggagcagtgaggaggagtcagacagtgaggaggaggcggagacgctggctcaggtgaagccttcagggaagacccaccagatcagagctgccttggctcctgccaaggagtcccccaggaaaggggctgccccaacacctcctgggaagacagggccttcggctgcccaggcagggaagcaggatgactcagggagcagcagcgaggaatcagacagtgatggggaggcaccggcagctgtgacctctgcccaggtgattaaaccccctctgatttttgtcgaccctaatcgtagtccagctggcccagctgctacacccgcacaagcccaggctgcaagcaccccgaggaaggcccgagcctcggagagcacagccaggagctcctcctccgagagcgaggatgaggacgtgatccccgctacacagtgcttgactcctggcatcagaaccaatgtggtgaccatgcccactgcccacccaagaatagcccccaaagccagcatggctggggccagcagcagcaaggagtccagtcggatatcagatggcaagaaacaggagggaccagccactcaggtgtcaaagaagaacccagcttccctcccactgacccaggctgccctgaaggtcctcgcccagaaagccagtgaggctcagcctcctgttgccaggacccagccttcaagtggggttgacagtgctgtgggaacactccctgcaacaagtccccagagcacctccgtccaggccaaagggaccaacaagctcagaaaacctaagcttcctgaggtccagcaggccaccaaagcccctgagagctcagatgacagtgaggacagcagcgacagttcttcagggagtgaggaagatggtgaagggccccagggggccaagtcagcccacacgctggtaggtcccaccccctccaggacagagaccctggtggaggagaccgcagcagagtccagcgaggatgatgtggtggcgccatcccagtctctcctctcaggttatatgacccctggactaaccccagccaattcccaggcctcaaaagccactcccaagctagactccagcccctcagtttcctctactctggccgccaaagatgacccagatggcaagcaggaggcaaagccccaacaggcagcaggcatgttgtcccctaaaacaggtggaaaagaggctgcttcaggcaccacacctcagaagtcccggaagcccaagaaaggggctgggaacccccaagcctcaaccctggcgctgcaaagcaacatcacccagtgcctcctgggccaaccctggcccctgaatgaggcccaggtgcaggcctcagtggtgaaggtcctgactgagctgctggaacaggaaagaaagaaggtggtggacaccaccaaggagagcagcaggaagggctgggagagccgcaagcggaagctatcgggagaccagccagctgccaggacccccaggagcaagaagaagaagaagctgggggccggggaaggtggggaggcctctgtttccccagaaaagacctccacgacttccaaggggaaagcaaagagagacaaagcaagtggtgatgtcaaggagaagaaagggaaggggtctcttggctcccaaggggccaaggacgagccagaagagaagacgacagaaggggatggggacggttgaaggtggagatcaaagcaacccaaagagcaagaaggagaagaagaaatccgacaagagaaaaaaagacaaagaaaaaaaagaaaagaagaagaaagcaaaaaaggcctcaaccaaagattctgagtcaccgtcccagaagaaaaagaagaaaaagaaacaaaaagtcgtatcgatgtcgagcgatc

SEQ ID NO: 382314 - DNA, 5688 bp, Homo sapiens
  misc_feature (5)..(5): n is a, c, g, or t
agtgnggcgcgcgaggtctaagggcgcgagggaagtggcgggcggggactaaggcggggcgtgcaggtagccggccggccgggggtcgcgggtatggccgaggccaggaagcggcgggagctacttcccctgatctaccaccatctgctgcgggctggctatgtgcgtgcggcgcgggaagtgaaggagcagagcggccagaagtgtttcctggctcagcccgtaacccttctggacatctatacacactggcaacaaacctcagagcttggtcggaagcggaaggcagaggaagatgcggcactgcaagctaagaaaacccgtgtgtcagaccccatcagcacctcggagagctcggaagaggaggaagaagcagaagccgaaaccgccaaagccaccccaagactagcatctaccaactcctcagtcctgggggcggacttgccatcaagcatgaaagaaaaagccaaggcagagacagagaaagctggcaagactgggaattccatgccacaccctgccactgggaagacggtggccaaccttctttctgggaagtctcccaggaagtcagcagagccctcagcaaatactacgttggtctcagaaactgaggaggagggcagcgtcccggcctttggagctgctgccaagcctgggatggtgtcagcgggccaggccgacagctccagcgaggacacctccagctccagtgatgagacagacgtggaggggaaaccctcagtaaaaccagcccaggtcaaagcctcatcagtttctactaaggagtctccagcaagaaaggcggccccagcccctgggaaggtgggggatgtgacaccccaggtcaaaggaggggccctgcccccagccaagagggccaagaagccagaagaggagtcagagagtagtgaggagggatctgaaagtgaggaggaggcccctgcagggacacgaagccaggtaaaggcctctgaaaaaattctccaggtcagagctgcctcagcccctgccaaggggacccctgggaaaggggctaccccagcaccccctgggaaggcaggggctgtagcctcccagaccaaggcagggaagccagaggaggactcagagagcagcagcgaggagtcatctgacagtgaggaggagacgccagctgccaaggccctgcttcaggcgaaggcctcaggaaaaacctctcaggtcggagctgcctcagcccctgccaaggagtcccccaggaaaggagctgccccagcgccccctgggaagacagggcctgcagttgccaaggcccaggcggggaagcgggaggaggactcgcagagcagcagcgaggaatcggacagtgaggaggaggcgcctgctcaggcgaagccttcagggaaggccccccaggtcagagccgcctcggcccctgccaaggagtcccccaggaaaggggctgccccagcacctcctaggaaaacagggcctgcagccgcccaggtccaggtggggaagcaggaggaggactcaagaagcagcagcgaggagtcagacagtgacagagaggcactggcagccatgaatgcagctcaggtgaagcccttggggaaaagcccccaggtgaaacctgcctctaccatgggcatggggcccttggggaaaggcgccggcccagtgccacccgggaaggtggggcctgcaaccccctcagcccaggtggggaagtgggaggaggactcagagagcagtagtgaggagtcatcagacagcagtgatggagaggtgcccacagctgtggccccggctcaggaaaagtccttggggaacatcctccaggccaaacccacctccagtcctgccaaggggccccctcagaaggcagggcctgtagccgtccaggtcaaggctgaaaagcccatggacaactcggagagcagcgaggagtcatcggacagtgcggacagtgaggaggcaccagcagccatgactgcagctcaggtgaggcctggggaaggaggctgctacatggcctgatctgccacaccacagtcagcacccccggggagctgtgctccctcaggcagagcatgggttttggctggtggggcagaacagatgggggactctgagttcaggaaccttctccagcctttctttggtgtcccctcaggcaaaaccagctctgaaaattcctcagaccaaggcctgcccaaagaaaaccaataccactgcatctgccaaggtcgcccctgtgcgagtgggcacccaagccccccggaaagcaggaactgcgacttctccagcaggctcatccccagctgtggctgggggcacccagagaccagcagaggattcttcaagcagtgaggaatcagatagtgaggaagagaagacaggtcttgcagtaaccgtgggacaggcaaagtctgtggggaaaggcctccaggtgaaagcagcctcagtgcctgtcaaggggtccttggggcaagggactgctccagtactccctgggaagacggggcctacagtcacccaggtgaaagctgaaaagcaggaagactctgagagcagtgaggaggaatcagacagtgaggaagcagctgcatctccagcacaggtgaaaacctcagtaaagaaaacccaggccaaagccaacccagctgccgccagagcaccttcagcaaaagggacaatttcagcccctggaaaagttgtcactgcagctgctcaagccaagcagaggtctccatccaaggtgaagccaccagtgagaaacccccagaacagtaccgtcttggcgaggggcccagcatctgtgccatctgtggggaaggccgtggctacagcagctcaggcccagacagggccagaggaggactcagggagcagtgaggaggagtcagacagtgaggaggaggcggagacgctggctcaggtgaagccttcagggaagacccaccagatcagagctgccttggctcctgccaaggagtcccccaggaaaggggctgccccaacacctcctgggaagacagggccttcggctgcccaggcagggaagcaggatgactcagggagcagcagcgaggaatcagacagtgatggggaggcaccggcagctgtgacctctgcccaggtgattaaaccccctctgatttttgtcgaccctaatcgtagtccagctggcccagctgctacacccgcacaagcccaggctgcaagcaccccgaggaaggcccgagcctcggagagcacagccaggagctcctcctccgagagcgaggatgaggacgtgatccccgctacacagtgcttgactcctggcatcagaaccaatgtggtgaccatgcccactgcccacccaagaatagcccccaaagccagcatggctggggccagcagcagcaaggagtccagtcggatatcagatggcaagaaacaggagggaccagccactcaggtgtcaaagaagaacccagcttccctcccactgacccaggctgccctgaaggtcctcgcccagaaagccagtgaggctcagcctcctgttgccaggacccagccttcaagtggggttgacagtgctgtgggaacactccctgcaacaagtccccagagcacctccgtccaggccaaagggaccaacaagctcagaaaacctaagcttcctgaggtccagcaggccaccaaagcccctgagagctcagatgacagtgaggacagcagcgacagttcttcagggagtgaggaagatggtgaagggccccagggggccaagtcagcccacacgctggtaggtcccaccccctccaggacagagaccctggtggaggagaccgcagcagagtccagcgaggatgatgtggtggcgccatcccagtctctcctctcaggttatatgacccctggactaaccccagccaattcccaggcctcaaaagccactcccaagctagactccagcccctcagtttcctctactctggccgccaaagatgacccagatggcaagcaggaggcaaagccccaacaggcagcaggcatgttgtcccctaaaacaggtggaaaagaggctgcttcaggcaccacacctcagaagtcccggaagcccaagaaaggggctgggaacccccaagcctcaaccctggcgctgcaaagcaacatcacccagtgcctcctgggccaaccctggcccctgaatgaggcccaggtgcaggcctcagtggtgaaggtcctgactgagctgctggaacaggaaagaaagaaggtggtggacaccaccaaggagagcagcaggaagggctgggagagccgcaagcggaagctatcgggagaccagccagctgccaggacccccaggagcaagaagaagaagaagctgggggccggggaaggtggggaggcctctgtttccccagaaaagacctccacgacttccaaggggaaagcaaagagagacaaagcaagtggtgatgtcaaggagaagaaagggaaggggtctcttggctcccaaggggccaaggacgagccagaagagaagacgacagaaggggatggggacggttgaaggtggagatcaaagcaacccaaagagcaagaaggagaagaagaaatccgacaagagaaaaaaagacaaagaaaaaaaagaaaagaagaagaaagcaaaaaaggcctcaaccaaagattctgagtcaccgtcccagaagaaaaagaagaaaaagaagaagacagcagagcagactgtatgacgagcaccagcaccaggcacagggatttcctagccgagcagtggccatccccatgcctctgacctccaccgacctctgcccaccatgggttggaactaaactgttaccttccctcgctccacagaagaagacagccagcttcaggggtccctgtgctggccaagccagtgagcctgcggggaggctggtccaaggagaaagtggaccagctcccatgacctcaccccactcccccaacacaggacgcttcatatagatgtgtacagtatatgtatttttttaagtgacctcctctccttccacagaccccacatgcccaaaggcctcgggacttcccaccaccttgctccacagatccagctaggcctgacctgtgcctcatcccgtgccgctcggtctctggctgatcccgaggctttgtcttcctctcgtcagttcttttggttgtgttttttgttttttttttaataactcaaaaaaaaaataaaagacttggaggaagggtgcaagctcccagtgcatctggggcacatgtttcttggaagggactgtctcgccgacactcgggattccctcttgcctgcatgttgaggctatgggtgaccgtggttagtgggacaggcagtgagcagtgaagtgcctgagtgccgaattggtggggaaggcttcctggatgaggtggcatctaaactaaaggatggtcatggttgatttcctgttgccagagtaagtcatgtaaatacccaaagacaagaaatggaaggggctgagaatcctcgagttaggcctcgagctaggggcaggctccctggaggtgcctggtgaacagctgtggcaggcacagcaggtctaggaaaatcggaagtgagttgcccctcaaatcgagctcaccatggttctgtggtggtgagggcaagaagtggatgaacatgaaagacaggatgatgtcttg

SEQ ID NO: 382315 - DNA, 5473 bp, Homo sapiens
  misc_feature (5)..(5): n is a, c, g, or t
agtgnggcgcgcgaggtctaagggcgcgagggaagtggcgggcggggactaaggcggggcgtgcaggtagccggccggccgggggtcgcgggtatggccgaggccaggaagcggcgggagctacttcccctgatctaccaccatctgctgcgggctggctatgtgcgtgcggcgcgggaagtgaaggagcagagcggccagaagtgtttcctggctcagcccgtaacccttctggacatctatacacactggcaacaaacctcagagcttggtcggaagcggaaggcagaggaagatgcggcactgcaagctaagaaaacccgtgtgtcagaccccatcagcacctcggagagctcggaagaggaggaagaagcagaagccgaaaccgccaaagccaccccaagactagcatctaccaactcctcagtcctgggggcggacttgccatcaagcatgaaagaaaaagccaaggcagagacagagaaagctggcaagactgggaattccatgccacaccctgccactgggaagacggtggccaaccttctttctgggaagtctcccaggaagtcagcagagccctcagcaaatactacgttggtctcagaaactgaggaggagggcagcgtcccggcctttggagctgctgccaagcctgggatggtgtcagcgggccaggccgacagctccagcgaggacacctccagctccagtgatgagacagacgtggaggggaaaccctcagtaaaaccagcccaggtcaaagcctcatcagtttctactaaggagtctccagcaagaaaggcggccccagcccctgggaaggtgggggatgtgacaccccaggtcaaaggaggggccctgcccccagccaagagggccaagaagccagaagaggagtcagagagtagtgaggagggatctgaaagtgaggaggaggcccctgcagggacacgaagccaggtaaaggcctctgaaaaaattctccaggtcagagctgcctcagcccctgccaaggggacccctgggaaaggggctaccccagcaccccctgggaaggcaggggctgtagcctcccagaccaaggcagggaagccagaggaggactcagagagcagcagcgaggagtcatctgacagtgaggaggagacgccagctgccaaggccctgcttcaggcgaaggcctcaggaaaaacctctcaggtcggagctgcctcagcccctgccaaggagtcccccaggaaaggagctgccccagcgccccctgggaagacagggcctgcagttgccaaggcccaggcggggaagcgggaggaggactcgcagagcagcagcgaggaatcggacagtgaggaggaggcgcctgctcaggcgaagccttcagggaaggccccccaggtcagagccgcctcggcccctgccaaggagtcccccaggaaaggggctgccccagcacctcctaggaaaacagggcctgcagccgcccaggtccaggtggggaagcaggaggaggactcaagaagcagcagcgaggagtcagacagtgacagagaggcactggcagccatgaatgcagctcaggtgaagcccttggggaaaagcccccaggtgaaacctgcctctaccatgggcatggggcccttggggaaaggcgccggcccagtgccacccgggaaggtggggcctgcaaccccctcagcccaggtggggaagtgggaggaggactcagagagcagtagtgaggagtcatcagacagcagtgatggagaggtgcccacagctgtggccccggctcaggaaaagtccttggggaacatcctccaggccaaacccacctccagtcctgccaaggggccccctcagaaggcagggcctgtagccgtccaggtcaaggctgaaaagcccatggacaactcggagagcagcgaggagtcatcggacagtgcggacagtgaggaggcaccagcagccatgactgcagctcaggcaaaaccagctctgaaaattcctcagaccaaggcctgcccaaagaaaaccaataccactgcatctgccaaggtcgcccctgtgcgagtgggcacccaagccccccggaaagcaggaactgcgacttctccagcaggctcatccccagctgtggctgggggcacccagagaccagcagaggattcttcaagcagtgaggaatcagatagtgaggaagagaagacaggtcttgcagtaaccgtgggacaggcaaagtctgtggggaaaggcctccaggtgaaagcagcctcagtgcctgtcaaggggtccttggggcaagggactgctccagtactccctgggaagacggggcctacagtcacccaggtgaaagctgaaaagcaggaagactctgagagcagtgaggaggaatcagacagtgaggaagcagctgcatctccagcacaggtgaaaacctcagtaaagaaaacccaggccaaagccaacccagctgccgccagagcaccttcagcaaaagggacaatttcagcccctggaaaagttgtcactgcagctgctcaagccaagcagaggtctccatccaaggtgaagccaccagtgagaaacccccagaacagtaccgtcttggcgaggggcccagcatctgtgccatctgtggggaaggccgtggctacagcagctcaggcccagacagggccagaggaggactcagggagcagtgaggaggagtcagacagtgaggaggaggcggagacgctggctcaggtgaagccttcagggaagacccaccagatcagagctgccttggctcctgccaaggagtcccccaggaaaggggctgccccaacacctcctgggaagacagggccttcggctgcccaggcagggaagcaggatgactcagggagcagcagcgaggaatcagacagtgatggggaggcaccggcagctgtgacctctgcccagcagctggcccagctgctacacccgcacaagcccaggctgcaagcaccccgaggaaggcccgagcctcggagagcacagccaggagctcctcctccgagagcgaggatgaggacgtgatccccgctacacagtgcttgactcctggcatcagaaccaatgtggtgaccatgcccactgcccacccaagaatagcccccaaagccagcatggctggggccagcagcagcaaggagtccagtcggatatcagatggcaagaaacaggagggaccagccactcaggtgtcaaagaagaacccagcttccctcccactgacccaggctgccctgaaggtcctcgcccagaaagccagtgaggctcagcctcctgttgccaggacccagccttcaagtggggttgacagtgctgtgggaacactccctgcaacaagtccccagagcacctccgtccaggccaaagggaccaacaagctcagaaaacctaagcttcctgaggtccagcaggccaccaaagcccctgagagctcagatgacagtgaggacagcagcgacagttcttcagggagtgaggaagatggtgaagggccccagggggccaagtcagcccacacgctggtaggtcccaccccctccaggacagagaccctggtggaggagaccgcagcagagtccagcgaggatgatgtggtggcgccatcccagtctctcctctcaggttatatgacccctggactaaccccagccaattcccaggcctcaaaagccactcccaagctagactccagcccctcagtttcctctactctggccgccaaagatgacccagatggcaagcaggaggcaaagccccaacaggcagcaggcatgttgtcccctaaaacaggtggaaaagaggctgcttcaggcaccacacctcagaagtcccggaagcccaagaaaggggctgggaacccccaagcctcaaccctggcgctgcaaagcaacatcacccagtgcctcctgggccaaccctggcccctgaatgaggcccaggtgcaggcctcagtggtgaaggtcctgactgagctgctggaacaggaaagaaagaaggtggtggacaccaccaaggagagcagcaggaagggctgggagagccgcaagcggaagctatcgggagaccagccagctgccaggacccccaggagcaagaagaagaagaagctgggggccggggaaggtggggaggcctctgtttccccagaaaagacctccacgacttccaaggggaaagcaaagagagacaaagcaagtggtgatgtcaaggagaagaaagggaaggggtctcttggctcccaaggggccaaggacgagccagaagagaagacgacagaaggggatggggacggttgaaggtggagatcaaagcaacccaaagagcaagaaggagaagaagaaatccgacaagagaaaaaaagacaaagaaaaaaaagaaaagaagaagaaagcaaaaaaggcctcaaccaaagattctgagtcaccgtcccagaagaaaaagaagaaaaagaagaagacagcagagcagactgtatgacgagcaccagcaccaggcacagggatttcctagccgagcagtggccatccccatgcctctgacctccaccgacctctgcccaccatgggttggaactaaactgttaccttccctcgctccacagaagaagacagccagcttcaggggtccctgtgctggccaagccagtgagcctgcggggaggctggtccaaggagaaagtggaccagctcccatgacctcaccccactcccccaacacaggacgcttcatatagatgtgtacagtatatgtatttttttaagtgacctcctctccttccacagaccccacatgcccaaaggcctcgggacttcccaccaccttgctccacagatccagctaggcctgacctgtgcctcatcccgtgccgctcggtctctggctgatcccgaggctttgtcttcctctcgtcagttcttttggttgtgttttttgttttttttttaataactcaaaaaaaaaataaaagacttggaggaagggtgcaagctcccagtgcatctggggcacatgtttcttggaagggactgtctcgccgacactcgggattccctcttgcctgcatgttgaggctatgggtgaccgtggttagtgggacaggcagtgagcagtgaagtgcctgagtgccgaattggtggggaaggcttcctggatgaggtggcatctaaactaaaggatggtcatggttgatttcctgttgccagagtaagtcatgtaaatacccaaagacaagaaatggaaggggctgagaatcctcgagttaggcctcgagctaggggcaggctccctggaggtgcctggtgaacagctgtggcaggcacagcaggtctaggaaaatcggaagtgagttgcccctcaaatcgagctcaccatggttctgtggtggtgagggcaagaagtggatgaacatgaaagacaggatgatgtcttg

SEQ ID NO: 382316 - DNA, 3432 bp, Homo sapiens
acagatgtaaactaagacgtcgatactcgggtgtaatttcatacgaggccagctttgctgtaggtaccagagaccagcagaggattcttcaagcagtgaggaatcagatagtgaggaagagaagacaggtcttgcagtaaccgtgggacaggcaaagtctgtggggaaaggcctccaggtgaaagcagcctcagtgcctgtcaaggggtccttggggcaagggactgctccagtactccctgggaagacggggcctacagtcacccaggtgaaagctgaaaagcaggaagactctgagagcagtgaggaggaatcagacagtgaggaagcagctgcatctccagcacaggtgaaaacctcagtaaagaaaacccaggccaaagccaacccagctgccgccagagcaccttcagcaaaagggacaatttcagcccctggaaaagttgtcactgcagctgctcaagccaagcagaggtctccatccaaggtgaagccaccagtgagaaacccccagaacagtaccgtcttggcgaggggcccagcatctgtgccatctgtggggaaggccgtggctacagcagctcaggcccagacagggccagaggaggactcagggagcagtgaggaggagtcagacagtgaggaggaggcggagacgctggctcaggtgaagccttcagggaagacccaccagatcagagctgccttggctcctgccaaggagtcccccaggaaaggggctgccccaacacctcctgggaagacagggccttcggctgcccaggcagggaagcaggatgactcagggagcagcagcgaggaatcagacagtgatggggaggcaccggcagctgtgacctctgcccaggtgattaaaccccctctgatttttgtcgaccctaatcgtagtccagctggcccagctgctacacccgcacaagcccaggctgcaagcaccccgaggaaggcccgagcctcggagagcacagccaggagctcctcctccgagagcgaggatgaggacgtgatccccgctacacagtgcttgactcctggcatcagaaccaatgtggtgaccatgcccactgcccacccaagaatagcccccaaagccagcatggctggggccagcagcagcaaggagtccagtcggatatcagatggcaagaaacaggagggaccagccactcaggtgtcaaagaagaacccagcttccctcccactgacccaggctgccctgaaggtcctcgcccagaaagccagtgaggctcagcctcctgttgccaggacccagccttcaagtggggttgacagtgctgtgggaacactccctgcaacaagtccccagagcacctccgtccaggccaaagggaccaacaagctcagaaaacctaagcttcctgaggtccagcaggccaccaaagcccctgagagctcagatgacagtgaggacagcagcgacagttcttcagggagtgaggaagatggtgaagggccccagggggccaagtcagcccacacgctggtaggtcccaccccctccaggacagagaccctggtggaggagaccgcagcagagtccagcgaggatgatgtggtggcgccatcccagtctctcctctcaggttatatgacccctggactaaccccagccaattcccaggcctcaaaagccactcccaagctagactccagcccctcagtttcctctactctggccgccaaagatgacccagatggcaagcaggaggcaaagccccaacaggcagcaggcatgttgtcccctaaaacaggtggaaaagaggctgcttcaggcaccacacctcagaagtcccggaagcccaagaaaggggctgggaacccccaagcctcaaccctggcgctgcaaagcaacatcacccagtgcctcctgggccaaccctggcccctgaatgaggcccaggtgcaggcctcagtggtgaaggtcctgactgagctgctggaacaggaaagaaagaaggtggtggacaccaccaaggagagcagcaggaagggctgggagagccgcaagcggaagctatcgggagaccagccagctgccaggacccccaggagcaagaagaagaagaagctgggggccggggaaggtggggaggcctctgtttccccagaaaagacctccacgacttccaaggggaaagcaaagagagacaaagcaagtggtgatgtcaaggagaagaaagggaaggggtctcttggctcccaaggggccaaggacgagccagaagagaagacgacagaaggggatggggacggttgaaggtggagatcaaagcaacccaaagagcaagaaggagaagaagaaatccgacaagagaaaaaaagacaaagaaaaaaaagaaaagaagaagaaagcaaaaaaggcctcaaccaaagattctgagtcaccgtcccagaagaaaaagaagaaaaagaagaagacagcagagcagactgtatgacgagcaccagcaccaggcacagggatttcctagccgagcagtggccatccccatgcctctgacctccaccgacctctgcccaccatgggttggaactaaactgttaccttccctcgctccacagaagaagacagccagcttcaggggtccctgtgctggccaagccagtgagcctgcggggaggctggtccaaggagaaagtggaccagctcccatgacctcaccccactcccccaacacaggacgcttcatatagatgtgtacagtatatgtatttttttaagtgacctcctctccttccacagaccccacatgcccaaaggcctcgggacttcccaccaccttgctccacagatccagctaggcctgacctgtgcctcatcccgtgccgctcggtctctggctgatcccgaggctttgtcttcctctcgtcagttcttttggttgtgttttttgttttttttttaataactcaaaaaaaaaataaaagacttggaggaagggtgcaagctcccagtgcatctggggcacatgtttcttggaagggactgtctcgccgacactcgggattccctcttgcctgcatgttgaggctatgggtgaccgtggttagtgggacaggcagtgagcagtgaagtgcctgagtgccgaattggtggggaaggcttcctggatgaggtggcatctaaactaaaggatggtcatggttgatttcctgttgccagagtaagtcatgtaaatacccaaagacaagaaatggaaggggctgagaatcctcgagttaggcctcgagctaggggcaggctccctggaggtgcctggtgaacagctgtggcaggcacagcaggtctaggaaaatcggaagtgagttgcccctcaaatcgagctcaccatggttctgtggtggtgagggcaagaagtggatgaacatgaaagacaggatgatgtcttg

SEQ ID NO: 382317 - DNA, 1869 bp, Homo sapiens
agagacagggaaaagctgtaagttagaaatgaagtcagggtgtgaaattggtggaaaggtgtgagcttaggagaccagctggggcagagtgaccgccaagccttgctctccccatctgtgccattgtaagaaaagatggagtcactccctgcaccctcttcgctcttaggtaccataagatctgtcccccaactctcccagatctgtgaccccacattctctctccataggtggaaaagaggctgcttcaggcaccacacctcagaagtcccggaagcccaagaaaggggctgggaacccccaagcctcaaccctggcgctgcaaagcaacatcacccagtgcctcctgggccaaccctggcccctgaatgaggcccaggtgcaggcctcagtggtgaaggtcctgactgagctgctggaacaggaaagaaagaaggtggtggacaccaccaaggagagcagcaggaagggctgggagagccgcaagcggaagctatcgggagaccagccagctgccaggacccccaggagcaagaagaagaagaagctgggggccggggaaggtggggaggcctctgtttccccagaaaagacctccacgacttccaaggggaaagcaaagagagacaaagcaagtggtgatgtcaaggagaagaaagggaaggggtctcttggctcccaaggggccaaggacgagccagaagagaagacgacagaaggggatggggacggttgaaggtggagatcaaagcaacccaaagagcaagaaggagaagaagaaatccgacaagagaaaaaaagacaaagaaaaaaaagaaaagaagaagaaagcaaaaaaggcctcaaccaaagattctgagtcaccgtcccagaagaaaaagaagaaaaagaagaagacagcagagcagactgtatgacgagcaccagcaccaggcacagggatttcctagccgagcagtggccatccccatgcctctgacctccaccgacctctgcccaccatgggttggaactaaactgttaccttccctcgctccacagaagaagacagccagcttcaggggtccctgtgctggccaagccagtgagcctgcggggaggctggtccaaggagaaagtggaccagctcccatgacctcaccccactcccccaacacaggacgcttcatatagatgtgtacagtatatgtatttttttaagtgacctcctctccttccacagaccccacatgcccaaaggcctcgggacttcccaccaccttgctccacagatccagctaggcctgacctgtgcctcatcccgtgccgctcggtctctggctgatcccgaggctttgtcttcctctcgtcagttcttttggttgtgttttttgttttttttttaataactcaaaaaaaaaataaaagacttggaggaagggtgcaagctcccagtgcatctggggcacatgtttcttggaagggactgtctcgccgacactcgggattccctcttgcctgcatgttgaggctatgggtgaccgtggttagtgggacaggcagtgagcagtgaagtgcctgagtgccgaattggtggggaaggcttcctggatgaggtggcatctaaactaaaggatggtcatggttgatttcctgttgccagagtaagtcatgtaaatacccaaagacaagaaatggaaggggctgagaatcctcgagttaggcctcgagctaggggcaggctccctggaggtgcctggtgaacagctgtggcaggcacagcaggtctaggaaaatcggaagtgagttgcccctcaaatcgagctcaccatggttctgtggtggtgagggcaagaagtggatgaacatgaaagacaggatgatgtcttg

SEQ ID NO: 382318 - DNA, 4222 bp, Homo sapiens
  misc_feature (5)..(5): n is a, c, g, or t
agtgnggcgcgcgaggtctaagggcgcgagggaagtggcgggcggggactaaggcggggcgtgcaggtagccggccggccgggggtcgcgggtatggccgaggccaggaagcggcgggagctacttcccctgatctaccaccatctgctgcgggctggctatgtgcgtgcggcgcgggaagtgaaggagcagagcggccagaagtgtttcctggctcagcccgtaacccttctggacatctatacacactggcaacaaacctcagagcttggtcggaagcggaaggcagaggaagatgcggcactgcaagctaagaaaacccgtgtgtcagaccccatcagcacctcggagagctcggaagaggaggaagaagcagaagccgaaaccgccaaagccaccccaagactagcatctaccaactcctcagtcctgggggcggacttgccatcaagcatgaaagaaaaagccaaggcagagacagagaaagctggcaagactgggaattccatgccacaccctgccactgggaagacggtggccaaccttctttctgggaagtctcccaggaagtcagcagagccctcagcaaatactacgttggtctcagaaactgaggaggagggcagcgtcccggcctttggagctgctgccaagcctgggatggtgtcagcgggccaggccgacagctccagcgaggacacctccagctccagtgatgagacagacgtggaggggaaaccctcagtaaaaccagcccaggtcaaagcctcatcagtttctactaaggagtctccagcaagaaaggcggccccagcccctgggaaggtgggggatgtgacaccccaggtcaaaggaggggccctgcccccagccaagagggccaagaagccagaagaggagtcagagagtagtgaggagggatctgaaagtgaggaggaggcccctgcagggacacgaagccaggtaaaggcctctgaaaaaattctccaggtcagagctgcctcagcccctgccaaggggacccctgggaaaggggctaccccagcaccccctgggaaggcaggggctgtagcctcccagaccaaggcagggaagccagaggaggactcagagagcagcagcgaggagtcatctgacagtgaggaggagacgccagctgccaaggccctgcttcaggcgaaggcctcaggaaaaacctctcaggtcggagctgcctcagcccctgccaaggagtcccccaggaaaggagctgccccagcgccccctgggaagacagggcctgcagttgccaaggcccaggcggggaagcgggaggaggactcgcagagcagcagcgaggaatcggacagtgaggaggaggcgcctgctcaggcgaagccttcagggaaggccccccaggtcagagccgcctcggcccctgccaaggagtcccccaggaaaggggctgccccagcacctcctaggaaaacagggcctgcagccgcccaggtccaggtggggaagcaggaggaggactcaagaagcagcagcgaggagtcagacagtgacagagaggcactggcagccatgaatgcagctcaggtgaagcccttggggaaaagcccccaggtgaaacctgcctctaccatgggcatggggcccttggggaaaggcgccggcccagtgccacccgggaaggtggggcctgcaaccccctcagcccaggtggggaagtgggaggaggactcagagagcagtagtgaggagtcatcagacagcagtgatggagaggtgcccacagctgtggccccggctcaggaaaagtccttggggaacatcctccaggccaaacccacctccagtcctgccaaggggccccctcagaaggcagggcctgtagccgtccaggtcaaggctgaaaagcccatggacaactcggagagcagcgaggagtcatcggacagtgcggacagtgaggaggcaccagcagccatgactgcagctcaggcaaaaccagctctgaaaattcctcagaccaaggcctgcccaaagaaaaccaataccactgcatctgccaaggtcgcccctgtgcgagtgggcacccaagccccccggaaagcaggaactgcgacttctccagcaggctcatccccagctgtggctgggggcacccagagaccagcagaggattcttcaagcagtgaggaatcagatagtgaggaagagaagacaggtcttgcagtaaccgtgggacaggcaaagtctgtggggaaaggcctccaggtgaaagcagcctcagtgcctgtcaaggggtccttggggcaagggactgctccagtactccctgggaagacggggcctacagtcacccaggtgaaagctgaaaagcaggaagactctgagagcagtgaggaggaatcagacagtgaggaagcagctgcatctccagcacaggtgaaaacctcagtaaagaaaacccaggccaaagccaacccagctgccgccagagcaccttcagcaaaagggacaatttcagcccctggaaaagttgtcactgcagctgctcaagccaagcagaggtctccatccaaggtgaagccaccagtgagaaacccccagaacagtaccgtcttggcgaggggcccagcatctgtgccatctgtggggaaggccgtggctacagcagctcaggcccagacagggccagaggaggactcagggagcagtgaggaggagtcagacagtgaggaggaggcggagacgctggctcaggtgaagccttcagggaagacccaccagatcagagctgccttggctcctgccaaggagtcccccaggaaaggggctgccccaacacctcctgggaagacagggccttcggctgcccaggcagggaagcaggatgactcagggagcagcagcgaggaatcagacagtgatggggaggcaccggcagctgtgacctctgcccaggtgattaaaccccctctgatttttgtcgaccctaatcgtagtccagctggcccagctgctacacccgcacaagcccaggctgcaagcaccccgaggaaggcccgagcctcggagagcacagccaggagctcctcctccgagagcgaggatgaggacgtgatccccgctacacagtgcttgactcctggcatcagaaccaatgtggtgaccatgcccactgcccacccaagaatagcccccaaagccagcatggctggggccagcagcagcaaggagtccagtcggatatcagatggcaagaaacaggagggaccagccactcaggtgtcaaagaagaacccagcttccctcccactgacccaggctgccctgaaggtcctcgcccagaaagccagtgaggctcagcctcctgttgccaggacccagccttcaagtggggttgacagtgctgtgggaacactccctgcaacaagtccccagagcacctccgtccaggccaaagggaccaacaagctcagaaaacctaagcttcctgaggtccagcaggccaccaaagcccctgagagctcagatgacagtgaggacagcagcgacagttcttcagggagtgaggaagatggtgaagggccccagggggccaagtcagcccacacgctggtaggtcccaccccctccaggacagagaccctggtggaggagaccgcagcagagtccagcgaggatgatgtggtggcgccatcccagtctctcctctcaggttatatgacccctggactaaccccagccaattcccaggcctcaaaagccactcccaagctagactccagcccctcagtttcctctactctggccgccaaagatgacccagatggcaagcaggaggcaaagccccaacaggcagcaggcatgttgtcccctaaaacaggtggaaaagaggctgcttcaggcaccacacctcagaagtcccggaagcccaagaaaggggctgggaacccccaagcctcaaccctggcgctgcaaagcaacatcacccagtgcctcctgggccaaccctggcccctgaatgaggcccaggtgcaggcctcagtggtgaaggtcctgactgagctgctggaacaggaaagaaagaaggtggtggacaccaccaaggagagcagcaggaagggctgggagagccgcaagcggaagctatcgggagaccagccagctgccaggacccccaggagcaagaagaagaagaagaaatccgacaagagaaaaaaagacaaag

SEQ ID NO: 382319 - DNA, 1528 bp, Homo sapiens
agaccccacatgcccaaaggcctcgggacttcccaccaccttgcgcctcagtggtgaaggtcctgactgagctgctggaacaggaaagaaagaaggtggtggacaccaccaaggagagcagcaggaagggctgggagagccgcaagcggaagctatcgggagaccagccagctgccaggacccccaggagcaagaagaagaagaagctgggggccggggaaggtggggaggcctctgtttccccagaaaagacctccacgacttccaaggggaaagcaaagagagacaaagcaagtggtgatgtcaaggagaagaaagggaaggggtctcttggctcccaaggggccaaggacgagccagaagagaagacgacagaaggggatggggacggttgaaggtggagatcaaagcaacccaaagagcaagaaggagaagaagaaatccgacaagagaaaaaaagacaaagaaaaaaaagaaaagaagaagaaagcaaaaaaggcctcaaccaaagattctgagtcaccgtcccagaagaaaaagaagaaaaagaagaagacagcagagcagactgtatgacgagcaccagcaccaggcacagggatttcctagccgagcagtggccatccccatgcctctgacctccaccgacctctgcccaccatgggttggaactaaactgttaccttccctcgctccacagaagaagacagccagcttcaggggtccctgtgctggccaagccagtgagcctgcggggaggctggtccaaggagaaagtggaccagctcccatgacctcaccccactcccccaacacaggacgcttcatatagatgtgtacagtatatgtatttttttaagtgacctcctctccttccacagaccccacatgcccaaaggcctcgggacttcccaccaccttgctccacagatccagctaggcctgacctgtgcctcatcccgtgccgctcggtctctggctgatcccgaggctttgtcttcctctcgtcagttcttttggttgtgttttttgttttttttttaataactcaaaaaaaaaataaaagacttggaggaagggtgcaagctcccagtgcatctggggcacatgtttcttggaagggactgtctcgccgacactcgggattccctcttgcctgcatgttgaggctatgggtgaccgtggttagtgggacaggcagtgagcagtgaagtgcctgagtgccgaattggtggggaaggcttcctggatgaggtggcatctaaactaaaggatggtcatggttgatttcctgttgccagagtaagtcatgtaaatacccaaagacaagaaatggaaggggctgagaatcctcgagttaggcctcgagctaggggcaggctccctggaggtgcctggtgaacagctgtggcaggcacagcaggtctaggaaaatcggaagtgagttgcccctcaaatcgagctcaccatggttctgtggtggtgagggcaagaagtggatgaacatgaaagacaggatgatgtcttg

SEQ ID NO: 382320 - DNA, 1681 bp, Homo sapiens
agagacagggaaaagctgtaagttagaaatgaagtcagggtgtgaaattggtggaaaggtgtgagcttaggagaccagctggggcagagtgaccgccaagccttgctctccccatctgtgccattgtaagaaaagatggagtcactccctgcaccctcttcgctcttaggtaccataagatctgtcccccaactctcccagatctgtgaccccacattctctctccataggtggaaaagaggctgcttcaggcaccacacctcagaagtcccggaagcccaagaaaggggctgggaacccccaagcctcaaccctggcgctgcaaagcaacatcccccaggagcaagaagaagaagaagctgggggccggggaaggtggggaggcctctgtttccccagaaaagacctccacgacttccaaggggaaagcaaagagagacaaagcaagtggtgatgtcaaggagaagaaagggaaggggtctcttggctcccaaggggccaaggacgagccagaagagaagacgacagaaggggatggggacggttgaaggtggagatcaaagcaacccaaagagcaagaaggagaagaagaaatccgacaagagaaaaaaagacaaagaaaaaaaagaaaagaagaagaaagcaaaaaaggcctcaaccaaagattctgagtcaccgtcccagaagaaaaagaagaaaaagaagaagacagcagagcagactgtatgacgagcaccagcaccaggcacagggatttcctagccgagcagtggccatccccatgcctctgacctccaccgacctctgcccaccatgggttggaactaaactgttaccttccctcgctccacagaagaagacagccagcttcaggggtccctgtgctggccaagccagtgagcctgcggggaggctggtccaaggagaaagtggaccagctcccatgacctcaccccactcccccaacacaggacgcttcatatagatgtgtacagtatatgtatttttttaagtgacctcctctccttccacagaccccacatgcccaaaggcctcgggacttcccaccaccttgctccacagatccagctaggcctgacctgtgcctcatcccgtgccgctcggtctctggctgatcccgaggctttgtcttcctctcgtcagttcttttggttgtgttttttgttttttttttaataactcaaaaaaaaaataaaagacttggaggaagggtgcaagctcccagtgcatctggggcacatgtttcttggaagggactgtctcgccgacactcgggattccctcttgcctgcatgttgaggctatgggtgaccgtggttagtgggacaggcagtgagcagtgaagtgcctgagtgccgaattggtggggaaggcttcctggatgaggtggcatctaaactaaaggatggtcatggttgatttcctgttgccagagtaagtcatgtaaatacccaaagacaagaaatggaaggggctgagaatcctcgagttaggcctcgagctaggggcaggctccctggaggtgcctggtgaacagctgtggcaggcacagcaggtctaggaaaatcggaagtgagttgcccctcaaatcgagctcaccatggttctgtggtggtgagggcaagaagtggatgaacatgaaagacaggatgatgtcttg

SEQ ID NO: 382321 - DNA, 1346 bp, Homo sapiens
  misc_feature (91)..(91): n is a, c, g, or t
  misc_feature (105)..(105): n is a, c, g, or t
  misc_feature (122)..(122): n is a, c, g, or t
  misc_feature (134)..(134): n is a, c, g, or t
  misc_feature (141)..(141): n is a, c, g, or t
gggggggaaaaattttttccgcccccccccccccttttcccccccttttttaaaaagggggaaaaaaaaagggcccccccggggggggggnaccccccccggggnccccctcctttaaaaancccttttaaaantccttcntcttaaatagcggcgtgcgaagaaaaggacgagccagaagagaagacgacagaaggggatggggacggttgaaggtggagatcaaagcaacccaaagagcaagaaggagaagaagaaatccgacaagagaaaaaaagacaaagaaaaaaaagaaaagaagaagaaagcaaaaaaggcctcaaccaaagattctgagtcaccgtcccagaagaaaaagaagaaaaagaagaagacagcagagcagactgtatgacgagcaccagcaccaggcacagggatttcctagccgagcagtggccatccccatgcctctgacctccaccgacctctgcccaccatgggttggaactaaactgttaccttccctcgctccacagaagaagacagccagcttcaggggtccctgtgctggccaagccagtgagcctgcggggaggctggtccaaggagaaagtggaccagctcccatgacctcaccccactcccccaacacaggacgcttcatatagatgtgtacagtatatgtatttttttaagtgacctcctctccttccacagaccccacatgcccaaaggcctcgggacttcccaccaccttgctccacagatccagctaggcctgacctgtgcctcatcccgtgccgctcggtctctggctgatcccgaggctttgtcttcctctcgtcagttcttttggttgtgttttttgttttttttttaataactcaaaaaaaaaataaaagacttggaggaagggtgcaagctcccagtgcatctggggcacatgtttcttggaagggactgtctcgccgacactcgggattccctcttgcctgcatgttgaggctatgggtgaccgtggttagtgggacaggcagtgagcagtgaagtgcctgagtgccgaattggtggggaaggcttcctggatgaggtggcatctaaactaaaggatggtcatggttgatttcctgttgccagagtaagtcatgtaaatacccaaagacaagaaatggaaggggctgagaatcctcgagttaggcctcgagctaggggcaggctccctggaggtgcctggtgaacagctgtggcaggcacagcaggtctaggaaaatcggaagtgagttgcccctcaaatcgagctcaccatggttctgtggtggtgagggcaagaagtggatgaacatgaaagacaggatgatgtcttg

SEQ ID NO: 382322 - DNA, 2685 bp, Homo sapiens
  misc_feature (5)..(5): n is a, c, g, or t
agtgnggcgcgcgaggtctaagggcgcgagggaagtggcgggcggggactaaggcggggcgtgcaggtagccggccggccgggggtcgcgggtatggccgaggccaggaagcggcgggagctacttcccctgatctaccaccatctgctgcgggctggctatgtgcgtgcggcgcgggaagtgaaggagcagagcggccagaagtgtttcctggctcagcccgtaacccttctggacatctatacacactggcaacaaacctcagagcttggtcggaagcggaaggcagaggaagatgcggcactgcaagctaagaaaacccgtgtgtcagaccccatcagcacctcggagagctcggaagaggaggaagaagcagaagccgaaaccgccaaagccaccccaagactagcatctaccaactcctcagtcctgggggcggacttgccatcaagcatgaaagaaaaagccaaggcagagacagagaaagctggcaagactgggaattccatgccacaccctgccactgggaagacggtggccaaccttctttctgggaagtctcccaggaagtcagcagagccctcagcaaatactacgttggtctcagaaactgaggaggagggcagcgtcccggcctttggagctgctgccaagcctgggatggtgtcagcgggccaggccgacagctccagcgaggacacctccagctccagtgatgagacagacgtggaggggaaaccctcagtaaaaccagcccaggtcaaagcctcatcagtttctactaaggagtctccagcaagaaaggcggccccagcccctgggaaggtgggggatgtgacaccccaggtcaaaggaggggccctgcccccagccaagagggccaagaagccagaagaggagtcagagagtagtgaggagggatctgaaagtgaggaggaggcccctgcagggacacgaagccaggtaaaggcctctgaaaaaattctccaggtcagagctgcctcagcccctgccaaggggacccctgggaaaggggctaccccagcaccccctgggaaggcaggggctgtagcctcccagaccaaggcagggaagccagaggaggactcagagagcagcagcgaggagtcatctgacagtgaggaggagacgccagctgccaaggccctgcttcaggcgaaggcctcaggaaaaacctctcaggtcggagctgcctcagcccctgccaaggagtcccccaggaaaggagctgccccagcgccccctgggaagacagggcctgcagttgccaaggcccaggcggggaagcgggaggaggactcgcagagcagcagcgaggaatcggacagtgaggaggaggcgcctgctcaggcgaagccttcagggaaggccccccaggtcagagccgcctcggcccctgccaaggagtcccccaggaaaggggctgccccagcacctcctaggaaaacagggcctgcagccgcccaggtccaggtggggaagcaggaggaggactcaagaagcagcagcgaggagtcagacagtgacagagaggcactggcagccatgaatgcagctcaggtgaagcccttggggaaaagcccccaggtgaaacctgcctctaccatgggcatggggcccttggggaaaggcgccggcccagtgccacccgggaaggtggggcctgcaaccccctcagcccaggtggggaagtgggaggaggactcagagagcagtagtgaggagtcatcagacagcagtgatggagaggtgcccacagctgtggccccggctcaggaaaagtccttggggaacatcctccaggccaaacccacctccagtcctgccaaggggccccctcagaaggcagggcctgtagccgtccaggtcaaggctgaaaagcccatggacaactcggagagcagcgaggagtcatcggacagtgcggacagtgaggaggcaccagcagccatgactgcagctcaggcaaaaccagctctgaaaattcctcagaccaaggcctgcccaaagaaaaccaataccactgcatctgccaaggtcgcccctgtgcgagtgggcacccaagccccccggaaagcaggaactgcgacttctccagcaggctcatccccagctgtggctgggggcacccagagaccagcagaggattcttcaagcagtgaggaatcagatagtgaggaagagaagacaggtcttgcagtaaccgtgggacaggcaaagtctgtggggaaaggcctccaggtgaaagcagcctcagtgcctgtcaaggggtccttggggcaagggactgctccagtactccctgggaagacggggcctacagtcacccaggtgaaagctgaaaagcaggaagactctgagagcagtgaggaggaatcagacagtgaggaagcagctgcatctccagcacaggtgaaaactcagtaagaaccaggcaaggcaaccagtgcgcagaagacgtcagaaaaggacattcaccctgaaagtgtatgggtgtcagccagcaacgtcaccacggactcggaacccccaatagagctggccgccgagcccggaaggggccacaccgggaaagctcgcccagcaagaaaggacagaaacggcgccagtcaggaaacagaaaacgccaggtgaaagagatgaacacacacaaccagcgagtag

SEQ ID NO: 382323 - DNA, 642 bp, Homo sapiens
aagggcagggagtgttgccccatttgacagattgggaatcaagccttagagttgaagcagtttccccaaattctcatgattcataagaggctgaggaaaggtccaaacgctggtcccctggctccctgtatctctctgttttctgtttaggaccaggagtcttcttgaatcccatgagctctgcccaggaccctctctcaagcacctgtggcataccttcatgtgctccactgcacccagagcttaagccacagtcctgctcaggctacacctccaagggtgggaccaggcccaccttatcttcctgtactccagaggcccaagtcagccatgctggtgtggtccaagcttctgtgtgaaccctggcccttccatcagacagcattaccctttgtcctcctctagccccaagctcccagaagcttctgccaggcacctcagagcaccagctcccctgtcccagggcctaaccacagatcctggagttctgcaacctccagaccagagcggtctcatgaaccacctccccttgaatatcacataccacattgttatcaattcatcagtaaggtcagatgctgtttgcacacctccagcaatagggtgctcactgcctctcactttccaatggcacagattaca

SEQ ID NO: 382324 - DNA, 337 bp, Homo sapiens
tttattatgttccagacatcatgttaaactctgaatctcctatttagtcttcatcataacccgtaggtgggccttattattatctccatttgatagaggactgaactgaggcccagtgagatcaagtgatgagctcaggttcacacgcctattgcatggaggagccagaatccagactcgggctccagctccagagtctgtattcttggctagctgctttactcaatctcaccttctccctccttaattcccttttctccactcaggtgaaaacctcagtaaagaaaacccaggccaaagccaacccagctgccgccagagcaccttcagcaaaagg

SEQ ID NO: 382325 - DNA, 164 bp, Homo sapiens
gaaaaaaagacaaagaaaaaaaagaaaagaagaagaaagcaaaaaaggcctcaaccaaagattctgagtcaccgtcccagaagaaaaagaagaaaaaggtagagagttcctggggtgtctcaggccagaaaacagacccaaacccaagccccctcctacacacc

SEQ ID NO: 382326 - DNA, 390 bp, Homo sapiens
cagaaggggatggggacggttgaaggtggagatcaaagcaacccaaagagcaagaaggagaagaagaaatccgacaagagtgagtgaccgcttctcccagcccaccccaagggctgctgggcaccccacgggggcgggagggaccctcagccagcacctggtctcattcctcccatgtagaaaagagaggctgagaccagcctggccaacatggcaaaaccccgtctctactaaaaatacaaaaaattagctggatgtggtggcgggcacctgtaatctcagctacatgggaggctgaggcaggagaattgtttgaacccgggaggcagagcttgcagtgagccgagatcacgcattgcactccagcctgggtgacagagcaagactgtc

SEQ ID NO: 382327 - DNA, 165 bp, Homo sapiens
ttcattttccttgcaggggaaaagggtcaggaaatttgacatctgcatgtgtttccttcccctagggatttcctagccgagcagtggccatccccatgcctctgacctccaccgacctctgcccaccatgggttggaactaaactgttaccttccctcgctccac

SEQ ID NO: 382328 - DNA, 1652 bp, Homo sapiens
  misc_feature (5)..(5): n is a, c, g, or t
agtgnggcgcgcgaggtctaagggcgcgagggaagtggcgggcggggactaaggcggggcgtgcaggtagccggccggccgggggtcgcgggtatggccgaggccaggaagcggcgggagctacttcccctgatctaccaccatctgctgcgggctggctatgtgcgtgcggcgcgggaagtgaaggagcagagcggccagaagtgtttcctggctcagcccgtaacccttctggacatctatacacactggcaacaaacctcagagcttggtcggaagcggaaggcagaggaagatgcggcactgcaagctaagaaaacccgtgtgtcagaccccatcagcacctcggagagctcggaagaggaggaagaagcagaagccgaaaccgccaaagccaccccaagactagcatctaccaactcctcagtcctgggggcggacttgccatcaagcatgaaagaaaaagccaagaaggacgagccagaagagaagacgacagaaggggatggggacggttgaaggtggagatcaaagcaacccaaagagcaagaaggagaagaagaaatccgacaagagaaaaaaagacaaagaaaaaaaagaaaagaagaagaaagcaaaaaaggcctcaaccaaagattctgagtcaccgtcccagaagaaaaagaagaaaaagaagaagacagcagagcagactgtatgacgagcaccagcaccaggcacagggatttcctagccgagcagtggccatccccatgcctctgacctccaccgacctctgcccaccatgggttggaactaaactgttaccttccctcgctccacagaagaagacagccagcttcaggggtccctgtgctggccaagccagtgagcctgcggggaggctggtccaaggagaaagtggaccagctcccatgacctcaccccactcccccaacacaggacgcttcatatagatgtgtacagtatatgtatttttttaagtgacctcctctccttccacagaccccacatgcccaaaggcctcgggacttcccaccaccttgctccacagatccagctaggcctgacctgtgcctcatcccgtgccgctcggtctctggctgatcccgaggctttgtcttcctctcgtcagttcttttggttgtgttttttgttttttttttaataactcaaaaaaaaaataaaagacttggaggaagggtgcaagctcccagtgcatctggggcacatgtttcttggaagggactgtctcgccgacactcgggattccctcttgcctgcatgttgaggctatgggtgaccgtggttagtgggacaggcagtgagcagtgaagtgcctgagtgccgaattggtggggaaggcttcctggatgaggtggcatctaaactaaaggatggtcatggttgatttcctgttgccagagtaagtcatgtaaatacccaaagacaagaaatggaaggggctgagaatcctcgagttaggcctcgagctaggggcaggctccctggaggtgcctggtgaacagctgtggcaggcacagcaggtctaggaaaatcggaagtgagttgcccctcaaatcgagctcaccatggttctgtggtggtgagggcaagaagtggatgaacatgaaagacaggatgatgtcttg

SEQ ID NO: 382329 - DNA, 462 bp, Homo sapiens
ccccacccccgcctgccccccgctctctcacgcacctcacctcaccatcacagctctcctacctatacacatcaagaccctagcctgcggggaggctggtccaaggagaaagtggaccagctcccatgacctcaccccactcccccaacacaggacgcttcatatagatgtgtacagtatatgtatttttttaagtgacctcctctccttccacagaccccacatgcccaaaggcctcgggacttcccaccaccttgctccacagatccagctaggcctgacctgtgcctcatcccgtgccgctcggtctctggctgatcccgaggctttgtcttcctctcgtcagttcttttggttgtgttttttgttttttttttaataactcaaaaaaaaaataaaagacttggaggaagggtaaaaaaaattcactggccgacgttttaccgtcgtgctgggccctgc

SEQ ID NO: 382330 - DNA, 4621 bp, Homo sapiens
  misc_feature (5)..(5): n is a, c, g, or t
agtgnggcgcgcgaggtctaagggcgcgagggaagtggcgggcggggactaaggcggggcgtgcaggtagccggccggccgggggtcgcgggtatggccgaggccaggaagcggcgggagctacttcccctgatctaccaccatctgctgcgggctggctatgtgcgtgcggcgcgggaagtgaaggagcagagcggccagaagtgtttcctggctcagcccgtaacccttctggacatctatacacactggcaacaaacctcagagcttggtcggaagcggaaggcagaggaagatgcggcactgcaagctaagaaaacccgtgtgtcagaccccatcagcacctcggagagctcggaagaggaggaagaagcagaagccgaaaccgccaaagccaccccaagactagcatctaccaactcctcagtcctgggggcggacttgccatcaagcatgaaagaaaaagccaaggcagagacagagaaagctggcaagactgggaattccatgccacaccctgccactgggaagacggtggccaaccttctttctgggaagtctcccaggaagtcagcagagccctcagcaaatactacgttggtctcagaaactgaggaggagggcagcgtcccggcctttggagctgctgccaagcctgggatggtgtcagcgggccaggccgacagctccagcgaggacacctccagctccagtgatgagacagacgtggaggggaaaccctcagtaaaaccagcccaggtcaaagcctcatcagtttctactaaggagtctccagcaagaaaggcggccccagcccctgggaaggtgggggatgtgacaccccaggtcaaaggaggggccctgcccccagccaagagggccaagaagccagaagaggagtcagagagtagtgaggagggatctgaaagtgaggaggaggcccctgcagggacacgaagccaggtaaaggcctctgaaaaaattctccaggtcagagctgcctcagcccctgccaaggggacccctgggaaaggggctaccccagcaccccctgggaaggcaggggctgtagcctcccagaccaaggcagggaagccagaggaggactcagagagcagcagcgaggagtcatctgacagtgaggaggagacgccagctgccaaggccctgcttcaggcgaaggcctcaggaaaaacctctcaggtcggagctgcctcagcccctgccaaggagtcccccaggaaaggagctgccccagcgccccctgggaagacagggcctgcagttgccaaggcccaggcggggaagcgggaggaggactcgcagagcagcagcgaggaatcggacagtgaggaggaggcgcctgctcaggcgaagccttcagggaaggccccccaggtcagagccgcctcggcccctgccaaggagtcccccaggaaaggggctgccccagcacctcctaggaaaacagggcctgcagccgcccaggtccaggtggggaagcaggaggaggactcaagaagcagcagcgaggagtcagacagtgacagagaggcactggcagccatgaatgcagctcaggtgaagcccttggggaaaagcccccaggtgaaacctgcctctaccatgggcatggggcccttggggaaaggcgccggcccagtgccacccgggaaggtggggcctgcaaccccctcagcccaggtggggaagtgggaggaggactcagagagcagtagtgaggagtcatcagacagcagtgatggagaggtgcccacagctgtggccccggctcaggaaaagtccttggggaacatcctccaggccaaacccacctccagtcctgccaaggggccccctcagaaggcagggcctgtagccgtccaggtcaaggctgaaaagcccatggacaactcggagagcagcgaggagtcatcggacagtgcggacagtgaggaggcaccagcagccatgactgcagctcaggcaaaaccagctctgaaaattcctcagaccaaggcctgcccaaagaaaaccaataccactgcatctgccaaggtcgcccctgtgcgagtgggcacccaagccccccggaaagcaggaactgcgacttctccagcaggctcatccccagctgtggctgggggcacccagagaccagcagaggattcttcaagcagtgaggaatcagatagtgaggaagagaagacaggtcttgcagtaaccgtgggacaggcaaagtctgtggggaaaggcctccaggtgaaagcagcctcagtgcctgtcaaggggtccttggggcaagggactgctccagtactccctgggaagacggggcctacagtcacccaggtgaaagctgaaaagcaggaagactctgagagcagtgaggaggaatcagacagtgaggaagcagctgcatctccagcacaggtgaaaacctcagtaaagaaaacccaggccaaagccaacccagctgccgccagagcaccttcagcaaaagggacaatttcagcccctggaaaagttgtcactgcagctgctcaagccaagcagaggtctccatccaaggtgaagccaccagtgagaaacccccagaacagtaccgtcttggcgaggggcccagcatctgtgccatctgtggggaaggccgtggctacagcagctcaggcccagacagggccagaggaggactcagggagcagtgaggaggagtcagacagtgaggaggaggcggagacgctggctcaggtgaagccttcagggaagacccaccagatcagagctgccttggctcctgccaaggagtcccccaggaaaggggctgccccaacacctcctgggaagacagggccttcggctgcccaggcagggaagcaggatgactcagggagcagcagcgaggaatcagacagtgatggggaggcaccggcagctgtgacctctgcccaggtgattaaaccccctctgatttttgtcgaccctaatcgtagtccagctggcccagctgctacacccgcacaagcccaggctgcaagcaccccgaggaaggcccgagcctcggagagcacagccaggagctcctcctccgagagcgaggatgaggacgtgatccccgctacacagtgcttgactcctggcatcagaaccaatgtggtgaccatgcccactgcccacccaagaatagcccccaaagccagcatggctggggccagcagcagcaaggagtccagtcggatatcagatggcaagaaacaggagggaccagccactcaggtgtcaaagaagaacccagcttccctcccactgacccaggctgccctgaaggtcctcgcccagaaagccagtgaggctcagcctcctgttgccaggacccagccttcaagtggggttgacagtgctgtgggaacactccctgcaacaagtccccagagcacctccgtccaggccaaagggaccaacaagctcagaaaacctaagcttcctgaggtccagcaggccaccaaagcccctgagagctcagatgacagtgaggacagcagcgacagttcttcagggagtgaggaagatggtgaagggccccagggggccaagtcagcccacacgctggtaggtcccaccccctccaggacagagaccctggtggaggagaccgcagcagagtccagcgaggatgatgtggtggcgccatcccagtctctcctctcaggttatatgacccctggactaaccccagccaattcccaggcctcaaaagccactcccaagctagactccagcccctcagtttcctctactctggccgccaaagatgacccagatggcaagcaggaggcaaagccccaacaggcagcaggcatgttgtcccctaaaacaggtggaaaagaggctgcttcaggcaccacacctcagaagtcccggaagcccaagaaaggggctgggaacccccaagcctcaaccctggcgctgcaaagcaacatcacccagtgcctcctgggccaaccctggcccctgaatgaggcccaggtgcaggcctcagtggtgaaggtcctgactgagctgctggaacaggaaagaaagaaggtggtggacaccaccaaggagagcagcaggaagggctgggagagccgcaagcggaagctatcgggagaccagccagctgccaggacccccaggagcaagaagaagaagaagctgggggccggggaaggtggggaggcctctgtttccccagaaaagacctccacgacttccaaggggaaagcaaagagagacaaagcaagtggtgatgtcaaggagaagaaagggaaggggtctcttggctcccaaggggccaaggacgagccagaagagaagacgacagaaggggatggggacggttgaaggtggagatcaaagcaacccaaagagcaagaaggagaagaagaaatccgacaagagaaaaaaagacaaagaaaaaaaagaaaagaagaagaaagcaaaaaaggcctcaaccaaagattctgagtcaccgtcccagaagaaaaagaagaaaaagccaagggcggcaggaaaaagaagaagaagaaggcacccaccccgcaggagaagaagcgcaggaaagacagccgcgtagtcagat

SEQ ID NO: 382331 - DNA, 5402 bp, Homo sapiens
  misc_feature (5)..(5): n is a, c, g, or t
agtgnggcgcgcgaggtctaagggcgcgagggaagtggcgggcggggactaaggcggggcgtgcaggtagccggccggccgggggtcgcgggtatggccgaggccaggaagcggcgggagctacttcccctgatctaccaccatctgctgcgggctggctatgtgcgtgcggcgcgggaagtgaaggagcagagcggccagaagtgtttcctggctcagcccgtaacccttctggacatctatacacactggcaacaaacctcagagcttggtcggaagcggaaggcagaggaagatgcggcactgcaagctaagaaaacccgtgtgtcagaccccatcagcacctcggagagctcggaagaggaggaagaagcagaagccgaaaccgccaaagccaccccaagactagcatctaccaactcctcagtcctgggggcggacttgccatcaagcatgaaagaaaaagccaaggcagagacagagaaagctggcaagactgggaattccatgccacaccctgccactgggaagacggtggccaaccttctttctgggaagtctcccaggaagtcagcagagccctcagcaaatactacgttggtctcagaaactgaggaggagggcagcgtcccggcctttggagctgctgccaagcctgggatggtgtcagcgggccaggccgacagctccagcgaggacacctccagctccagtgatgagacagacgtggaggggaaaccctcagtaaaaccagcccaggtcaaagcctcatcagtttctactaaggagtctccagcaagaaaggcggccccagcccctgggaaggtgggggatgtgacaccccaggtcaaaggaggggccctgcccccagccaagagggccaagaagccagaagaggagtcagagagtagtgaggagggatctgaaagtgaggaggaggcccctgcagggacacgaagccaggtaaaggcctctgaaaaaattctccaggtcagagctgcctcagcccctgccaaggggacccctgggaaaggggctaccccagcaccccctgggaaggcaggggctgtagcctcccagaccaaggcagggaagccagaggaggactcagagagcagcagcgaggagtcatctgacagtgaggaggagacgccagctgccaaggccctgcttcaggcgaaggcctcaggaaaaacctctcaggtcggagctgcctcagcccctgccaaggagtcccccaggaaaggagctgccccagcgccccctgggaagacagggcctgcagttgccaaggcccaggcggggaagcgggaggaggactcgcagagcagcagcgaggaatcggacagtgaggaggaggcgcctgctcaggcgaagccttcagggaaggccccccaggtcagagccgcctcggcccctgccaaggagtcccccaggaaaggggctgccccagcacctcctaggaaaacagggcctgcagccgcccaggtccaggtggggaagcaggaggaggactcaagaagcagcagcgaggagtcagacagtgacagagaggcactggcagccatgaatgcagctcaggtgaagcccttggggaaaagcccccaggtgaaacctgcctctaccatgggcatggggcccttggggaaaggcgccggcccagtgccacccgggaaggtggggcctgcaaccccctcagcccaggtggggaagtgggaggaggactcagagagcagtagtgaggagtcatcagacagcagtgatggagaggtgcccacagctgtggccccggctcaggaaaagtccttggggaacatcctccaggccaaacccacctccagtcctgccaaggggccccctcagaaggcagggcctgtagccgtccaggtcaaggctgaaaagcccatggacaactcggagagcagcgaggagtcatcggacagtgcggacagtgaggaggcaccagcagccatgactgcagctcaggcaaaaccagctctgaaaattcctcagaccaaggcctgcccaaagaaaaccaataccactgcatctgccaaggtcgcccctgtgcgagtgggcacccaagccccccggaaagcaggaactgcgacttctccagcaggctcatccccagctgtggctgggggcacccagagaccagcagaggattcttcaagcagtgaggaatcagatagtgaggaagagaagacaggtcttgcagtaaccgtgggacaggcaaagtctgtggggaaaggcctccaggtgaaagcagcctcagtgcctgtcaaggggtccttggggcaagggactgctccagtactccctgggaagacggggcctacagtcacccaggtgaaagctgaaaagcaggaagactctgagagcagtgaggaggaatcagacagtgaggaagcagctgcatctccagcacaggtgaaaacctcagtaaagaaaacccaggccaaagccaacccagctgccgccagagcaccttcagcaaaagggacaatttcagcccctggaaaagttgtcactgcagctgctcaagccaagcagaggtctccatccaaggtgaagccaccagtgagaaacccccagaacagtaccgtcttggcgaggggcccagcatctgtgccatctgtggggaaggccgtggctacagcagctcaggcccagacagggccagaggaggactcagggagcagtgaggaggagtcagacagtgaggaggaggcggagacgctggctcaggtgaagccttcagggaagacccaccagatcagagctgccttggctcctgccaaggagtcccccaggaaaggggctgccccaacacctcctgggaagacagggccttcggctgcccaggcagggaagcaggatgactcagggagcagcagcgaggaatcagacagtgatggggaggcaccggcagctgtgacctctgcccaggtgattaaaccccctctgatttttgtcgaccctaatcgtagtccagctggcccagctgctacacccgcacaagcccaggctgcaagcaccccgaggaaggcccgagcctcggagagcacagccaggagctcctcctccgagagcgaggatgaggacgtgatccccgctacacagtgcttgactcctggcatcagaaccaatgtggtgaccatgcccactgcccacccaagaatagcccccaaagccagcatggctggggccagcagcagcaaggagtccagtcggatatcagatggcaagaaacaggagggaccagccactcaggttgacagtgctgtgggaacactccctgcaacaagtccccagagcacctccgtccaggccaaagggaccaacaagctcagaaaacctaagcttcctgaggtccagcaggccaccaaagcccctgagagctcagatgacagtgaggacagcagcgacagttcttcagggagtgaggaagatggtgaagggccccagggggccaagtcagcccacacgctggtaggtcccaccccctccaggacagagaccctggtggaggagaccgcagcagagtccagcgaggatgatgtggtggcgccatcccagtctctcctctcaggttatatgacccctggactaaccccagccaattcccaggcctcaaaagccactcccaagctagactccagcccctcagtttcctctactctggccgccaaagatgacccagatggcaagcaggaggcaaagccccaacaggcagcaggcatgttgtcccctaaaacaggtggaaaagaggctgcttcaggcaccacacctcagaagtcccggaagcccaagaaaggggctgggaacccccaagcctcaaccctggcgctgcaaagcaacatcacccagtgcctcctgggccaaccctggcccctgaatgaggcccaggtgcaggcctcagtggtgaaggtcctgactgagctgctggaacaggaaagaaagaaggtggtggacaccaccaaggagagcagcaggaagggctgggagagccgcaagcggaagctatcgggagaccagccagctgccaggacccccaggagcaagaagaagaagaagctgggggccggggaaggtggggaggcctctgtttccccagaaaagacctccacgacttccaaggggaaagcaaagagagacaaagcaagtggtgatgtcaaggagaagaaagggaaggggtctcttggctcccaaggggccaaggacgagccagaagagaagacgacagaaggggatggggacggttgaaggtggagatcaaagcaacccaaagagcaagaaggagaagaagaaatccgacaagagaaaaaaagacaaagaaaaaaaagaaaagaagaagaaagcaaaaaaggcctcaaccaaagattctgagtcaccgtcccagaagaaaaagaagaaaaagaagaagacagcagagcagactgtatgacgagcaccagcaccaggcacagggatttcctagccgagcagtggccatccccatgcctctgacctccaccgacctctgcccaccatgggttggaactaaactgttaccttccctcgctccacagaagaagacagccagcttcaggggtccctgtgctggccaagccagtgagcctgcggggaggctggtccaaggagaaagtggaccagctcccatgacctcaccccactcccccaacacaggacgcttcatatagatgtgtacagtatatgtatttttttaagtgacctcctctccttccacagaccccacatgcccaaaggcctcgggacttcccaccaccttgctccacagatccagctaggcctgacctgtgcctcatcccgtgccgctcggtctctggctgatcccgaggctttgtcttcctctcgtcagttcttttggttgtgttttttgttttttttttaataactcaaaaaaaaaataaaagacttggaggaagggtgcaagctcccagtgcatctggggcacatgtttcttggaagggactgtctcgccgacactcgggattccctcttgcctgcatgttgaggctatgggtgaccgtggttagtgggacaggcagtgagcagtgaagtgcctgagtgccgaattggtggggaaggcttcctggatgaggtggcatctaaactaaaggatggtcatggttgatttcctgttgccagagtaagtcatgtaaatacccaaagacaagaaatggaaggggctgagaatcctcgagttaggcctcgagctaggggcaggctccctggaggtgcctggtgaacagctgtggcaggcacagcaggtctaggaaaatcggaagtgagttgcccctcaaatcgagctcaccatggttctgtggtggtgagggcaagaagtggatgaacatgaaagacaggatgatgtcttg

SEQ ID NO: 382332 - DNA, 5381 bp, Homo sapiens
  misc_feature (5)..(5): n is a, c, g, or t
agtgnggcgcgcgaggtctaagggcgcgagggaagtggcgggcggggactaaggcggggcgtgcaggtagccggccggccgggggtcgcgggtatggccgaggccaggaagcggcgggagctacttcccctgatctaccaccatctgctgcgggctggctatgtgcgtgcggcgcgggaagtgaaggagcagagcggccagaagtgtttcctggctcagcccgtaacccttctggacatctatacacactggcaacaaacctcagagcttggtcggaagcggaaggcagaggaagatgcggcactgcaagctaagaaaacccgtgtgtcagaccccatcagcacctcggagagctcggaagaggaggaagaagcagaagccgaaaccgccaaagccaccccaagactagcatctaccaactcctcagtcctgggggcggacttgccatcaagcatgaaagaaaaagccaaggcagagacagagaaagctggcaagactgggaattccatgccacaccctgccactgggaagacggtggccaaccttctttctgggaagtctcccaggaagtcagcagagccctcagcaaatactacgttggtctcagaaactgaggaggagggcagcgtcccggcctttggagctgctgccaagcctgggatggtgtcagcgggccaggccgacagctccagcgaggacacctccagctccagtgatgagacagacgtggaggggaaaccctcagtaaaaccagcccaggtcaaagcctcatcagtttctactaaggagtctccagcaagaaaggcggccccagcccctgggaaggtgggggatgtgacaccccaggtcaaaggaggggccctgcccccagccaagagggccaagaagccagaagaggagtcagagagtagtgaggagggatctgaaagtgaggaggaggcccctgcagggacacgaagccaggtaaaggcctctgaaaaaattctccaggtcagagctgcctcagcccctgccaaggggacccctgggaaaggggctaccccagcaccccctgggaaggcaggggctgtagcctcccagaccaaggcagggaagccagaggaggactcagagagcagcagcgaggagtcatctgacagtgaggaggagacgccagctgccaaggccctgcttcaggcgaaggcctcaggaaaaacctctcaggtcggagctgcctcagcccctgccaaggagtcccccaggaaaggagctgccccagcgccccctgggaagacagggcctgcagttgccaaggcccaggcggggaagcgggaggaggactcgcagagcagcagcgaggaatcggacagtgaggaggaggcgcctgctcaggcgaagccttcagggaaggccccccaggtcagagccgcctcggcccctgccaaggagtcccccaggaaaggggctgccccagcacctcctaggaaaacagggcctgcagccgcccaggtccaggtggggaagcaggaggaggactcaagaagcagcagcgaggagtcagacagtgacagagaggcactggcagccatgaatgcagctcaggtgaagcccttggggaaaagcccccaggtgaaacctgcctctaccatgggcatggggcccttggggaaaggcgccggcccagtgccacccgggaaggtggggcctgcaaccccctcagcccaggtggggaagtgggaggaggactcagagagcagtagtgaggagtcatcagacagcagtgatggagaggtgcccacagctgtggccccggctcaggaaaagtccttggggaacatcctccaggccaaacccacctccagtcctgccaaggggccccctcagaaggcagggcctgtagccgtccaggtcaaggctgaaaagcccatggacaactcggagagcagcgaggagtcatcggacagtgcggacagtgaggaggcaccagcagccatgactgcagctcaggcaaaaccagctctgaaaattcctcagaccaaggcctgcccaaagaaaaccaataccactgcatctgccaaggtcgcccctgtgcgagtgggcacccaagccccccggaaagcaggaactgcgacttctccagcaggctcatccccagctgtggctgggggcacccagagaccagcagaggattcttcaagcagtgaggaatcagatagtgaggaagagaagacaggtcttgcagtaaccgtgggacaggcaaagtctgtggggaaaggcctccaggtgaaagcagcctcagtgcctgtcaaggggtccttggggcaagggactgctccagtactccctgggaagacggggcctacagtcacccaggtgaaagctgaaaagcaggaagactctgagagcagtgaggaggaatcagacagtgaggaagcagctgcatctccagcacaggtgaaaacctcagtaaagaaaacccaggccaaagccaacccagctgccgccagagcaccttcagcaaaagggacaatttcagcccctggaaaagttgtcactgcagctgctcaagccaagcagaggtctccatccaaggtgaagccaccagtgagaaacccccagaacagtaccgtcttggcgaggggcccagcatctgtgccatctgtggggaaggccgtggctacagcagctcaggcccagacagggccagaggaggactcagggagcagtgaggaggagtcagacagtgaggaggaggcggagacgctggctcaggtgaagccttcagggaagacccaccagatcagagctgccttggctcctgccaaggagtcccccaggaaaggggctgccccaacacctcctgggaagacagggccttcggcagctggcccagctgctacacccgcacaagcccaggctgcaagcaccccgaggaaggcccgagcctcggagagcacagccaggagctcctcctccgagagcgaggatgaggacgtgatccccgctacacagtgcttgactcctggcatcagaaccaatgtggtgaccatgcccactgcccacccaagaatagcccccaaagccagcatggctggggccagcagcagcaaggagtccagtcggatatcagatggcaagaaacaggagggaccagccactcaggtgtcaaagaagaacccagcttccctcccactgacccaggctgccctgaaggtcctcgcccagaaagccagtgaggctcagcctcctgttgccaggacccagccttcaagtggggttgacagtgctgtgggaacactccctgcaacaagtccccagagcacctccgtccaggccaaagggaccaacaagctcagaaaacctaagcttcctgaggtccagcaggccaccaaagcccctgagagctcagatgacagtgaggacagcagcgacagttcttcagggagtgaggaagatggtgaagggccccagggggccaagtcagcccacacgctggtaggtcccaccccctccaggacagagaccctggtggaggagaccgcagcagagtccagcgaggatgatgtggtggcgccatcccagtctctcctctcaggttatatgacccctggactaaccccagccaattcccaggcctcaaaagccactcccaagctagactccagcccctcagtttcctctactctggccgccaaagatgacccagatggcaagcaggaggcaaagccccaacaggcagcaggcatgttgtcccctaaaacaggtggaaaagaggctgcttcaggcaccacacctcagaagtcccggaagcccaagaaaggggctgggaacccccaagcctcaaccctggcgctgcaaagcaacatcacccagtgcctcctgggccaaccctggcccctgaatgaggcccaggtgcaggcctcagtggtgaaggtcctgactgagctgctggaacaggaaagaaagaaggtggtggacaccaccaaggagagcagcaggaagggctgggagagccgcaagcggaagctatcgggagaccagccagctgccaggacccccaggagcaagaagaagaagaagctgggggccggggaaggtggggaggcctctgtttccccagaaaagacctccacgacttccaaggggaaagcaaagagagacaaagcaagtggtgatgtcaaggagaagaaagggaaggggtctcttggctcccaaggggccaaggacgagccagaagagaagacgacagaaggggatggggacggttgaaggtggagatcaaagcaacccaaagagcaagaaggagaagaagaaatccgacaagagaaaaaaagacaaagaaaaaaaagaaaagaagaagaaagcaaaaaaggcctcaaccaaagattctgagtcaccgtcccagaagaaaaagaagaaaaagaagaagacagcagagcagactgtatgacgagcaccagcaccaggcacagggatttcctagccgagcagtggccatccccatgcctctgacctccaccgacctctgcccaccatgggttggaactaaactgttaccttccctcgctccacagaagaagacagccagcttcaggggtccctgtgctggccaagccagtgagcctgcggggaggctggtccaaggagaaagtggaccagctcccatgacctcaccccactcccccaacacaggacgcttcatatagatgtgtacagtatatgtatttttttaagtgacctcctctccttccacagaccccacatgcccaaaggcctcgggacttcccaccaccttgctccacagatccagctaggcctgacctgtgcctcatcccgtgccgctcggtctctggctgatcccgaggctttgtcttcctctcgtcagttcttttggttgtgttttttgttttttttttaataactcaaaaaaaaaataaaagacttggaggaagggtgcaagctcccagtgcatctggggcacatgtttcttggaagggactgtctcgccgacactcgggattccctcttgcctgcatgttgaggctatgggtgaccgtggttagtgggacaggcagtgagcagtgaagtgcctgagtgccgaattggtggggaaggcttcctggatgaggtggcatctaaactaaaggatggtcatggttgatttcctgttgccagagtaagtcatgtaaatacccaaagacaagaaatggaaggggctgagaatcctcgagttaggcctcgagctaggggcaggctccctggaggtgcctggtgaacagctgtggcaggcacagcaggtctaggaaaatcggaagtgagttgcccctcaaatcgagctcaccatggttctgtggtggtgagggcaagaagtggatgaacatgaaagacaggatgatgtcttg

SEQ ID NO: 382333 - DNA, 3226 bp, Homo sapiens
tccagttttgaaatgccatgaacaaaagttgcccttttttggtgtttgtaatagtgacttcagcattcttccaagcctttaccatcttcagtgcatttttatttggtccttgcctgaatctaaaagctgggcattttagggttaatggctggtgcattgtttagatcataaaacttagcacacatccccaccccaagggctgcgatgtgaccagcattcagcaaggccggaacccgggtcttctgagacccagttcattgctctttgggccatatcagtctggtttcccatcccactgagaggatgaagtccatgacacactctgacctctcttcctgaggggtgggctaagggggtgttggggggcggtggggctggtgtgccacccactccctgggctcatcacaagctccaggtcaaaaacttctgggaacatgggtgtcggatgggaagtcaggctgtggtcactgcatccatgagcatcggttcctgccaggccctagggatactgcaggaaccaagacagggacaaggaattcccaggccagtcagggagtggtggggacagctggatgaggagctgggggagaggagatgagccaggccgtggcaagagccacgccacatttgaaggctctcagcaaggggtcatgcccaatttccatgcccaccactctccctgactgctagtggttataagaagtagagatgggggtccaccaggttggagattatccccagtgaaggtgcagattgagtagtggggcctaagctgcttccctgccctgggctgggaactgtcccttgctccttgagaacaatgtgattcgctcataacctgaagcctgccaccagttttgcccctttgactgcccctcagtccctgctccagccctcaccccagccagacagcatctgaccagggtgtggcacagctggcatcccaaggacttgtgagtctgagggctacctcttgccacccacaggtgtcaaagaagaacccagcttccctcccactgacccaggctgccctgaaggtcctcgcccagaaagccagtgaggctcagcctcctgttgccaggacccagccttcaagtggggttgacagtgctgtgggaacactccctgcaacaagtccccagagcacctccgtccaggccaaagggaccaacaagctcagaaaacctaagcttcctgaggtccagcaggccaccaaagcccctgagagctcagatgacagtgaggacagcagcgacagttcttcagggagtgaggaagatggtgaagggccccagggggccaagtcagcccacacgctggtaggtcccaccccctccaggacagagaccctggtggaggagaccgcagcagagtccagcgaggatgatgtggtggcgccatcccagtctctcctctcaggttatatgacccctggactaaccccagccaattcccaggcctcaaaagccactcccaagctagactccagcccctcagtttcctctactctggccgccaaagatgacccagatggcaagcaggaggcaaagccccaacaggcagcaggcatgttgtcccctaaaacaggtggaaaagaggctgcttcaggcaccacacctcagaagtcccggaagcccaagaaaggggctgggaacccccaagcctcaaccctggcgctgcaaagcaacatcacccagtgcctcctgggccaaccctggcccctgaatgaggcccaggtgcaggcctcagtggtgaaggtcctgactgagctgctggaacaggaaagaaagaaggtggtggacaccaccaaggagagcagcaggaagggctgggagagccgcaagcggaagctatcgggagaccagccagctgccaggacccccaggagcaagaagaagaagaagctgggggccggggaaggtggggaggcctctgtttccccagaaaagacctccacgacttccaaggggaaagcaaagagagacaaagcaagtggtgatgtcaaggagaagaaagggaaggggtctcttggctcccaaggggccaaggacgagccagaagagaagacgacagaaggggatggggacggttgaaggtggagatcaaagcaacccaaagagcaagaaggagaagaagaaatccgacaagagaaaaaaagacaaagaaaaaaaagaaaagaagaagaaagcaaaaaaggcctcaaccaaagattctgagtcaccgtcccagaagaaaaagaagaaaaagaagaagacagcagagcagactgtatgacgagcaccagcaccaggcacagggatttcctagccgagcagtggccatccccatgcctctgacctccaccgacctctgcccaccatgggttggaactaaactgttaccttccctcgctccacagaagaagacagccagcttcaggggtccctgtgctggccaagccagtgagcctgcggggaggctggtccaaggagaaagtggaccagctcccatgacctcaccccactcccccaacacaggacgcttcatatagatgtgtacagtatatgtatttttttaagtgacctcctctccttccacagaccccacatgcccaaaggcctcgggacttcccaccaccttgctccacagatccagctaggcctgacctgtgcctcatcccgtgccgctcggtctctggctgatcccgaggctttgtcttcctctcgtcagttcttttggttgtgttttttgttttttttttaataactcaaaaaaaaaataaaagacttggaggaagggtgcaagctcccagtgcatctggggcacatgtttcttggaagggactgtctcgccgacactcgggattccctcttgcctgcatgttgaggctatgggtgaccgtggttagtgggacaggcagtgagcagtgaagtgcctgagtgccgaattggtggggaaggcttcctggatgaggtggcatctaaactaaaggatggtcatggttgatttcctgttgccagagtaagtcatgtaaatacccaaagacaagaaatggaaggggctgagaatcctcgagttaggcctcgagctaggggcaggctccctggaggtgcctggtgaacagctgtggcaggcacagcaggtctaggaaaatcggaagtgagttgcccctcaaatcgagctcaccatggttctgtggtggtgagggcaagaagtggatgaacatgaaagacaggatgatgtcttg

SEQ ID NO: 382334 - DNA, 4466 bp, Homo sapiens
  misc_feature (5)..(5): n is a, c, g, or t
agtgnggcgcgcgaggtctaagggcgcgagggaagtggcgggcggggactaaggcggggcgtgcaggtagccggccggccgggggtcgcgggtatggccgaggccaggaagcggcgggagctacttcccctgatctaccaccatctgctgcgggctggctatgtgcgtgcggcgcgggaagtgaaggagcagagcggccagaagtgtttcctggctcagcccgtaacccttctggacatctatacacactggcaacaaacctcagagcttggtcggaagcggaaggcagaggaagatgcggcactgcaagctaagaaaacccgtgtgtcagaccccatcagcacctcggagagctcggaagaggaggaagaagcagaagccgaaaccgccaaagccaccccaagactagcatctaccaactcctcagtcctgggggcggacttgccatcaagcatgaaagaaaaagccaaggcagagacagagaaagctggcaagactgggaattccatgccacaccctgccactgggaagacggtggccaaccttctttctgggaagtctcccaggaagtcagcagagccctcagcaaatactacgttggtctcagaaactgaggaggagggcagcgtcccggcctttggagctgctgccaagcctgggatggtgtcagcgggccaggccgacagctccagcgaggacacctccagctccagtgatgagacagacgtggaggggaaaccctcagtaaaaccagcccaggtcaaagcctcatcagtttctactaaggagtctccagcaagaaaggcggccccagcccctgggaaggtgggggatgtgacaccccaggtcaaaggaggggccctgcccccagccaagagggccaagaagccagaagaggagtcagagagtagtgaggagggatctgaaagtgaggaggaggcccctgcagggacacgaagccaggtaaaggcctctgaaaaaattctccaggtcagagctgcctcagcccctgccaaggggacccctgggaaaggggctaccccagcaccccctgggaaggcaggggctgtagcctcccagaccaaggcagggaagccagaggaggactcagagagcagcagcgaggagtcatctgacagtgaggaggagacgccagctgccaaggccctgcttcaggcgaaggcctcaggaaaaacctctcaggtcggagctgcctcagcccctgccaaggagtcccccaggaaaggagctgccccagcgccccctgggaagacagggcctgcagttgccaaggcccaggcggggaagcgggaggaggactcgcagagcagcagcgaggaatcggacagtgaggaggaggcgcctgctcaggcgaagccttcagggaaggccccccaggtcagagccgcctcggcccctgccaaggagtcccccaggaaaggggctgccccagcacctcctaggaaaacagggcctgcagccgcccaggtccaggtggggaagcaggaggaggactcaagaagcagcagcgaggagtcagacagtgacagagaggcactggcagccatgaatgcagctcaggtgaagcccttggggaaaagcccccaggtgaaacctgcctctaccatgggcatggggcccttggggaaaggcgccggcccagtgccacccgggaaggtggggcctgcaaccccctcagcccaggtggggaagtgggaggaggactcagagagcagtagtgaggagtcatcagacagcagtgatggagaggtgcccacagctgtggccccggctcaggaaaagtccttggggaacatcctccaggccaaacccacctccagtcctgccaaggggccccctcagaaggcagggcctgtagccgtccaggtcaaggctgaaaagcccatggacaactcggagagcagcgaggagtcatcggacagtgcggacagtgaggaggcaccagcagccatgactgcagctcaggcaaaaccagctctgaaaattcctcagaccaaggcctgcccaaagaaaaccaataccactgcatctgccaaggtcgcccctgtgcgagtgggcacccaagccccccggaaagcaggaactgcgacttctccagcaggctcatccccagctgtggctgggggcacccagagaccagcagaggattcttcaagcagtgaggaatcagatagtgaggaagagaagacaggtcttgcagtaaccgtgggacaggcaaagtctgtggggaaaggcctccaggtgaaagcagcctcagtgcctgtcaaggggtccttggggcaagggactgctccagtactccctgggaagacggggcctacagtcacccaggtgaaagctgaaaagcaggaagactctgagagcagtgaggaggaatcagacagtgaggaagcagctgcatctccagcacaggtgaaaacctcagtaaagaaaacccaggccaaagccaacccagctgccgccagagcaccttcagcaaaagggacaatttcagcccctggaaaagttgtcactgcagctgctcaagccaagcagaggtctccatccaaggtgaagccaccagtgagaaacccccagaacagtaccgtcttggcgaggggcccagcatctgtgccatctgtggggaaggccgtggctacagcagctcaggcccagacagggccagaggaggactcagggagcagtgaggaggagtcagacagtgaggaggaggcggagacgctggctcaggtgaagccttcagggaagacccaccagatcagagctgccttggctcctgccaaggagtcccccaggaaaggggctgccccaacacctcctgggaagacagggccttcggctgcccaggcagggaagcaggatgactcagggagcagcagcgaggaatcagacagtgatggggaggcaccggcagctgtgacctctgcccaggtgattaaaccccctctgatttttgtcgaccctaatcgtagtccagctggcccagctgctacacccgcacaagcccaggctgcaagcaccccgaggaaggcccgagcctcggagagcacagccaggagctcctcctccgagagcgaggatgaggacgtgatccccgctacacagtgcttgactcctggcatcagaaccaatgtggtgaccatgcccactgcccacccaagaatagcccccaaagccagcatggctggggccagcagcagcaaggagtccagtcggatatcagatggcaagaaacaggagggaccagccactcaggtgtcaaagaagaacccagcttccctcccactgacccaggctgccctgaaggtcctcgcccagaaagccagtgaggctcagcctcctgttgccaggacccagccttcaagtggggttgacagtgctgtgggaacactccctgcaacaagtccccagagcacctccgtccaggccaaagggaccaacaagctcagaaaacctaagcttcctgaggtccagcaggccaccaaagcccctgagagctcagatgacagtgaggacagcagcgacagttcttcagggagtgaggaagatggtgaagggccccagggggccaagtcagcccacacgctggtaggtcccaccccctccaggacagagaccctggtggaggagaccgcagcagagtccagcgaggatgatgtggtggcgccatcccagtctctcctctcaggttatatgacccctggactaaccccagccaattcccaggcctcaaaagccactcccaagctagactccagcccctcagtttcctctactctggccgccaaagatgacccagatggcaagcaggaggcaaagccccaacaggcagcaggcatgttgtcccctaaaacaggtggaaaagaggctgcttcaggcaccacacctcagaagtcccggaagcccaagaaaggggctgggaacccccaagcctcaaccctggcgctgcaaagcaacatcacccagtgcctcctgggccaaccctggcccctgaatgaggcccaggtgcaggcctcagtggtgaaggtcctgactgagctgctggaacaggaaagaaagaaggtggtggacaccaccaaggagagcagcaggaagggctgggagagccgcaagcggaagctatcgggagaccagccagctgccaggacccccaggagcaagaagaagaagaagctgggggccggggaaggtggggaggcctctgtttccccagaaaagacctccacgacttccaaggggaaagcaaagagagacaaagcaagtggtgatgtcaaggagaagaaagggaaggggtctcttggctcccaaggggccaaggacgagccagaagagaagacgacagaaggggatggggacggttgaaggtggagatcaaagcaacccaaagagcaagaaggagaagaagaaatccgacaagagaacaagactaattaccgggggtagat

SEQ ID NO: 382335 - DNA, 2058 bp, Homo sapiens
  misc_feature (5)..(5): n is a, c, g, or t
agtgnggcgcgcgaggtctaagggcgcgagggaagtggcgggcggggactaaggcggggcgtgcaggtagccggccggccgggggtcgcgggtatggccgaggccaggaagcggcgggagctacttcccctgatctaccaccatctgctgcgggctggctatgtgcgtgcggcgcgggaagtgaaggagcagagcggccagaagtgtttcctggctcagcccgtaacccttctggacatctatacacactggcaacaaacctcagagcttggtcggaagcggaaggcagaggaagatgcggcactgcaagctaagaaaacccgtgtgtcagaccccatcagcacctcggagagctcggaagaggaggaagaagcagaagccgaaaccgccaaagccaccccaagactagcatctaccaactcctcagtcctgggggcggacttgccatcaagcatgaaagaaaaagccaaggcagagacagagaaagctggcaagactgggaattccatgccacaccctgccactgggaagacggtggccaaccttctttctgggaagtctcccaggaagtcagcagagccctcagcaaatactacgttggtctcagaaactgaggaggagggcagcgtcccggcctttggagctgctgccaagcctgggatggtgtcagcgggccaggccgacagctccagcgaggacacctccagctccagtgatgagacagacgtggaggggaaaccctcagtaaaaccagcccaggtcaaagcctcatcagtttctactaaggagtctccagcaagaaaggcggccccagcccctgggaaggtgggggatgtgacaccccaggtcaaaggaggggccctgcccccagccaagaaaggacgagccagaagagaagacgacagaaggggatggggacggttgaaggtggagatcaaagcaacccaaagagcaagaaggagaagaagaaatccgacaagagaaaaaaagacaaagaaaaaaaagaaaagaagaagaaagcaaaaaaggcctcaaccaaagattctgagtcaccgtcccagaagaaaaagaagaaaaagaagaagacagcagagcagactgtatgacgagcaccagcaccaggcacagggatttcctagccgagcagtggccatccccatgcctctgacctccaccgacctctgcccaccatgggttggaactaaactgttaccttccctcgctccacagaagaagacagccagcttcaggggtccctgtgctggccaagccagtgagcctgcggggaggctggtccaaggagaaagtggaccagctcccatgacctcaccccactcccccaacacaggacgcttcatatagatgtgtacagtatatgtatttttttaagtgacctcctctccttccacagaccccacatgcccaaaggcctcgggacttcccaccaccttgctccacagatccagctaggcctgacctgtgcctcatcccgtgccgctcggtctctggctgatcccgaggctttgtcttcctctcgtcagttcttttggttgtgttttttgttttttttttaataactcaaaaaaaaaataaaagacttggaggaagggtgcaagctcccagtgcatctggggcacatgtttcttggaagggactgtctcgccgacactcgggattccctcttgcctgcatgttgaggctatgggtgaccgtggttagtgggacaggcagtgagcagtgaagtgcctgagtgccgaattggtggggaaggcttcctggatgaggtggcatctaaactaaaggatggtcatggttgatttcctgttgccagagtaagtcatgtaaatacccaaagacaagaaatggaaggggctgagaatcctcgagttaggcctcgagctaggggcaggctccctggaggtgcctggtgaacagctgtggcaggcacagcaggtctaggaaaatcggaagtgagttgcccctcaaatcgagctcaccatggttctgtggtggtgagggcaagaagtggatgaacatgaaagacaggatgatgtcttg

SEQ ID NO: 382336 - DNA, 3846 bp, Homo sapiens
  misc_feature (5)..(5): n is a, c, g, or t
agtgnggcgcgcgaggtctaagggcgcgagggaagtggcgggcggggactaaggcggggcgtgcaggtagccggccggccgggggtcgcgggtatggccgaggccaggaagcggcgggagctacttcccctgatctaccaccatctgctgcgggctggctatgtgcgtgcggcgcgggaagtgaaggagcagagcggccagaagtgtttcctggctcagcccgtaacccttctggacatctatacacactggcaacaaacctcagagcttggtcggaagcggaaggcagaggaagatgcggcactgcaagctaagaaaacccgtgtgtcagaccccatcagcacctcggagagctcggaagaggaggaagaagcagaagccgaaaccgccaaagccaccccaagactagcatctaccaactcctcagtcctgggggcggacttgccatcaagcatgaaagaaaaagccaaggcagagacagagaaagctggcaagactgggaattccatgccacaccctgccactgggaagacggtggccaaccttctttctgggaagtctcccaggaagtcagcagagccctcagcaaatactacgttggtctcagaaactgaggaggagggcagcgtcccggcctttggagctgctgccaagcctgggatggtgtcagcgggccaggccgacagctccagcgaggacacctccagctccagtgatgagacagacgtggaggggaaaccctcagtaaaaccagcccaggtcaaagcctcatcagtttctactaaggagtctccagcaagaaaggcggccccagcccctgggaaggtgggggatgtgacaccccaggtcaaaggaggggccctgcccccagccaagagggccaagaagccagaagaggagtcagagagtagtgaggagggatctgaaagtgaggaggaggcccctgcagggacacgaagccaggtaaaggcctctgaaaaaattctccaggtcagagctgcctcagcccctgccaaggggacccctgggaaaggggctaccccagcaccccctgggaaggcaggggctgtagcctcccagaccaaggcagggaagccagaggaggactcagagagcagcagcgaggagtcatctgacagtgaggaggagacgccagctgccaaggccctgcttcaggcgaaggcctcaggaaaaacctctcaggtcggagctgcctcagcccctgccaaggagtcccccaggaaaggagctgccccagcgccccctgggaagacagggcctgcagttgccaaggcccaggcggggaagcgggaggaggactcgcagagcagcagcgaggaatcggacagtgaggaggaggcgcctgctcaggcgaagccttcagggaaggccccccaggtcagagccgcctcggcccctgccaaggagtcccccaggaaaggggctgccccagcacctcctaggaaaacagggcctgcagccgcccaggtccaggtggggaagcaggaggaggactcaagaagcagcagcgaggagtcagacagtgacagagaggcactggcagccatgaatgcagctcaggtgaagcccttggggaaaagcccccaggtgaaacctgcctctaccatgggcatggggcccttggggaaaggcgccggcccagtgccacccgggaaggtggggcctgcaaccccctcagcccaggtggggaagtgggaggaggactcagagagcagtagtgaggagtcatcagacagcagtgatggagaggtgcccacagctgtggccccggctcaggaaaagtccttggggaacatcctccaggccaaacccacctccagtcctgccaaggggccccctcagaaggcagggcctgtagccgtccaggtcaaggctgaaaagcccatggacaactcggagagcagcgaggagtcatcggacagtgcggacagtgaggaggcaccagcagccatgactgcagctcaggcaaaaccagctctgaaaattcctcagaccaaggcctgcccaaagaaaaccaataccactgcatctgccaaggtcgcccctgtgcgagtgggcacccaagccccccggaaagcaggaactgcgacttctccagcaggctcatccccagctgtggctgggggcacccagagaccagcagaggattcttcaagcagtgaggaatcagatagtgaggaagagaagacaggtcttgcagtaaccgtgggacaggcaaagtctgtggggaaaggcctccaggtgaaagcagcctcagtgcctgtcaaggggtccttggggcaagggactgctccagtactccctgggaagacggggcctacagtcacccaggtgaaagctgaaaagcaggaagactctgagagcagtgaggaggaatcagacagtgaggaagcagctgcatctccagcacaggtgaaaacctcagtaaagaaaacccaggccaaagccaacccagctgccgccagagcaccttcagcaaaagggacaatttcagcccctggaaaagttgtcactgcagctgctcaagccaagcagaggtctccatccaaggtgaagccaccagtgagaaacccccagaacagtaccgtcttggcgaggggcccagcatctgtgccatctgtggggaaggccgtggctacagcagctcaggcccagacagggccagaggaggactcagggagcagtgaggaggagtcagacagtgaggaggaggcggagacgctggctcaggtgaagccttcagggaagacccaccagatcagagctgccttggctcctgccaaggagtcccccaggaaaggggctgccccaacacctcctgggaagacagggccttcggctgcccaggcagggaagcaggatgactcagggagcagcagcgaggaatcagacagtgatggggaggcaccggcagctgtgacctctgcccaggaccaggagtcttcttgaatcccatgagctctgcccaggaccctctctcaagcacctgtggcataccttcatgtgctccactgcacccagagcttaagccacagtcctgctcaggctacacctccaagggtgggaccaggcccaccttatcttcctgtactccagaggcccaagtcagccatgctggtgtggtccaagcttctgtgtgaaccctggcccttccatcagacagcattaccctttgtcctcctctagccccaagctcccagaagcttctgccaggcacctcagagcaccagctcccctgtcccagggcctaaccacagatcctggagttctgcaacctccagaccagagcggtctcatgaaccacctccccttgaatatcacataccacattgttatcaattcatcagtaaggtcagatgctgtttgcacacctccagcaatagggtgctcactgcctctcactttccaatggcacagattacaaaagtaaagaacaaccaccaccaacatcggtaactccctgtattctcatttttctgtttaatctccacaacagccctatgagggtggctccctttgttgtttgcattttaaggaactgggagtgaggctcagagaagttgagggacctgtcccagcatcacatggctgatgacaagtggacagacctggtgtttgagcacaggccattcacattctgacccgttgcctggtgctgccccgacactctcctctcctgggcttgggcattgccctctggctctgtgtggagcctttacgaggccacctgcctctctgagggatctaaacaactgggagggaggggaccgctccccctttctctgtgggggtggactaacacaattaaaatgaacatcctgctta

SEQ ID NO: 382337 - DNA, 144 bp, Homo sapiens
ccaggctgctttcctcacagcaggccatgactcgggctgggttatggcagtggggtggggtggtggcagcctctttcacaatgggcttcttcagtctctcctctcaggttatatgacccctggactaaccccagccaattccca

SEQ ID NO: 382338 - DNA, 1511 bp, Homo sapiens
aaggatgtgggaaatgctttaccagtggtagaaaccttagagtacatcagagaattcatactggtgagaaaccatatcaatgtgaagaatgtgggaaagcctttagtcatagttcaaacctgttaaacatgttaaaattcatactgatgagaaaccctatgaatgtaaggaatgtgaaaaggcctttagcagtaattatgatcttactgtacatctgagaatccgtactgctgagaaaccctgtgagtgtaaagaatgtggaaaactttgggatttagcttagtctttactgcacatcaaagaattcatactggtatgaaccgtatgaatgtaaagaatgtggaaagacctttacttgtagctcgagccttgttcaacatgttaaaattcatactggtgagcaaccctgtgaatgtaaaggatgtgggaagacctttagacttagttcagtcctttctgcacatcacagaattcatactggcatgaaaccctatgaatgtaaagaatgtgagcaaacccttactgtgaatgatctgcttacgcaacatcagaaaattcattatagttagaagttttatgaatataaggagtgtagacaagccttcactgtgtatgaaaaatttactcaacaccagagaattcatattgatgagaaatcctgtgaacataaaagaatgtgtgaagaactttcatcgtggcctgggatttgctcaacatcagagtattcatactgctgagaactcctttgagtgtaaagaatgtgggatattttatagccacactaaatgccttagagttcagagaagataattttggtgagaaagttactgatgtgaggaatgtagagtagctgccatgttcacagtttactgcccgtgaaatattttactggatacaggcgtaccttgcttaattgtgcattgcagttactgcattttatacacactgaaggtttgcagcaaccttgcagtgaataagtctatcagcaccattttccaaacagcatatgcacatttcatgtctttgtgtcacactttgctagttttcataatatttcaaactttttcattgttaaatctgttatggtgatctgtgaccagtgttttttgattactagtgtaattgttactagtgtaattgtttggggataccacaaatcctgcccataaaagatggtgaactagttgataattgttgtgggttttgaaagaatagtaaaatatatacacatatcccccccacctagattcaaaattgttaacaatttgccacatttattttttgtatatttgttgtaccattgagaataagttttagaccattgagaataagttttagatatcatgacactttactccttgttacatcagcatgtgtgttacccaaacataaagacaatatcatataaccatagtaccataattacccttaaggaaaatattcataattctgtaatatcattccatcttcagatttcttccttggcctgcaaaccatcttttacagctatt

SEQ ID NO: 382339 - DNA, 411 bp, Homo sapiens
tgcaaataagtagtagggagcggaaaatgtaagaattttcacctgaaaatggatctgaagagtaaaagatattaattgacctaatcgtgcattgagaattgactgtttatcccatttatttgttcaataaataagccaatgggttgtaaacattgtaaacattccacagcatgtggaaaggacatggatttttggagtcaaattgaatctaagccttgctacttacttacctgtaatgatgcaaccttaattacttgatctctgtaaacctcagtttccttacctacaaaacgtttgtactattacctgccttatagagaggtccagacttaagaatatgatgatgtaaatgtttggcactgtgtctggcttttagtaagtggtcaataaaggccagttctcctttcctta

SEQ ID NO: 382340 - DNA, 615 bp, Homo sapiens
gcagaggaatgtctgccaggcacggagagcagccggctccctgctgcccagtgcagcccctcaccctattacctgcccgggttagctggaggattgggtgctgggtgggtgtggagagctggtgcccaaagtggtttattttttttaaacaggccacttccctcttcttggctttggcctttcacctccataggccagtggttctccaagtgtggttccctggccagcagcatcagggacatgttaaacatgcaaattctctagccaccccagacctactgaatcagaaactctgggggtggaatccacccattgtgttttttaaaaacaactttatagaggtataatttacatatcataaaattcacccgttttaagcatactagtcaatggtttttagtaaaggtattgaattgtgcaactgttgccacaacccggttctagaacatttctgtcatcccaataagatcccaggggtcagtttacagtcagtcccctccccgtcccctagccctaggcaaccaccaatctactttctgtctctatagatttgccttttctggatgatcttttgggtctggcttctttcacttagaataaagttttgttaacagc

SEQ ID NO: 382341 - DNA, 306 bp, Homo sapiens
gataaacttgagccaccaagaagtggactctgcctaggaagacagtttgctgaagttagaaagtactggtctaggaaccagaaaacctgattctgcccaagagttagaattgtgagtgagttctttctggtttttagtttccttatctgtaaaataattacccagttcaattggataatctctatgatcccttccacattctgcatacttggatatctactgtttctaaatattttggcatttcttataaagccctttcacatttactttattattttttcctcacaagaattcctgaaatagata

SEQ ID NO: 382342 - DNA, 654 bp, Homo sapiens
gtagtgctctggtgtcactgactcagacatgtgggggcttctgccacccacgctcaagagccactttgccgtttcaccgtctctgtgtcctccacagccctcagcagcatgcacgccaataacatgttcaccacgaggctcaaatctcagcagaagctacagagtccaacatccaggtaagggaaagtgcagggcttctcgggtgatgctctactgattttattttaatgaatgaaagaccagaagaagtcagtctttgaagggagaggagaggagcatctgctggcattagcagccatgccatcggtaggactggctcacctggtaacctgtggccacctgtgcttttacatctactcttggttaaccacgggccacttttccagcttggactctaagcgtctgttccacttcctctccttcctcattgaactctttcactaaaaggagagtgcaagagagacttaaactgtttgactcattcttaagaactttcaggaaaagtgttggcagggaaggaaatttcccagctctgggaaataagccttgtggattatctgcaggtttcattgatctgtgctgtcctccccacatgcattaagaaaattggccttggttctaataagaacagcatttgtcctggtgacaaggaaa

SEQ ID NO: 382343 - DNA, 3732 bp, Homo sapiens
gacaagtcaagttttgaacagagtagaaggcagctctgcaaagtagcttctagtttttaggaccagaatttaagccggcaaattaggaattatttcctcaagtgaagtatattttatatgaatgccccatttgggccttaaaagttgtgaaatttcttaatagcattttgtttttaagtgccccagtcctgccctgcagcaggcccccagtgcagcattaccatttgaatagggcactgtcaggctctggtggtgtggacacaggcatgtcatacctttgaaggaaaggctggggctgggaatgcccacatcctatcaaatcttcattttaggttaaactctccattggttctgaaaatgctaagtttgtgtgtgaagcacagccttattttccttttctgtcattgttgattgttttccttaacactttgacaaaaggaccagtggaccaatctgacaaagccattctggttcctttccttgagtgtactgagaatagttttaaagctatgcagaaaagggagctgttattcacactgcccttattttgttgtagaattatggagttaaaagaaaatgtgattccgaactctaccaatgtattcctaggctgtgagtactttcccggcccaaagtgtgaaaatatgtaaagaagctttgttatgctgctattgatctgccatgatttctatttattcttttatggcatgtaatggtgtttagtaatattttaatgtagattttgatttatttcagcaatagtaattttaagatattctttgaatgaaagtgtcttcgtttctatgatacaggtcattttgtagtatttaaccaattaagatgcactgcttacttttctgagcactatttaatgatggggtaaaaacccaattggctcaaccagctagcataaggattagctgtgaataatgctgacagatatgatggttccttaggaacaatcatttaagctttaatggtaactcaatcataagtccatagattatttttttctagctaaaattttagaaaattacttgtgaattacatacttgttttagtttggtcttagtttttagcataaagaatgattggcttttgttgatctaaacatgcttcctggacagggtttctgcttctcattttagtgtcttctattgctgtctacctaattatgtgtgaattgtgcagaattcagggaagcttataagttttcatgctcaattgtgaatagtttgttttcacagatagtatgtaaattaagcaaccaaaaatgaattccttatgcatcatctgggaacgagaaagctatagtgggatacagagtgttgctgacaccgggagatggtgtccagggagccacgtgacttccataaagtggacgcaccagtaggtgtgattgcacctcaagtgtagtctcagtgggcttcggtgaacagacgaatcaagggattcttgaatcgaaattatgcttttgagtatgtaatattatgagagagttaagagagaatatcctaaagagagtctgtgatcatactaattttcacctttaatgctaggaatggatatgatagacagtaaagagcatctatgataaggcttccttagtgtgaaagtaaacttaagtgcccaagtcatggagacttgaaaagggtaaacctgtttcacctcccaaatttatatattcaaagtatttacttaaaattcagaagccagaagttcatgtcatgattaccaggaagttcaggccagaatgaatccctagagaagccaggccaagcctggataattgcagctggatgaccctggcccgaaagtcacagttcagttgccttattcctagttcaggcttactatctagaacctcatgctagcttaggttgcatgtttacattgctgcagtgtctttactggaagcttagttggatcgaaatggacaccgagatggagatgcttctggctagatttcgcagaaccccaggagacctgcatttagaccactctgtccatttgtgtgcccacccccacccccagggtctaagtgtagactccaagaggagcagcccagagcttggaggagaggtgtgtctggggcaccactggtgggtggtgctgctcttctttttgttgtagttaatgcggtgtcttttaatggactctcaggcctcccagacagccttgttcctttaaggcagaagctcttcttcattgtgtacctcctgggattcatgaggtgtgagatttggcctgcttgactttgaattcaagtttttcaagtgactctcagtgtcagaagaagcatttcatgctgtccacatgtggtatgtccacagctcaccttcaaaggcttagatgtagccatcacagagagtggtattttattaagaacccaagtcccagcctgaccaacatggtgaaaccccatctctactaaaaatacaaaaattagccgggcgtggtggcacgcgcctatactcccagctacttaggaggctgaggcaggagaatcacttgaacccgggaggcagaggttgcagtgagccaagatcacaccactgcactctagcctgggcgacagtgagactccacctcaaaaaaaaaaaaaaaaaaaaaaaaaaaaaaagtcacgctgggcccctctctacagggggacacacaggcttagtttagtatatgtctaaccagattttgcatgtcaagcatttgtccttttcctggcttatgttttcttgtagaaattatataaaccctatcaaatccactactaggtaaatttttaaaccatgcagctttattactctcctcccccaaagaatgtagtttgaaattttctcatttccatagtagaggccctaactgccattgtattactaataatgcaacatgaaattgaaggtgcctaactgctcaaaaaacaaaatcagccatcatactgtaactctgagaggaatgagaggtggcacaggcacgagtgggctcagcccgtgtgagtgaggagaactgaggaatcctagggtgcgcatcctgcatcctggctgcacgtttgctgcagagtatgtttttctttcttgcctcccttcagttttcttcagttgcgttcagtgtatcttctggaaccaatagtgccctgtgttctcaagtctctaaaatgctaagatctgagcaaagtcaagcagcttacactaggcttttttacagctgtgcttgagaacatttccgagtggaccagggccttgaggagcctgtttttcagcaaattcaacagatgtgtgcagtgattccctccgttttgtatttgacaccttcatttaaaatgctaagatgcaatatcattcacttcaaagtggggaaaatgcagaattgtgtttcctttttatctgtgtgattccttaagaaacatgtttttaaaatatgtgttctaaatggttttttattctgtattactgctttggccatgtggctctcatgactttcattgtaccagattctcagctccctgaaacatggggacgagaagctctggaattacagcaagatttttgttccatgagcgcaatactgtatcattaacatttttaatggtatggattttatagcatctgtgtatgtttgcaaatattaagttattacatgttttaaaatgagcgtttttcatcttaaattttatatgtttgcaaatatatttttttaataaaatttcaaaaccaagttttagcacctaaaaaaaaaaaa

SEQ ID NO: 382344 - DNA, 2458 bp, Homo sapiens
gacaagtcaagttttgaacagagtagaaggcagctctgcaaagtagcttctagtttttaggaccagaatttaagccggcaaattaggaattatttcctcaagtgaagtatattttatatgaatgccccatttgggccttaaaagttgtgaaatttcttaatagcattttgtttttaagtgccccagtcctgccctgcagcaggcccccagtgcagcattaccatttgaatagggcactgtcaggctctggtggtgtggacacaggcatgtcatacctttgaaggaaaggctggggctgggaatgcccacatcctatcaaatcttcattttaggttaaactctccattggttctgaaaatgctaagtttgtgtgtgaagcacagccttattttccttttctgtcattgttgattgttttccttaacactttgacaaaaggaccagtggaccaatctgacaaagccattctggttcctttccttgagtgtactgagaatagttttaaagctatgcagaaaagggagctgttattcacactgcccttattttgttgtagaattatggagttaaaagaaaatgtgattccgaactctaccaatgtattcctaggctgtgagtactttcccggcccaaagtgtgaaaatatgtaaagaagctttgttatgctgctattgatctgccatgatttctatttattcttttatggcatgtaatggtgtttagtaatattttaatgtagattttgatttatttcagcaatagtaattttaagatattctttgaatgaaagtgtcttcgtttctatgatacaggtcattttgtagtatttaaccaattaagatgcactgcttacttttctgagcactatttaatgatggggtaaaaacccaattggctcaaccagctagcataaggattagctgtgaataatgctgacagatatgatggttccttaggaacaatcatttaagctttaatggtaactcaatcataagtccatagattatttttttctagctaaaattttagaaaattacttgtgaattacatacttgttttagtttggtcttagtttttagcataaagaatgattggcttttgttgatctaaacatgcttcctggacagggtttctgcttctcattttagtgtcttctattgctgtctacctaattatgtgtgaattgtgcagaattcagggaagcttataagttttcatgctcaattgtgaatagtttgttttcacagatagtatgtaaattaagcaaccaaaaatgaattccttatgcatcatctgggaacgagaaagctatagtgggatacagagtgttgctgacaccgggagatggtgtccagggagccacgtgacttccataaagtggacgcaccagtaggtgtgattgcacctcaagtgtagtctcagtgggcttcggtgaacagacgaatcaagggattcttgaatcgaaattatgcttttgagtatgtaatattatgagagagttaagagagaatatcctaaagagagtctgtgatcatactaattttcacctttaatgctaggaatggatatgatagacagtaaagagcatctatgataaggcttccttagtgtgaaagtaaacttaagtgcccaagtcatggagacttgaaaagggtaaacctgtttcacctcccaaatttatatattcaaagtatttacttaaaattcagaagccagaagttcatgtcatgattaccaggaagttcaggccagaatgaatccctagagaagccaggccaagcctggataattgcagctggatgaccctggcccgaaagtcacagttcagttgccttattcctagttcaggcttactatctagaacctcatgctagcttaggttgcatgtttacattgctgcagtgtctttactggaagcttagttggatcgaaatggacaccgagatggagatgcttctggctagatttcgcagaaccccaggagacctgcatttagaccactctgtccatttgtgtgcccacccccacccccagggtctaagtgtagactccaagaggagcagcccagagcttggaggagaggtgtgtctggggcaccactggtgggggagcgcacctcttatggtggacgcaagcgggggctctaaaggaccacaggcccccaaaagctgtccttagagaaactctcacagagacccggcaaataaaggagaaaagcgccgcataatacaaatcaaacctcggtcatggcgcgaggtagtgacacacccgagcgaccccgagagtatgaacgccgggtacacaaatgaggtgctcgacgatggaccagacagaacagagaaggtgtcgagaagagtgacgacaacgagcacgacgcagagagcgaaccacgagcaggccgagacagcgcaagacaacaacgacggacgaagcgagaggactacggccgagcacagcc

SEQ ID NO: 382345 - DNA, 3642 bp, Homo sapiens
gacaagtcaagttttgaacagagtagaaggcagctctgcaaagtagcttctagtttttaggaccagaatttaagccggcaaattaggaattatttcctcaagtgaagtatattttatatgaatgccccatttgggccttaaaagttgtgaaatttcttaatagcattttgtttttaagtgccccagtcctgccctgcagcaggcccccagtgcagcattaccatttgaatagggcactgtcaggctctggtggtgtggacacaggcatgtcatacctttgaaggaaaggctggggctgggaatgcccacatcctatcaaatcttcattttaggttaaactctccattggttctgaaaatgctaagtttgtgtgtgaagcacagccttattttccttttctgtcattgttgattgttttccttaacactttgacaaaaggaccagtggaccaatctgacaaagccattctggttcctttccttgagtgtactgagaatagttttaaagctatgcagaaaagggagctgttattcacactgcccttattttgttgtagaattatggagttaaaagaaaatgtgattccgaactctaccaatgtattcctaggctgtgagtactttcccggcccaaagtgtgaaaatatgtaaagaagctttgttatgctgctattgatctgccatgatttctatttattcttttatggcatgtaatggtgtttagtaatattttaatgtagattttgatttatttcagcaatagtaattttaagatattctttgaatgaaagtgtcttcgtttctatgatacaggtcattttgtagtatttaaccaattaagatgcactgcttacttttctgagcactatttaatgatggggtaaaaacccaattggctcaaccagctagcataaggattagctgtgaataatgctgacagatatgatggttccttaggaacaatcatttaagctttaatggtaactcaatcataagtccatagattatttttttctagctaaaattttagaaaattacttgtgaattacatacttgttttagtttggtcttagtttttagcataaagaatgattggcttttgttgatctaaacatgcttcctggacagggtttctgcttctcattttagtgtcttctattgctgtctacctaattatgtgtgaattgtgcagaattcagggaagcttataagttttcatgctcaattgtgaatagtttgttttcacagatagtatgtaaattaagcaaccaaaaatgaattccttatgcatcatctgggaacgagaaagctatagtgggatacagagtgttgctgacaccgggagatggtgtccagggagccacgtgacttccataaagtggacgcaccagtaggtgtgattgcacctcaagtgtagtctcagtgggcttcggtgaacagacgaatcaagggattcttgaatcgaaattatgcttttgagtatgtaatattatgagagagttaagagagaatatcctaaagagagtctgtgatcatactaattttcacctttaatgctaggaatggatatgatagacagtaaagagcatctatgataaggcttccttagtgtgaaagtaaacttaagtgcccaagtcatggagacttgaaaagggtaaacctgtttcacctcccaaatttatatattcaaagtatttacttaaaattcagaagccagaagttcatgtcatgattaccaggaagttcaggccagaatgaatccctagagaagccaggccaagcctggataattgcagctggatgaccctggcccgaaagtcacagttcagttgccttattcctagttcaggcttactatctagaacctcatgctagcttaggttgcatgtttacattgctgcagtgtctttactggaagcttagttggatcgaaatggacaccgagatggagatgcttctggctagatttcgcagaaccccaggagacctgcatttagaccactctgtccatttgtgtgcccacccccacccccagggtctaagtgtagactccaagaggagcagcccagagcttggaggagaggtgtgtctggggcaccactggtgggtggtgctgctcttctttttgttgtagttaatgcggtgtcttttaatggactctcaggcctcccagacagccttgttcctttaaggcagaagctcttcttcattgtgtacctcctgggattcatgaggtgtgagatttggcctgcttgactttgaattcaagtttttcaagtgactctcagtgtcagaagaagcatttcatgctgtccacatgtggtatgtccacagctcaccttcaaaggcttagatgtagccatcacagagagtggtattttattaagaacccaagtcccagcctgaccaacatggtgaaaccccatctctactaaaaatacaaaaattagccgggcgtggtggcacgcgcctatactcccagctacttaggaggctgaggcaggagaatcacttgaacccgggaggcagaggttgcagtgagccaagatcacaccactgcactctagcctgggcgacagtgagactccacctcaaaaaaaaaaaaaaaaaaaaaaaaaaaaaaagtcacgctgggcccctctctacagggggacacacaggcttagtttagtatatgtctaaccagattttgcatgtcaagcatttgtccttttcctggcttatgttttcttgtagaaattatataaaccctatcaaatccactactaggtaaatttttaaaccatgcagctttattactctcctcccccaaagaatgtagtttgaaattttctcatttccatagtagagtctgagaggaatgagaggtggcacaggcacgagtgggctcagcccgtgtgagtgaggagaactgaggaatcctagggtgcgcatcctgcatcctggctgcacgtttgctgcagagtatgtttttctttcttgcctcccttcagttttcttcagttgcgttcagtgtatcttctggaaccaatagtgccctgtgttctcaagtctctaaaatgctaagatctgagcaaagtcaagcagcttacactaggcttttttacagctgtgcttgagaacatttccgagtggaccagggccttgaggagcctgtttttcagcaaattcaacagatgtgtgcagtgattccctccgttttgtatttgacaccttcatttaaaatgctaagatgcaatatcattcacttcaaagtggggaaaatgcagaattgtgtttcctttttatctgtgtgattccttaagaaacatgtttttaaaatatgtgttctaaatggttttttattctgtattactgctttggccatgtggctctcatgactttcattgtaccagattctcagctccctgaaacatggggacgagaagctctggaattacagcaagatttttgttccatgagcgcaatactgtatcattaacatttttaatggtatggattttatagcatctgtgtatgtttgcaaatattaagttattacatgttttaaaatgagcgtttttcatcttaaattttatatgtttgcaaatatatttttttaataaaatttcaaaaccaagttttagcacctaaaaaaaaaaaa

SEQ ID NO: 382346 - DNA, 994 bp, Homo sapiens
tctcctgcctagtatgtatcactacaccttgcccagagagggtccatgcagctttattactctcctcccccaaagaatgtagtttgaaattttctcatttccatagtagaggccctaactgccattgtattactaataatgcaacatgaaattgaaggtgcctaactgctcaaaaaacaaaatcagccatcatactgtaactctgagaggaatgagaggtggcacaggcacgagtgggctcagcccgtgtgagtgaggagaactgaggaatcctagggtgcgcatcctgcatcctggctgcacgtttgctgcagagtatgtttttctttcttgcctcccttcagttttcttcagttgcgttcagtgtatcttctggaaccaatagtgccctgtgttctcaagtctctaaaatgctaagatctgagcaaagtcaagcagcttacactaggcttttttacagctgtgcttgagaacatttccgagtggaccagggccttgaggagcctgtttttcagcaaattcaacagatgtgtgcagtgattccctccgttttgtatttgacaccttcatttaaaatgctaagatgcaatatcattcacttcaaagtggggaaaatgcagaattgtgtttcctttttatctgtgtgattccttaagaaacatgtttttaaaatatgtgttctaaatggttttttattctgtattactgctttggccatgtggctctcatgactttcattgtaccagattctcagctccctgaaacatggggacgagaagctctggaattacagcaagatttttgttccatgagcgcaatactgtatcattaacatttttaatggtatggattttatagcatctgtgtatgtttgcaaatattaagttattacatgttttaaaatgagcgtttttcatcttaaattttatatgtttgcaaatatatttttttaataaaatttcaaaaccaagttttagcacctaaaaaaaaaaaa

SEQ ID NO: 382347 - DNA, 2968 bp, Homo sapiens
gacaagtcaagttttgaacagagtagaaggcagctctgcaaagtagcttctagtttttaggaccagaatttaagccggcaaattaggaattatttcctcaagtgaagtatattttatatgaatgccccatttgggccttaaaagttgtgaaatttcttaatagcattttgtttttaagtgccccagtcctgccctgcagcaggcccccagtgcagcattaccatttgaatagggcactgtcaggctctggtggtgtggacacaggcatgtcatacctttgaaggaaaggctggggctgggaatgcccacatcctatcaaatcttcattttaggttaaactctccattggttctgaaaatgctaagtttgtgtgtgaagcacagccttattttccttttctgtcattgttgattgttttccttaacactttgacaaaaggaccagtggaccaatctgacaaagccattctggttcctttccttgagtgtactgagaatagttttaaagctatgcagaaaagggagctgttattcacactgcccttattttgttgtagaattatggagttaaaagaaaatgtgattccgaactctaccaatgtattcctaggctgtgagtactttcccggcccaaagtgtgaaaatatgtaaagaagctttgttatgctgctattgatctgccatgatttctatttattcttttatggcatgtaatggtgtttagtaatattttaatgtagattttgatttatttcagcaatagtaattttaagatattctttgaatgaaagtgtcttcgtttctatgatacaggtcattttgtagtatttaaccaattaagatgcactgcttacttttctgagcactatttaatgatggggtaaaaacccaattggctcaaccagctagcataaggattagctgtgaataatgctgacagatatgatggttccttaggaacaatcatttaagctttaatggtaactcaatcataagtccatagattatttttttctagctaaaattttagaaaattacttgtgaattacatacttgttttagtttggtcttagtttttagcataaagaatgattggcttttgttgatctaaacatgcttcctggacagggtttctgcttctcattttagtgtcttctattgctgtctacctaattatgtgtgaattgtgcagaattcagggaagcttataagttttcatgctcaattgtgaatagtttgttttcacagatagtatgtaaattaagcaaccaaaaatgaattccttatgcatcatctgggaacgagaaagctatagtgggatacagagtgttgctgacaccgggagatggtgtccagggagccacgtgacttccataaagtggacgcaccagtaggtgtgattgcacctcaagtgtagtctcagtgggcttcggtgaacagacgaatcaagggattcttgaatcgaaattatgcttttgagtatgtaatattatgagagagttaagagagaatatcctaaagagagtctgtgatcatactaattttcacctttaatgctaggaatggatatgatagacagtaaagagcatctatgataaggcttccttagtgtgaaagtaaacttaagtgcccaagtcatggagacttgaaaagggtaaacctgtttcacctcccaaatttatatattcaaagtatttacttaaaattcagaagccagaagttcatgtcatgattaccaggaagttcaggccagaatgaatccctagagaagccaggccaagcctggataattgcagctggatgaccctggcccgaaagtcacagttcagttgccttattcctagttcaggcttactatctagaacctcatgctagcttaggttgcatgtttacattgctgcagtgtctttactggaagcttagttggatcgaaatggacaccgagatggagatgcttctggctagatttcgcagaaccccaggagacctgcatttagaccactctgtccatttgtgtgcccacccccacccccagggtctaagtgtagactccaagaggagcagcccagagcttggaggagaggtgtgtctggggcaccactggtgggtggtgctgctcttctttttgttgtagttaatgcggtgtcttttaatggactctcaggcctcccagacagccttgttcctttaaggcagaagctcttcttcattgtgtacctcctgggattcatgaggtgtgagatttggcctgcttgactttgaattcaagtttttcaagtgactctcagtgtcagaagaagcatttcatgctgtccacatgtggtatgtccacagctcaccttcaaaggcttagatgtagccatcacagagagtggtattttattaagaacccaagtcccagcctgaccaacatggtgaaaccccatctctactaaaaatacaaaaattagccgggcgtggtggcacgcgcctatactcccagctacttaggaggctgaggcaggagaatcacttgaacccgggaggcagaggttgcagtgagccaagatcacaccactgcactctagcctgggcgacagtgagactccacctcaaaaaaaaaaaaaaaaaaaaaaaaaaaaaaaggcccgggggggcccccctaaagggggggaccccggggcgcttgtggttatagtttcttcgtgttctacccaaggttctctgtgcgtgtgttcacggctattgggccccttaccgggggataggtgtctctggcggtagacaattttatttttgaccccgttattaaaagtccccacaatgatggcgcaactgttttcaagcccatgggacgcttttattaaaccctcttccccccaaagaagtggttgttgtggaacctttcctacatttccagaagaagagggcccaatgtgacgtgtatcactatagaggcccgcgaatgtggaggggcatacgtgccaaaa

SEQ ID NO: 382348 - DNA, 235 bp, Homo sapiens
atgcctccatttcatccaaccaagatcatgggagttttcagtcaccgaattgtccttggaattttcccaaaactaaaatttggcttatcatagttttagagaaaggggaacactcttccctcttcccatatgttacaaaatgtagatccctgatttgttgtgattgtgtgaatcgtaaggagtggcgccccagtggagatgtgcctgcagtgcatccatgggcttagaatactat

SEQ ID NO: 382349 - DNA, 870 bp, Homo sapiens
agcggagacactctgtgcaaagaacagaggcaagcctccagccaggagctcatgaaatcatgaactgaggcctcagtgcaatagctcatgaggaaatgaattatttcaacagccagttctggaagttggaagtacaagatcagattgccagcatcatcaggtactcatgagggccgtcttccagcttgcagactgccaacttctcattgtgtcctcaggtgaggaaaatttggctcgtggtgatagtcttggatatcaccttcatcccctcggatgtttgtagataatcctccattatatttggaatgaatactgtagatatatgaggttggactatcctacgttttgcttgtttatgggttttgcatcttgatgtcttcctgaagtattcttcatggggaatttccaaatcaaccacaatttgatatcaaagtaatgtcaagtgcttctgacccactgcattaaacgtgtgctgagcagttggtggtagaagacattattgtgaaggctgctcaccaccaatttcatcactgttgctaactccagctcatctaatctctgcaacatctgctaccagcaccttctcttgcctccttttgtgaacatagttttttcttctggttagaaaatcagttcgaacttcttgagttttgtgttttaaactcttctcaactgttccgatgattgatggatggcccagaggcgacctctttatctccagcaacatatttggctgttggcccggtagagaggtactccagaagcttgctggttcatcatgctctcatctttaaccacaactatttatctgactcctacctttcgctcagcataaggtgtttcatataactaataagacaaccacaccta

SEQ ID NO: 382350 - DNA, 689 bp, Homo sapiens
agcggagacactctgtgcaaagaacagaggcaagcctccagccaggagctcatgaaatcatgaactgaggcctcagtgcaatagctcatgaggaaatgaattatttcaacagccagggttgctctgaagactaaagccctgggatcattcattttaaaagaaaagaacggtgactcatcatttcaagcttttcattctggaagttggaagtacaagatcagattgccagcatcatcagatttgatatcaaagtaatgtcaagtgcttctgacccactgcattaaacgtgtgctgagcagttggtggtagaagacattattgtgaaggctgctcaccaccaatttcatcactgttgctaactccagctcatctaatctctgcaacatctgctaccagcaccttctcttgcctccttttgtgaacatagttttttcttctggttagaaaatcagttcgaacttcttgagttttgtgttttaaactcttctcaactgttccgatgattgatggatggcccagaggcgacctctttatctccagcaacatatttggctgttggcccggtagagaggtactccagaagcttgctggttcatcatgctctcatctttaaccacaactatttatctgactcctacctttcgctcagcataaggtgtttcatataactaataagacaaccacaccta

SEQ ID NO: 382351 - DNA, 195 bp, Homo sapiens
tataaagttgaaatatcaattttattttttaggaatctggtgaacagtaacaaactttggtgaaatttcaggaaccatagccattgaagtggatgagggaacctatatacatgcactcaacaatggtctttttaccctgggagctccacacaaagaaggtttgtgtctggaacggaagatcctgccacaagtgta

SEQ ID NO: 382352 - DNA, 1920 bp, Homo sapiens
  misc_feature (187)..(187): n is a, c, g, or t
agaaaaaagataatatactaattcttaattttagtaagtagacagttgtagtgtatggatgttttgttaaatctttgttgatacagaatatataatttcctttttctgtttgtgtgagaagtaaagattgaacaaaaatatgtgagtgctaaactgtctttaaaaagtagataactatatcaaaaanagtaaggaccagtgggcaccatgcagaacaagcaaatagaagctcagcctttgagtagcagctttggtagtatacaaaaatgaactgaaaataggaactcagcagtgttttaagatgacagattaaacaaacatcccaccagaaagaggtaatcacttagactaatttcctcatcccctaggataaaatcttaagtcagtgacttgaaaactattttgacccaatccattgagaaatgcatttttacattgcagcccagcacacacatatgtataactgaagcaagagttgtacttaacaatacttacttatccgtgtgttatgcatcttgatatttcttattctcttttaccccttcctctgtgtgtctgtgtgtattctttttcccccccacccacccgataccgttcaggaaacactacgttgatttcattacctgctaatgtgttgcaacccctttgagatgatcctactagttatgatgagatgcttctaataaaagttacaccagtagaaaatgccaatatttcataaggccaggatgatgacttagatagtactaatattactacactttaggaaagttcatttcattttatttttaggaaggacactaatagagttccataaaagaaaagtctttagtgcatgttatttattattcagggtgtagatactattttaacttccacattctaaattatagtgtgggtatcaatctatgaagtaggtgctgacaagttgtcaacattactgacttttatggtgaagttttaaatttgaatttttattcaaatataaatgaaaagaccattttctcaggtaaaaaaatctatcatgctttgatgcttttcactttaattgaaaaaagactcattataaaagtacaatgcaagaaatatttagaaaaatattcctgatctccagttgttactgtacctagatttttcttgggacctatgtgataaaacttatcatgattcttgaagaaatagaagttcatacaactgttatcagaatttatataaaatgtttctcagaaaatgtggtttctccagctcgaacattctataactctaagccaaattgaaagagcagattgatgggataaaacacaaagtatggaaataaataataaactgctaccctgaaaaagcctacctctgcacattgtttaaaaattggaaaaaatcctacttctgtgttctgatattcaatgcaagtcattagagtaaggtgagactcttcctgtggattcagattgaaatcagggacggtgtagggaggccatggtcaacttttgagctacccttgagggaagaaattaattgatcaaatattaactgcccaagtatattcacaggatggccatccagtaatgagaatgaacagtctccaactaaaggcaacaatatagatgaatctcggaaacatgatattgaccagacagaaaagattccacttacataaacttcaaaagaagataaaactgatctatgacattaatagtcagaatattcattatccttgagggaactaaactgggaagccacatgatagggcatctggaagctagtaatgtcctctttcttgatctgttacattggtgtgtttatttcattagatttattgagctatacatttaccaccgtgtacttgtctctgtatatgttttgcattgaaataaattttaccaataaaatgataaagcaaaataaagcaaaaaaagctta

SEQ ID NO: 382353 - DNA, 496 bp, Homo sapiens
  misc_feature (443)..(443): n is a, c, g, or t
  misc_feature (480)..(480): n is a, c, g, or t
gaagtggaaatctcagccattcagtgtttgggtgaagacggaggcgggttctggacagacctacgctgtcggggagtgtttacttcgcctccacttctgttcctccccgccctggtgctgctccaggtcacatactcttcctgagccggcttcagcctctccgcgcagaagtctcccggagccatggcctagtattcttatgtgaagtctaccaagcttgtgctcaagggaaccgaggtgaagagctgggtcctgcagctccggcgggagcctcctcagttcttttcggacgcactccacccccgcgaatccggtggaagccgtgatgcggagagccggcttcgtggcctcccaggcttcgctctgaccctgtctgggctggatggaggccggaccgcccttcctggcgctgtcagggggagctctggcggcgacctgggatnacggcggtgaccgtgacccgccacagttgggccttgngatcctcagcttgctg

SEQ ID NO: 382354 - DNA, 974 bp, Homo sapiens
  misc_feature (187)..(187): n is a, c, g, or t
agaaaaaagataatatactaattcttaattttagtaagtagacagttgtagtgtatggatgttttgttaaatctttgttgatacagaatatataatttcctttttctgtttgtgtgagaagtaaagattgaacaaaaatatgtgagtgctaaactgtctttaaaaagtagataactatatcaaaaanagtaaggaccagtgggcaccatgcagaacaagcaaatagaagctcagcctttgagtagcagctttggtagtatacaaaaatgaactgaaaataggaactcagcagtgttttaagatgacagattaaacaaacatcccaccagaaagaggtaatcacttagactaatttcctcatcccctaggataaaatcttaagtcagtgacttgaaaactattttgacccaatccattgagaaatgcatttttacattgcagcccagcacacacatatgtataactgaagcaagagttgtacttaacaatacttacttatccgtgtgttatgcatcttgatatttcttattctcttttaccccttcctctgtgtgtctgtgtgtattctttttcccccccacccacccgataccgttcaggaaacactacgtccgagcacccaccggcaacggacgcagcagacaccaaagagaagatcgcactaaaaagagaagcaacgccgcctccgaccaagccacacaccccaaagaagacaacgatccacacgccacacacgcgacagacatcgcaccaatatcactgaacaccagcgaagccaagacaccccatacaaggacggcaacacacagtcgaaacacaccggccaacagacgccaacaacaagagggcgaaaacaataacacccaacccaccacagagcggacacaaaagaaacgaagcaggagcaacaacagacccaaggaggcaaaaacaacaaaacaacaccagcccgacacatgcagcataccaccccc

SEQ ID NO: 382355 - DNA, 1436 bp, Homo sapiens
gaagtggaaatctcagccattcagtgtttgggtgaagacggaggcgggttctggacagacctacgctgtcggggagtgtttacttcgcctccacttctgttcctccccgccctggtgctgctccaggtcacatactcttcctgagccggcttcagcctctccgcgcagaagtctcccggagccatggcctagtattcttatgtgaagtctaccaagcttgtgctcaagggaaccgaggtgaagagctgggtcctgcagctccggcgggagcctcctcagttcttttcggacgcactccacccccgcgaatccggtggaagccgtgatgcggagagccggcttcgtggcctcccaggcttcgctctgaccctgtctgggctggatggaggccggaccgcccttcctggcgcctgtgcagagaggggcagcctcctgcgcggacgaccctggaaacaggatagacgggcgggtgacccgtgaccccgtacccacgagtttgggtcccttgaggcatctctccaggcctctgcctgatttgcctgaggttgactgtacatgcaaatattgagctttcctcctggcctccgtgataaacagaagttttgatattgttaggcgagatggaaagaaagtatcaaggagtgagctgaagccactgcccttgagaaccctctcgaggagtctggcctcatgaagatgccagaataaatggcagtaagaagaaaaagagcaaagataagaagagaaaaagagaagatgaagaaacccagcttgatatgttgaggaacgcagctgctcaccagcaacggaacaaagctggacggagaatgactttgaagagctgagagaaggcttcagacgatcaaattactctgagctacgggaggacattcaaaccaaaggcaaagaagttgaaaactttgaaaaaaataaatgtacattaattaacgtgaatcgccctgaaacctggctatggaaaatatcttagtataaattcagatgaacttgttgttggcgttcagatgcaattggaccaagagaacaatgggaaccagtctttcaaaatgatggccatccagtaatgagaatgaacagtctccaactaaaggcaacaatatagatgaatctcggaaacatgatattgaccagacagaaaagattccacttacataaacttcaaaagaagataaaactgatctatgacattaatagtcagaatattcattatccttgagggaactaaactgggaagccacatgatagggcatctggaagctagtaatgtcctctttcttgatctgttacattggtgtgtttatttcattagatttattgagctatacatttaccaccgtgtacttgtctctgtatatgttttgcattgaaataaattttaccaataaaatgataaagcaaaataaagcaaaaaaagctta

SEQ ID NO: 382356 - DNA, 1562 bp, Homo sapiens
gaagtggaaatctcagccattcagtgtttgggtgaagacggaggcgggttctggacagacctacgctgtcggggagtgtttacttcgcctccacttctgttcctccccgccctggtgctgctccaggtcacatactcttcctgagccggcttcagcctctccgcgcagaagtctcccggagccatggcctagtattcttatgtgaagtctaccaagcttgtgctcaagggaaccgaggtgaagagctgggtcctgcagctccggcgggagcctcctcagttcttttcggacgcactccacccccgcgaatccggtggaagccgtgatgcggagagccggcttcgtggcctcccaggcttcgctctgaccctgtctgggctggatggaggccggaccgcccttcctggcgcctgtgcagagaggggcagcctcctgcgcggacgaccctggaaacaggatagacgggcgggtgacccgtgaccccgtacccacgagtttgggtcccttgaggcatctctccaggcctctgcctgatttgcctgaggttgactgtacatgcaaatattgagctttcctcctggcctccgtgataaacagaagttttgatattgttaggcgagatggaaagaaagtatcaaggagtgagctgaagccactgcccttgagaaccctctcgaggagtctggcctcatgaagatgccagaataaatggcagtaagaagaaaaagagcaaagataagaagagaaaaagagaagatgaagaaacccagcttgatatgttgaggaacgcagctgctcaccagcaacggaacaaagctggacggagaatgactttgaagagctgagagaaggcttcagacgatcaaattactctgagctacgggaggacattcaaaccaaaggcaaagaagttgaaaactttgaaaaaaataaatgtacattaattaacgtggaatctggtgaacagtaacaaactttggtgaaatttcaggaaccatagccattgaagtggatgagggaacctatatacatgcactcaacaatggtctttttaccctgggagctccacacaaagaagaatcgccctgaaacctggctatggaaaatatcttagtataaattcagatgaacttgttgttggcgttcagatgcaattggaccaagagaacaatgggaaccagtctttcaaaatgatggccatccagtaatgagaatgaacagtctccaactaaaggcaacaatatagatgaatctcggaaacatgatattgaccagacagaaaagattccacttacataaacttcaaaagaagataaaactgatctatgacattaatagtcagaatattcattatccttgagggaactaaactgggaagccacatgatagggcatctggaagctagtaatgtcctctttcttgatctgttacattggtgtgtttatttcattagatttattgagctatacatttaccaccgtgtacttgtctctgtatatgttttgcattgaaataaattttaccaataaaatgataaagcaaaataaagcaaaaaaagctta

SEQ ID NO: 382357 - DNA, 1956 bp, Homo sapiens
  misc_feature (187)..(187): n is a, c, g, or t
agaaaaaagataatatactaattcttaattttagtaagtagacagttgtagtgtatggatgttttgttaaatctttgttgatacagaatatataatttcctttttctgtttgtgtgagaagtaaagattgaacaaaaatatgtgagtgctaaactgtctttaaaaagtagataactatatcaaaaanagtaaggaccagtgggcaccatgcagaacaagcaaatagaagctcagcctttgagtagcagctttggtagtatacaaaaatgaactgaaaataggaactcagcagtgttttaagatgacagattaaacaaacatcccaccagaaagaggtaatcacttagactaatttcctcatcccctaggataaaatcttaagtcagtgacttgaaaactattttgacccaatccattgagaaatgcatttttacattgcagcccagcacacacatatgtataactgaagcaagagttgtacttaacaatacttacttatccgtgtgttatgcatcttgatatttcttattctcttttaccccttcctctgtgtgtctgtgtgtattctttttccccccgatacacgtagttagcggttcagcgcaaacaagtacgattgtatcagcatgttaccctgcataagtgttgttgcaaacccgtttagagatgttcgccttaattagttatggtgagatgctttccgtattcaatcacagtctgacatcgcctagtataagcatgccggctgtttcatacgggccaggatgatgacttagatagtactaatattactacactttaggaaagttcatttcattttatttttaggaaggacactaatagagttccataaaagaaaagtctttagtgcatgttatttattattcagggtgtagatactattttaacttccacattctaaattatagtgtgggtatcaatctatgaagtaggtgctgacaagttgtcaacattactgacttttatggtgaagttttaaatttgaatttttattcaaatataaatgaaaagaccattttctcaggtaaaaaaatctatcatgctttgatgcttttcactttaattgaaaaaagactcattataaaagtacaatgcaagaaatatttagaaaaatattcctgatctccagttgttactgtacctagatttttcttgggacctatgtgataaaacttatcatgattcttgaagaaatagaagttcatacaactgttatcagaatttatataaaatgtttctcagaaaatgtggtttctccagctcgaacattctataactctaagccaaattgaaagagcagattgatgggataaaacacaaagtatggaaataaataataaactgctaccctgaaaaagcctacctctgcacattgtttaaaaattggaaaaaatcctacttctgtgttctgatattcaatgcaagtcattagagtaaggtgagactcttcctgtggattcagattgaaatcagggacggtgtagggaggccatggtcaacttttgagctacccttgagggaagaaattaattgatcaaatattaactgcccaagtatattcacaggatggccatccagtaatgagaatgaacagtctccaactaaaggcaacaatatagatgaatctcggaaacatgatattgaccagacagaaaagattccacttacataaacttcaaaagaagataaaactgatctatgacattaatagtcagaatattcattatccttgagggaactaaactgggaagccacatgatagggcatctggaagctagtaatgtcctctttcttgatctgttacattggtgtgtttatttcattagatttattgagctatacatttaccaccgtgtacttgtctctgtatatgttttgcattgaaataaattttaccaataaaatgataaagcaaaataaagcaaaaaaagctta

SEQ ID NO: 382358 - DNA, 1463 bp, Homo sapiens
gaagtggaaatctcagccattcagtgtttgggtgaagacggaggcgggttctggacagacctacgctgtcggggagtgtttacttcgcctccacttctgttcctccccgccctggtgctgctccaggtcacatactcttcctgagccggcttcagcctctccgcgcagaagtctcccggagccatggcctagtattcttatgtgaagtctaccaagcttgtgctcaagggaaccgaggtgaagagctgggtcctgcagctccggcgggagcctcctcagttcttttcggacgcactccacccccgcgaatccggtggaagccgtgatgcggagagccggcttcgtggcctcccaggcttcgctctgaccctgtctgggctggatggaggccggaccgcccttcctggcgcctgtgcagagaggggcagcctcctgcgcggacgaccctggaaacaggatagacgggcgggtgacccgtgaccccgtacccacgagtttgggtcccttgaggcatctctccaggcctctgcctgatttgcctgaggttgactgtacatgcaaatattgagctttcctcctggcctccgtgataaacagaagttttgatattgttaggcgagatggaaagaaagtatcaaggagtgagctgaagccactgcccttgagaaccctctcgaggagtctggcctcatgaagatgccagaataaatggcagtaagaagaaaaagagcaaagataagaagagaaaaagagaagatgaagaaacccagcttgatatgttgaggaacgcagctgctcaccagcaacggaacaaagctggacggagaatgactttgaagagctgagagaaggcttcagacgatcaaattactctgagctacgggaggacattcaaaccaaaggcaaagaagttgaaaactttgaaaaaaataaatgtacattaattaacgtgaatcgccctgaaacctggctatggaaaatatcttagtataaattcagatgaacttgttgttggcgttcagatgcaattggaccaagagaacaatgggaaccagtctttcaaaatgtgagtgctgttattgtttataaaaacttcctgtcagtttaacacaaagtctgtagcagtcaataataatatatttaaaaagaaaaagtaggatgcaatagtacaatacattaaattggaataaatcagtaagaacacagagccttaaagagatctcaaaatatagtgcaacaaaaatagctttagtacttttgcccacaattatttctgtatacccttagtgcccgatatggatctcatttccattgaagaaccagtcaattttaggtcacagagtaggaaaacagaatcgttcctaagtatcttctttgtggcagaaatcatggatgctttcagaaactttagagactgtaagcgaacagtagagctagctaataccaagttgtgacaatttgct

SEQ ID NO: 382359 - DNA, 1621 bp, Homo sapiens
gaagtggaaatctcagccattcagtgtttgggtgaagacggaggcgggttctggacagacctacgctgtcggggagtgtttacttcgcctccacttctgttcctccccgccctggtgctgctccaggtcacatactcttcctgagccggcttcagcctctccgcgcagaagtctcccggagccatggcctagtattcttatgtgaagtctaccaagcttgtgctcaagggaaccgaggtgaagagctgggtcctgcagctccggcgggagcctcctcagttcttttcggacgcactccacccccgcgaatccggtggaagccgtgatgcggagagccggcttcgtggcctcccaggcttcgctctgaccctgtctgggctggatggaggccggaccgcccttcctggcgcctgtgcagagaggggcagcctcctgcgcggacgaccctggaaacaggatagacgggcgggtgacccgtgaccccgtacccacgagtttgggtcccttgaggcatctctccaggcctctgcctgatttgcctgaggttgactgtacatgcaaatattgagctttcctcctggcctccgtgataaacagaagttttgatattgttaggcgagatggaaagaaagtatcaaggagtgagctgaagccactgcccttgagaaccctctcgaggagtctggcctcatgaagatgccagaataaatggcagtaagaagaaaaagagcaaagataagaagagaaaaagagaagatgaagaaacccagcttgatatgttgaggaacgcagctgctcaccagcaacggaacaaagctggacggagaatgactttgaagagctgagagaaggcttcagacgatcaaattactctgagctacgggaggacattcaaaccaaaggcaaagaagttgaaaactttgaaaaaaataaatgtacattaattaacgtggaatctggtgaacagtaacaaactttggtgaaatttcaggaaccatagccattgaagtggatgagggaacctatatacatgcactcaacaatggtctttttaccctgggagctccacacaaagaagaatcgccctgaaacctggctatggaaaatatcttagtataaattcagatgaacttgttgttggcgttcagatgcaattggaccaagagaacaatgggaaccagtctttcaaaatggtgcctgtgcagcagtattcactgtgataggaagtgagaagcagtctgagtgttcattgctgagggaatcaagggcaaaatatcatggatgcactcatggacaaataagcagcagtttgaagcaacaccctagatggatgtacagccatcaagaggatcttaaagtgtggtctttagtggaaaaaaagcagaagcaatgtatgggagactgagtaattacatatgagctcacatcactatctcttccaccactgtcatccatcatgactgatctgggagatgaaacagcacagatctaaaggacgtggtaagaatcgagatcaccagagatcagtagatacttgcatacttggaggattaacactgtctggattccaacgatcagctgagtatgttcaagataaagctatagtacatattttagattg

SEQ ID NO: 382360 - DNA, 1293 bp, Homo sapiens
gaagtggaaatctcagccattcagtgtttgggtgaagacggaggcgggttctggacagacctacgctgtcggggagtgtttacttcgcctccacttctgttcctccccgccctggtgctgctccaggtcacatactcttcctgagccggcttcagcctctccgcgcagaagtctcccggagccatggcctagtattcttatgtgaagtctaccaagcttgtgctcaagggaaccgaggtgaagagctgggtcctgcagctccggcgggagcctcctcagttcttttcggacgcactccacccccgcgaatccggtggaagccgtgatgcggagagccggcttcgtggcctcccaggcttcgctctgaccctgtctgggctggatggaggccggaccgcccttcctggcgcctgtgcagagaggggcagcctcctgcgcggacgaccctggaaacaggatagacgggcgggtgacccgtgaccccgtacccacgagtttgggtcccttgaggcatctctccaggcctctgcctgatttgcctgaggttgactgtacatgcaaatattgagctttcctcctggcctccgtgataaacagaagttttgatattgttaggcgagatggaaagaaagtatcaaggagtgagctgaagccactgcccttgagaaccctctcgaggagtctggcctcatgaagatgccagaataaatggcagtaagaagaaaaagagcaaagataagaagagaaaaagagaagatgaagaaacccagcttgatatgttgaatcgccctgaaacctggctatggaaaatatcttagtataaattcagatgaacttgttgttggcgttcagatgcaattggaccaagagaacaatgggaaccagtctttcaaaatgtgagtgctgttattgtttataaaaacttcctgtcagtttaacacaaagtctgtagcagtcaataataatatatttaaaaagaaaaagtaggatgcaatagtacaatacattaaattggaataaatcagtaagaacacagagccttaaagagatctcaaaatatagtgcaacaaaaatagctttagtacttttgcccacaattatttctgtatacccttagtgcccgatatggatctcatttccattgaagaaccagtcaattttaggtcacagagtaggaaaacagaatcgttcctaagtatcttctttgtggcagaaatcatggatgctttcagaaactttagagactgtaagcgaacagtagagctagctaataccaagttgtgacaatttgct

SEQ ID NO: 382361 - DNA, 1140 bp, Homo sapiens
gaagtggaaatctcagccattcagtgtttgggtgaagacggaggcgggttctggacagacctacgctgtcggggagtgtttacttcgcctccacttctgttcctccccgccctggtgctgctccaggtcacatactcttcctgagccggcttcagcctctccgcgcagaagtctcccggagccatggcctagtattcttatgtgaagtctaccaagcttgtgctcaagggaaccgagatttgcctgaggttgactgtacatgcaaatattgagctttcctcctggcctccgtgataaacagaagttttgatattgttaggcgagatggaaagaaagtatcaaggagtgagctgaagccactgcccttgagaaccctctcgaggagtctggcctcatgaagatgccagaataaatggcagtaagaagaaaaagagcaaagataagaagagaaaaagagaagatgaagaaacccagcttgatatgttgaggaacgcagctgctcaccagcaacggaacaaagctggacggagaatgactttgaagagctgagagaaggcttcagacgatcaaattactctgagctacgggaggacattcaaaccaaaggcaaagaagttgaaaactttgaaaaaaataaatgtacattaattaacgtgaatcgccctgaaacctggctatggaaaatatcttagtataaattcagatgaacttgttgttggcgttcagatgcaattggaccaagagaacaatgggaaccagtctttcaaaatgatggccatccagtaatgagaatgaacagtctccaactaaaggcaacaatatagatgaatctcggaaacatgatattgaccagacagaaaagattccacttacataaacttcaaaagaagataaaactgatctatgacattaatagtcagaatattcattatccttgagggaactaaactgggaagccacatgatagggcatctggaagctagtaatgtcctctttcttgatctgttacattggtgtgtttatttcattagatttattgagctatacatttaccaccgtgtacttgtctctgtatatgttttgcattgaaataaattttaccaataaaatgataaagcaaaataaagcaaaaaaagctta

SEQ ID NO: 382362 - DNA, 1310 bp, Homo sapiens
gaagtggaaatctcagccattcagtgtttgggtgaagacggaggcgggttctggacagacctacgctgtcggggagtgtttacttcgcctccacttctgttcctccccgccctggtgctgctccaggtcacatactcttcctgagccggcttcagcctctccgcgcagaagtctcccggagccatggcctagtattcttatgtgaagtctaccaagcttgtgctcaagggaaccgaggtgaagagctgggtcctgcagctccggcgggagcctcctcagttcttttcggacgcactccacccccgcgaatccggtggaagccgtgatgcggagagccggcttcgtggcctcccaggcttcgctctgaccctgtctgggctggatggaggccggaccgcccttcctggcgcctgtgcagagaggggcagcctcctgcgcggacgaccctggaaacaggatagacgggcgggtgacccgtgaccccgtacccacgagtttgggtcccttgaggcatctctccaggcctctgcctggcgagatggaaagaaagtatcaaggagtgagctgaagccactgcccttgagaaccctctcgaggagtctggcctcatgaagatgccagaataaatggcagtaagaagaaaaagagcaaagataagaagagaaaaagagaagatgaagaaacccagcttgatatgttggaatctggtgaacagtaacaaactttggtgaaatttcaggaaccatagccattgaagtggatgagggaacctatatacatgcactcaacaatggtctttttaccctgggagctccacacaaagaagaatcgccctgaaacctggctatggaaaatatcttagtataaattcagatgaacttgttgttggcgttcagatgcaattggaccaagagaacaatgggaaccagtctttcaaaatgatggccatccagtaatgagaatgaacagtctccaactaaaggcaacaatatagatgaatctcggaaacatgatattgaccagacagaaaagattccacttacataaacttcaaaagaagataaaactgatctatgacattaatagtcagaatattcattatccttgagggaactaaactgggaagccacatgatagggcatctggaagctagtaatgtcctctttcttgatctgttacattggtgtgtttatttcattagatttattgagctatacatttaccaccgtgtacttgtctctgtatatgttttgcattgaaataaattttaccaataaaatgataaagcaaaataaagcaaaaaaagctta

SEQ ID NO: 382363 - DNA, 1285 bp, Homo sapiens
taatttttttctaagctaatatgtagagtgaaaccaggatgaatcacacagtggttgaggtgtatatggactttgatagggatatgggctggaacctgcactctgtcatttactaattttgtaatttgtggcaaattggttaatatgtctgaacttccatttactcattaagagatcaagtatctttgaacctccgtttacacatttatactttcagaccattttttatacctttagaagactgtgacgattaaatgagagaacatacatgcagtaaataaattgagccaaatgtgaggaggaggttgtagtggtaatttattagctctttaggagaaaaatacctgtgcattcatatccccgcttcttttataactggcagatttgcctgaggttgactgtacatgcaaatattgagctttcctcctggcctccgtgataaacagaagttttgatattgttaggcgagatggaaagaaagtatcaaggagtgagctgaagccactgcccttgagaaccctctcgaggagtctggcctcatgaagatgccagaataaatggcagtaagaagaaaaagagcaaagataagaagagaaaaagagaagatgaagaaacccagcttgatatgttgaggaacgcagctgctcaccagcaacggaacaaagctggacggagaatgactttgaagagctgagagaaggcttcagacgatcaaattactctgagctacgggaggacattcaaaccaaaggcaaagaagttgaaaactttgaaaaaaataaatgtacattaattaacgtgaatcgccctgaaacctggctatggaaaatatcttagtataaattcagatgaacttgttgttggcgttcagatgcaattggaccaagagaacaatgggaaccagtctttcaaaatgatggccatccagtaatgagaatgaacagtctccaactaaaggcaacaatatagatgaatctcggaaacatgatattgaccagacagaaaagattccacttacataaacttcaaaagaagataaaactgatctatgacattaatagtcagaatattcattatccttgagggaactaaactgggaagccacatgatagggcatctggaagctagtaatgtcctctttcttgatctgttacattggtgtgtttatttcattagatttattgagctatacatttaccaccgtgtacttgtctctgtatatgttttgcattgaaataaattttaccaataaaatgataaagcaaaataaagcaaaaaaagctta

SEQ ID NO: 382364 - DNA, 958 bp, Homo sapiens
gaagtggaaatctcagccattcagtgtttgggtgaagacggaggcgggttctggacagacctacgctgtcggggagtgtttacttcgcctccacttctgttcctccccgccctggtgctgctccaggtcacatactcttcctgagccggcttcagcctctccgcgcagaagtctcccggagccatggcctagtattcttatgtgaagtctaccaagcttgtgctcaagggaaccgagtaagaagaaaaagagcaaagataagaagagaaaaagagaagatgaagaaacccagcttgatatgttgaggaacgcagctgctcaccagcaacggaacaaagctggacggagaatgactttgaagagctgagagaaggcttcagacgatcaaattactctgagctacgggaggacattcaaaccaaaggcaaagaagttgaaaactttgaaaaaaataaatgtacattaattaacgtgaatcgccctgaaacctggctatggaaaatatcttagtataaattcagatgaacttgttgttggcgttcagatgcaattggaccaagagaacaatgggaaccagtctttcaaaatgatggccatccagtaatgagaatgaacagtctccaactaaaggcaacaatatagatgaatctcggaaacatgatattgaccagacagaaaagattccacttacataaacttcaaaagaagataaaactgatctatgacattaatagtcagaatattcattatccttgagggaactaaactgggaagccacatgatagggcatctggaagctagtaatgtcctctttcttgatctgttacattggtgtgtttatttcattagatttattgagctatacatttaccaccgtgtacttgtctctgtatatgttttgcattgaaataaattttaccaataaaatgataaagcaaaataaagcaaaaaaagctta

SEQ ID NO: 382365 - DNA, 806 bp, Homo sapiens
ctcccaagtagctggtattacatgtgcacaccaccatgcccagctaactttttaaattttttgtaaagatggggtctcactatgttgtccaggctgatcttgaacttcttgcctcaagcacttctcccattggcttcccaaagcacagagattacaggagtgagtcaccactcagccacatgcatcttttgaacacttggaatatgtccagtctggaattttagatatgtacacacccacacacatacacatgtcctgttttgatgtcctataattaattttctcttagtttttaacttttatctatcttattaatgtacagaatcgccctgaaacctggctatggaaaatatcttagtataaattcagatgaacttgttgttggcgttcagatgcaattggaccaagagaacaatgggaaccagtctttcaaaatgatggccatccagtaatgagaatgaacagtctccaactaaaggcaacaatatagatgaatctcggaaacatgatattgaccagacagaaaagattccacttacataaacttcaaaagaagataaaactgatctatgacattaatagtcagaatattcattatccttgagggaactaaactgggaagccacatgatagggcatctggaagctagtaatgtcctctttcttgatctgttacattggtgtgtttatttcattagatttattgagctatacatttaccaccgtgtacttgtctctgtatatgttttgcattgaaataaattttaccaataaaatgataaagcaaaataaagcaaaaaaagctta

SEQ ID NO: 382366 - DNA, 1155 bp, Homo sapiens
gaagtggaaatctcagccattcagtgtttgggtgaagacggaggcgggttctggacagacctacgctgtcggggagtgtttacttcgcctccacttctgttcctccccgccctggtgctgctccaggtcacatactcttcctgagccggcttcagcctctccgcgcagaagtctcccggagccatggcctagtattcttatgtgaagtctaccaagcttgtgctcaagggaaccgagatttgcctgaggttgactgtacatgcaaatattgagctttcctcctggcctccgtgataaacagaagttttgatattgttaggcgagatggaaagaaagtatcaaggagtgagctgaagccactgcccttgagaaccctctcgaggagtctggcctcatgaagatgccagaataaatggcagtaagaagaaaaagagcaaagataagaagagaaaaagagaagatgaagaaacccagcttgatatgttggaatctggtgaacagtaacaaactttggtgaaatttcaggaaccatagccattgaagtggatgagggaacctatatacatgcactcaacaatggtctttttaccctgggagctccacacaaagaagaatcgccctgaaacctggctatggaaaatatcttagtataaattcagatgaacttgttgttggcgttcagatgcaattggaccaagagaacaatgggaaccagtctttcaaaatggtgcctgtgcagcagtattcactgtgataggaagtgagaagcagtctgagtgttcattgctgagggaatcaagggcaaaatatcatggatgcactcatggacaaataagcagcagtttgaagcaacaccctagatggatgtacagccatcaagaggatcttaaagtgtggtctttagtggaaaaaaagcagaagcaatgtatgggagactgagtaattacatatgagctcacatcactatctcttccaccactgtcatccatcatgactgatctgggagatgaaacagcacagatctaaaggacgtggtaagaatcgagatcaccagagatcagtagatacttgcatacttggaggattaacactgtctggattccaacgatcagctgagtatgttcaagataaagctatagtacatattttagattg

SEQ ID NO: 382367 - DNA, 761 bp, Homo sapiens
tgcgccccgaggtcacctatgagagaaggctgccgggttctcgatggcccattctgccaggtagagggcagcatctcatgtgaccaggcctgtgatgtcgtgggagatgatggctgtgctctcggagagtgtgactgagcctcccgagggctgcaccaagagagggcgagagagtcagtccagcaatcagaaggcaagtggcttagaagacaagtagccatccaccacatggctgaataaaccatgacaggaccaatcgccactcagcaatgagaagcagctaactgttgacatgccaacagcttgcacgggcctcaagggtgtcacgtggcatgaaagacactcatctcaggccacacaggattccattcatcgaacattcctgagacaacggaattctggtgatggagcacaggtcagtggtggccaggggccaggtgtggctatgaaggggtggctgccttgtgatgattcaatatgctatgtttttcctttgtggttttctgtatctatgttttatcttattttcttttgagctctgtcacccaggctggagtcagtggcacaatcttggctcactgcaacctctgcctcctgggttcaagcaattctcctgcctcagctgcccaagtaggtgcaactacaggcatgtgccaccatgtgtggctaatttttccacttttttttgagacagagtttccctctcgttgcccaggcaggagtgcaatggcgtgatcttggctcactacaacctccacctc

SEQ ID NO: 382368 - DNA, 552 bp, Homo sapiens
  misc_feature (547)..(547): n is a, c, g, or t
tttggttcctgtgtgctgaaaacagaaggcagtgttttgagcagttgactttgcaggccagggtctctaggaaagttggggtgagtgaagctttgttcctgaccacagaggacacgatcttgagaacccctctctctacagcagaggaacccaccttcttggcttttcttcaccccttattttattgaggaaagattccctaaatgttacatgggtgaatatggtatagggctagttacacagttatataaacaaattctatttcttacatgcattgtgtaaaattttttttttttttgagacagactctcattctgtcgcccaggctggtgtgcaatagcacgatcttggctcactgcaacctctgcctcccaggttcaagagattctcctgcctcagcctcctgagtagttgggattacaggcatgcgtcaccacacccggcctcctgaattaacattttcctaaaagacgccggcgtgctatcctgaaagctgccagaggtgtcttggctgcattggtggtaataaaattcatactcataaaanacttt

SEQ ID NO: 382369 - DNA, 680 bp, Homo sapiens
ggtggaagggttgcctcaacccaggtttgaaaccagactgggcaacatagtgagacttccatctccacaaaaaattagccgggcatggtgacacatgcctgtagtcctagctacttgagaggctgaggaaggaggactgcttgagcctgggaggtcaaggctgcagtgagtcatgtttgtgccactgcactccagccagggcaactgagcaaggctctgcctcaaaaaaataataataattcccttttatagcaggtagtattccattgtatggatatactacaatttgtttgtgtactcactcattgataaatatttgggatgtttccagtttagggctattacaaataaaactccagtagtctcttggtatacctggaggattggttctatgactgcccaagggtaccaaaatttgcttgaagtccggcagtttgtctgtggaaactgcctatagaaaaagttgggttttgcatcctgcaaatactgtctttttgatctgcttggttgaaaaaaatgcacatataagtggatccgtgcagttcaaacctgagttgttcaacagtcagctgacactgtgaacatttgtgtacaagtatttgtatgaacataggctttcttttccctaggtaaatacctaggagtgaaatgactgaataaaatgaaagtgtatggtaact

SEQ ID NO: 382370 - DNA, 397 bp, Homo sapiens
ggggtttcaccgtgttagccaagatggtctcagtctcctgccgtcgtgatccgcccgcctcggcctcctgaagtgttgggattacaggcgtgagccaccgctcccggcctattggctagctttatcttcagttaggttgtgttttcaaagaaaggaaaacagggcaactgtgttcattttctaaacccttgcctttcctactgtatctaatcctttttctctccttatctccaatctaaataatgtctagagaaatatgttgcaaaggtgggttaagtatacaaaattttccattatgttttatccctgttgtttctgttgtttctgagggcttgtgtttgttaacctcagcttgtgttttcatctttgttttcttatttcatgttatcttcggatg

SEQ ID NO: 382371 - DNA, 989 bp, Homo sapiens
  misc_feature (10)..(10): n is a, c, g, or t
agcgggtcanatgatggacatgatataatgaaacaacattgtggagaggaaagcattaggggagcccacggctacaaaaacaagtgagtgagaagaggtgggaggaagagaaactacgccacctcccctgcagccgagtgcacgcagcagcctggcgtgacaagtgggcgacgccggggggcagggagccggggtccttggccctggccggggaccccaccgcccaccgcgcggaggacaacttttagccggcagcccagaccagcgcggcacctgtctccggagtctccaccgctcctcccgattcatcccagggaaattctcaagaatacgctctacaaatctacgtgcgcatcattttcacctcgcgtcgcgcccgggaggaaggaacgaggcaaggagctaaagcagcgtgcgttcagccctggggcattttattaatgcttttacgagttagaagagttgggataatttgccatctggagtttctctgccttgctgatctgagctcagacctgccaatttaccagagataattgataacaccctgtaacagctgagaggaaaatggaagaaacggagatacttttagtgaagcagaataaaccactgaacaggaaaaatgaggaagctgtgagtaccagtggaaggaacgagccaggaagagggactggaaccatctcagaagccatgcccctcaggctggaacttgccctgtctcctcgcagatgaggtaggaggctcagcacgggctggtgggagcagcccacagcagcagtgagggtcagtgggcctgtgagttaagaagaaggtggcacagagcgagggtctctggatcctgactgtttgacttttccatgattaggataagtagccagggcttggctagttggagagttactcgaacctcaggtgacagttgtaaggcagcacatagtgaaaaagagtcctagcctgggaaagtccaaaaccttaggtctggtttcagt

SEQ ID NO: 382372 - DNA, 1055 bp, Homo sapiens
  misc_feature (10)..(10): n is a, c, g, or t
agcgggtcanatgatggacatgatataatgaaacaacattgtggagaggaaagcattaggggagcccacggctacaaaaacaagtgagtgagaagaggtgggaggaagagaaactacgccacctcccctgcagccgagtgcacgcagcagcctggcgtgacaagtgggcgacgccggggggcagggagccggggtccttggccctggccggggaccccaccgcccaccgcgcggaggacaacttttagccggcagcccagaccagcgcggcacctgtctccggagtctccaccgctcctcccgattcatcccagggaaattctcaagaatacgctctacaaatctacgtgcgcatcattttcacctcgcgtcgcgcccgggaggaaggaacgaggcaaggagctaaagcagcgtgcgttcagccctggggcattttattaatgcttttacgagttagaagagttgggataatttgccatctggagtttctctgccttgctgatctgagctcagacctgccaatttaccagagataattgataacaccctgtaacagctgagaggaaaatggaagaaacggagatacttttagtgaagcagaataaaccactgaacaggaaaaatgaggaagctgtgagtaccagtggaaggaacgagccaggaagagggactggaaccatctcagaagccatgcccctcaggctggaacttgccctgtctcctcgcagatgagctacctcttgtgtttaagaattaagggaagatgagctaggaatcaagaaatacgcagaactgattcctgtcactggcgccaccctgccacttgcccagagctgtggtataaatttttttaataggctgaaataaaaatatgaatagcattttggtgttaagcattaaattgataaaggctatgagatacacctgctctcaaccatgttaatttttattattggtattaataaattattacttactaacatattaacaagaattgcattgagaaacaaagcatccacaggccaaatcttctgaatttcaaatgtttatattaa

SEQ ID NO: 382373 - DNA, 1118 bp, Homo sapiens
  misc_feature (10)..(10): n is a, c, g, or t
agcgggtcanatgatggacatgatataatgaaacaacattgtggagaggaaagcattaggggagcccacggctacaaaaacaagtgagtgagaagaggtgggaggaagagaaactacgccacctcccctgcagccgagtgcacgcagcagcctggcgtgacaagtgggcgacgccggggggcagggagccggggtccttggccctggccggggaccccaccgcccaccgcgcggaggacaacttttagccggcagcccagaccagcgcggcacctgtctccggagtctccaccgctcctcccgattcatcccagggaaattctcaagaatacgctctacaaatctacgtgcgcatcattttcacctcgcgtcgcgcccgggaggaaggaacgaggcaaggagctaaagcagcgtgcgttcagccctggggcattttattaatgcttttacgagttagaagagttgggataatttgccatctggagtttctctgccttgctgatctgagctcagacctgccaatttaccagagataattgataacaccctgtaacagctgagaggaaaatggaagaaacggagatacttttagtgaagcagaataaaccactgaacagtctgtttcatcttcataaaaacgctgctttcagtgcactggatttattttacaacccactaatggattaccctacagtttgaaaaacattgcgttagaccagtttgactgttgtcaagaaccaaaaaaggaaaaatgaggaagctgtgagtaccagtggaaggaacgagccaggaagagggactggaaccatctcagaagccatgcccctcaggctggaacttgccctgtctcctcgcagatgaggtaggaggctcagcacgggctggtgggagcagcccacagcagcagtgagggtcagtgggcctgtgagttaagaagaaggtggcacagagcgagggtctctggatcctgactgtttgacttttccatgattaggataagtagccagggcttggctagttggagagttactcgaacctcaggtgacagttgtaaggcagcacatagtgaaaaagagtcctagcctgggaaagtccaaaaccttaggtctggtttcagt

SEQ ID NO: 382374 - DNA, 1306 bp, Homo sapiens
  misc_feature (10)..(10): n is a, c, g, or t
agcgggtcanatgatggacatgatataatgaaacaacattgtggagaggaaagcattaggggagcccacggctacaaaaacaagtgagtgagaagaggtgggaggaagagaaactacgccacctcccctgcagccgagtgcacgcagcagcctggcgtgacaagtgggcgacgccggggggcagggagccggggtccttggccctggccggggaccccaccgcccaccgcgcggaggacaacttttagccggcagcccagaccagcgcggcacctgtctccggagtctccaccgctcctcccgattcatcccagggaaattctcaagaatacgctctacaaatctacgtgcgcatcattttcacctcgcgtcgcgcccgggaggaaggaacgaggcaaggagctaaagcagcgtgcgttcagccctggggcattttattaatgcttttacgagttagaagagttgggataatttgccatctggagtttctctgccttgctgatctgagctcagacctgccaatttaccagagataattgataacaccctgtaacagctgaagacagagtcttaccctgtcacccaggctggagtacaatggtgcgatctcggctcactgcaacctctgcctcctgggttcaagtgattcttttgcctcagcctcctgagtagctgggactacaggaggaaaatggaagaaacggagatacttttagtgaagcagaataaaccactgaacaggaaaaatgaggaagctgtgagtaccagtggaaggaacgagccaggaagagggactggaaccatctcagaagccatgcccctcaggctggaacttgccctgtctcctcgcagatgaggacaagtcctgcgcttggggatcctctgtacgcccgttcactgctaccatactgggaactgcccaatggagaggcccacattccacaaggaactgatgtcttcagccaatacctcgccaggacctgaggcctgctgagagtcacgagtggccttcgtgggtcctctctcaacgagcttgcaggtgaccactgcgccagccaaaaccttgatggcagcctatgagtgagtgaccctgagccagaagacccagttaagccatgcccaggatcctgacctgcagaaactatgacataataaatttattgttttatgccactaacttttggggttacttatgcagcaatagatagctaatacagctcatagtatccttatctagcctcaaacattctgcctttagtatctaactttcctaactttttagataaacttttttgggggggataat

SEQ ID NO: 382375 - DNA, 861 bp, Homo sapiens
agcggactggaatcagcaactccctggaactcgggcctctggccccgtccctcttttctccggcagggacgcaggatgccttggtgcactctagagacggggaccggagggtgcagcgcgcctgggtggggcgaagggcgccggtctcctcacgccctctgactttaggataccagacagtgtctcttcaaccccaccccaggcgcaggtttccagaaggcggggtgggtggggcccccgatttccagaaggcgagttacctagcaggtgtgtggggtgggcattgctattcggagaaaaatcaagacgttcccttcagtcctccctcggtgttaacgtctgctccagctcgcagcccgctgctgggaggaaaatggaagaaacggagatacttttagtgaagcagaataaaccactgaacaggaaaaatgaggaagctgtgagtaccagtggaaggaacgagccaggaagagggactggaaccatctcagaagccatgcccctcaggctggaacttgccctgtctcctcgcagatgagctacctcttgtgtttaagaattaagggaagatgagctaggaatcaagaaatacgcagaactgattcctgtcactggcgccaccctgccacttgcccagagctgtggtataaatttttttaataggctgaaataaaaatatgaatagcattttggtgttaagcattaaattgataaaggctatgagatacacctgctctcaaccatgttaatttttattattggtattaataaattattacttactaacatattaacaagaattgcattgagaaacaaagcatccacaggccaaatcttctgaatttcaaatgtttatattaa

SEQ ID NO: 382376 - DNA, 421 bp, Homo sapiens
ctggccctgggaagacccagctttgagcctcaggttgtgtctaatcatctctctgtccttgggccagtcaactcacctgttcgtgctgccacagagacagaggggccacatcagagagaaagactctacagcttgcccagagtcgagcttaaatggagcagcatgatttttgtctgaaaagtctgagatgggaccagtggaaaggtgtgcattttaagaaggatttgcttccccatcttgtgctttctgtgtcttgcagcacgacctggccctccacctaggaatcataccttcatcccccatactcataagcatcctcattcctgtttccttgtggatgtcatggtctgctgtgaagtctgcttggtgacccgtccagacctgacttggtataaatgattttgttgcagagaataacaaa

SEQ ID NO: 382377 - DNA, 420 bp, Homo sapiens
tttcatttgtaatctatccctgttaatctgttaatattttcaggtaagccttgaaaatactggttttcatcaaattctaagtagttttaaagtatataatgcatctcagttttgtatactttaaaccacttaataaattatatactagctttatttcaaatagctacctattcaaaacataggtagttttttccaaaagacccccttgaaacatgagactgagctgctgcaccgccagtgtcctgcggatattttctagcgtagattttgcttcctggtggagtgggagcaaacaaaaaaatacataaataaaaagaaaacacttgcacgtcgtattgaaataattcatgggtctctctttccaaccagatttaaatttcaatgacaggtataggaatctactcctggattgtcttccta

SEQ ID NO: 382378 - DNA, 365 bp, Homo sapiens
atagtcaaattttaaatattttcttttatggttgttatttagtgttacttagaaaagccttccttactacatggttttaaaggaatttttctcccatgcttttatctgagaaattatgagcatcttttttgaaacctaaaacttttatccatttgcaataggtattctcccagttgtcttttttctctataagatttattgaataatcttatcttttcattactgattgaggtgccaccttgattttgtcctttgtgtacttgagactgtttctgaattcttctctaatcttttccagttgtctgtttattaaccagtaccatattatattattatgataggtagttattattatattattgagg

SEQ ID NO: 382379 - DNA, 282 bp, Homo sapiens
aagtgtgtgccactgtggccagctaaagactctggccatttaaggtaactattctcaggttctgagagaatagtgcacagacatcttcaggagtcaggattctgcctaccactgtaaccttttctgtcttcactgttttatccccattctcaaatgatgcctgccaccgcgcccagcctacttttatttttaaagacaggggtctttctatgttgagctcaggagttcgcgaccagcctggggcaacatagtaagacctcatttctatgttttttaattatt

SEQ ID NO: 382380 - DNA, 977 bp, Homo sapiens
aagtgtgtgccactgtggccagctaaagactctggccatttaaggtaactattctcaggttctgagagaatagtgcacagacatcttcaggagtcaggattctgcctaccactgtaaccttttctgtcttcactgttttatccccattctcaaatgatgcctgccacacactcaataaatactgatgggatgaaggaacctagataatagcaaagttgcatcagcttctctgtgctctctgtgccttacactcagtcggacttctctggggccaagtctggtagtagagggggatgtttaaaaggcaaaattctattaacagcttgttgggagaaaagatgactgttgggagagaagctgaggcagggcttgcatgtctgctagacttgctggttccttgcttctagcactcctgttatctcaagcagccatatgtttctcattcacttgatacactgtttcctttcaacccccacgtcctgaccacctgtttgtttgagcaccagtaaatagcgtgggctcccagagcttggggcctttgcagccttcacacttgtgatggccccctggtcccactttctctctcaaactgtgtttttctcaatcctttgattctgctggacttcttcacccccacgacctggtgttgggtctgatcaccccaacaacagcccatatgggggatggctggcagggatgcttcacccagaatcattttgacctggaatgctgggtctcatattttctacttgtcctggccatccaagcccatatcattggcaggcagatgtagatcatagaaaaatccttggaaacttgggggtcccagtaatgaatgggaatctgagacagaccaatcacactcttacaaaccaattcaaggtactctgaattcaactaaaccatggcactgtgactgctcagacaactgaacatgtgtattcagtatattccccaacaaaaccctgtaaaacatc

SEQ ID NO: 382381 - DNA, 874 bp, Homo sapiens
attatttttaatttattcaagggttttattataggaagcagacaagaaaaaatagaacttacttcacttgtttagtaaatgaatagcaaagcaagagtaagcatcagagtaaagtttatctttgggtgcctcctggtcaacttcctaactaaccaaaatgtctttctctcaggtgctgtgacatgtatatggatgaatgaacagtgtagcagtatcatcacaggaggggaagacagacaaattatattctggaaattgcagtattaagtgccttttcctctcctgaatattaaattgaactctatttaatgcatttttaaaccaaacttttaaacggactggtgaatgtgcaatgttagtaattagaagttttaccacatggaaaatttgtggttttaaactttctaaatcatggtgacttcattgaaagccattagttgctattctcttagggcagataaaatgcggctgtgttaggaaaaacatgttacactgtaaggcagatgatcgtccccgtatgatgattgtcagaagacaggactaagtagcagagaatagctaagagataaattgggctggggaaacttgtcagaaagcactgaacaattaagaaattttccaagaaaatgtgcagtattctctgctacttctgaatctgttttgtcttcctaatctatcacaattgccacccatcgggttttgggtgtgtgttttcatagcgtggttactttctataatgctgtacccagattctaagaacctggagaaggattagcagttcttagtaagtttactgtgtataggaacggtttgtatttcattacagctattcatcttttctacattaaaaatatttttctctaaaaaaaaaaaa

SEQ ID NO: 382382 - DNA, 3373 bp, Homo sapiens
gaattcgcctcgatggcgtttatccggaagaagcagcaggagcagcagctgcagctctactccaaggagagattttccttgctgctgcttaacttggaggagtactactttgaacagcatagagccaatcacattttgcacaagggcagtcaccatgaaaggaaaatcagaggctccttaaaaatatgttcaaaatcggtgatttttgaaccagattcaatatcccagcccatcatcaagattcctttgagagactgtataaaaataggaaagcatggagaaaatggagccaatagacacttcacaaaggcaaaatctgggggtatttcactcattttcagtcaggtatatttcattaaagaacataatgttgttgcaccatataaaatagaaaggggcaaaatggaatatgtttttgaattggatgttcccgggaaagtggaagatgttgtggagacgttgcttcagcttcacagagcatcctgccttgacaaattgggtgaccaaaccgccatgataacagctattttgcagtctcgtttagctagaacatcatttgacaaaaacaggttccaaaacatttctgaaaagctgcacatggaatgcaaagcagaaatggtgacgcctctggtgactaatcctggacacgtgtgcatcacggacacaaacctgtattttcagcccctcaacggctacccgaaacctgtggtccagataacactccaagatgtccgccgcatctacaaaaggaggcacggcctcatgcctctgggcttggaagtattttgcacagaagatgatctgtgttccgacatctacctaaagttctatgaacctcaagatagagatgatctctatttttacattgccacatacctagagcaccatgtggcggagcacactgctgagagctacatgctgcagtggcagcgtggacacctttccaactatcagtacctccttcacctcaacaacctggccgaccgcagctgcaacgacctctcccagtaccctgtgtttccatggataatacatgattattccagctcagaactagatttgtcaaatccaggaaccttccgggatctcagtaagccagtaggggccctaaataaggaacggctggagagactactgacacgctaccaggaaatgcctgaaccaaagttcatgtatgggagtcactactcttccccgggttatgtacttttttatcttgttaggattgcaccagagtatatgctgtgcctgcagaatggaagatttgataatgcagatagaatgttcaacagtattgcagaaacttggaaaaactgtctggatggtgcaacggattttaaagagttaattccagaattctatggtgatgatgtgagctttctagtcaatagcctgaagttggatttgggaaagagacaaggaggacagatggttgacgatgtggagcttcccccttgggcttccagtcccgaggactttctccagaagagcaaagatgcattggaaagcaattatgtgtctgaacaccttcacgagtggattgatctaatatttggctacaaacaaaaagggagtgatgcagttggggcccataatgtatttcatcccctgacctatgaaggaggtgtagacttgaacagcatccaggatcctgatgagaaggtagccatgcttacgcaaatcttggaatttgggcagacaccaaaacaactatttgtgacaccacatcctcgaaggatcaccccaaagtttaaaagtttgtcccagacctccagttataatgcttctatggcagattccccaggtgaagagtcttttgaagacctgaccgaagaaagcaaaacactggcctggaataacatcaccaaactgcagttacacgagcactataaaatccacaaagaagcagttactggaatcacggtctctcgcaatggatcttcagtattcacaacatcccaagattccaccttgaagatgttttctaaagaatcaaaaatgctacaaagaagtatatcattttcaaatatggctttatcgtcttgtttacttttaccaggagatgccactgtcataacttcttcatgggataataatgtctatttttattccatagcatttggaagacgccaggacacgttaatgggacatgatgatgctgttagtaagatctgttggcatgacaacaggctatattctgcatcgtgggactctacagtgaaggtgtggtctggtgttcctgcagagatgccaggcaccaaaagacaccactttgacttgctggccgagctggaacatgatgtcagtgtagatacaatcagtttaaatgctgcaagcacactgttagtttccggcaccaaagaaggcacagtgaatatttgggacctcacaacggccaccttaatgcaccagattccatgccattcagggattgtatgtgacactgcttttagcccagatagtcgccatgtcctcagcacaggaacagatggctgtcttaatgtcattgatgtgcagacaggaatgctcatctcctccatgacatcagatgagccccagaggtgctttgtctgggatggaaattccgttttatctggcagtcagtctggtgaactgctcgtttgggacctccttggagcaaaaatcagtgagagaatacagggccacacaggtgctgtgacatgtatatggatgaatgaacagtgtagcagtatcatcacaggaggggaagacagacaaattatattctggaaattgcagtattaagtgccttttcctctcctgaatattaaattgaactctatttaatgcatttttaaaccaaacttttaaacggactggtgaatgtgcaatgttagtaattagaagttttaccacatggaaaatttgtggttttaaactttctaaatcatggtgacttcattgaaagccattagttgctattctcttagggcagataaaatgcggctgtgttaggaaaaacatgttacactgtaaggcagatgatcgtccccgtatgatgattgtcagaagacaggactaagtagcagagaatagctaagagataaattgggctggggaaacttgtcagaaagcactgaacaattaagaaattttccaagaaaatgtgcagtattctctgctacttctgaatctgttttgtcttcctaatctatcacaattgccacccatcgggttttgggtgtgtgttttcatagcgtggttactttctataatgctgtacccagattctaagaacctggagaaggattagcagttcttagtaagtttactgtgtataggaacggtttgtatttcattacagctattcatcttttctacattaaaaatatttttctctaaaaaaaaaaaa

SEQ ID NO: 382383 - DNA, 1621 bp, Homo sapiens
aatcatggactggctgtgcttcaggcactttggcggctcactataatttattattcatagagttatctttctgagactgtcagttttaagctattttaaaacagcattacctttactttagcaatacttcatttcttcttgtattccctagcttataaagaatttaatttcatttttaaaataagttattccgtaggatgatgttgaaatacatctgcattagcaacaccggcatactgcacaatagagtttaatttatatcatgatgactacatatttgaatcagactcgagaaacatagctaatgaccataaatctaatggaatatgtatcaatgtgttttcttccttaggtagatacaatcagtttaaatgctgcaagcacactgttagtttccggcaccaaagaaggcacagtgaatatttgggacctcacaacggccaccttaatgcaccagattccatgccattcagggattgtatgtgacactgcttttagcccaggtagatattatcctttttaaaacagataatactaggtaaattggaattttgaaataaacaatattgttaattttgaaataaacaataaaacttacaaagaaaaacactatttgctgataaaagaggttttgccaatggctaacactgctttatgccagggtacagtatacttgtggcatttgtatcaggtagaaaagccggactgggtatttttaattcctcattagagaaattaatttaagataaaaatgaactcataatcaaagggtcatctcatccttacatcttggaaagggctagaaccatttcaaggagaggatagtcattgcttaagtacaaggattttgaagaaaacgaatgtggagattaggccactggactcagaaataaaatccagaataatgtaaaccacattctgaagctgtcactcatatctgagtctcaccttgtgttgcagatagtcgccatgtcctcagcacaggaacagatggctgtcttaatgtcattgatgtgcagacaggaatgctcatctcctccatgacatcagatgagccccagaggtatagtttgtgagttactgggggcgaagacatttacagacatgttcatgatcacttcatttgggcttacattggccagttcaacatatccttccttcatgatgaagaaaggactatttctaaatcattcttgcaggtgctttgtctgggatggaaattccgttttatctggcagtcagtctggtgaactgctcgtttgggacctccttggagcaaaaatcagtgagagaatacagggccacacaggtaagcagctactgcagttgccttgatctttgttctcaagataatgaactcaagcctgccttttccatcagggaacatactctttttgggcaaaaaacacccatggtttttccatgtcgtaaacatgtccctggagcctcttgattggccaggtgatctgcatctcgtaggttactcaggatttagatttatgttaacagccattggactccaaaaaggaagtctttaactttcatatggagaattaaaaaccatcgtaaagctattatttttcttaaaggtaatagcatgatcttaaatttttagaatagt

SEQ ID NO: 382384 - DNA, 697 bp, Homo sapiens
  misc_feature (23)..(23): n is a, c, g, or t
  misc_feature (113)..(113): n is a, c, g, or t
cccattttgttggtgtggacccntcgtcgatcggctcgtacccagtcgacgagactctctgaggttcccttttgttagtgggacactcagagagatggttagaactatgtggnaatgacaaacagaagttaatacaggtaaagtgtagaacagccccaagtgcataggaaatgctgctattgctatttccttagctgaaaataggtgaatttttttttcatatgtagtattgcagaaacttggaaaaactgtctggatggtgcaacggattttaaagaggtaagcagttaataaagctgatgagtaactggacttggggtttctaactgctttaaaacatgtttgttgttcttttttatttttccccgaaactttcagttaattccagaattctatggtgatgatgtgagctttctagtcaatagcctgaagttggatttgggaaagagacaaggaggacagatggttgacgatgtggagcttcccccttgggcttccagtgagtccccccttggaggtgttgtattatagacatgctttaccaagtagtgcaatttcagtaattattttattgcttagatttttaaaaatcacaatataattctctaaataaggatatatgagccctattccatatcagaagtattctatgagtctgtgatgtaaaaacattaatatatatttgagagaccttaat

SEQ ID NO: 382385 - DNA, 1791 bp, Homo sapiens
ccacgcgtcgccacgcgtcgcatcccctgacctatgaaggaggtgtagacttgaacagcatccaggatcctgatgagaaggtagccatgcttacgcaaatcttggaatttgggcagacaccaaaacaactatttgtgacaccacatcctcgaaggatcaccccaaagtttaaaagtttgtcccagacctccagttataatgcttctatggcagattccccaggtgaagagtcttttgaagacctgaccgaagaaagcaaaacactggcctggaataacatcaccaaactgcagttacacgagcactataaaatccacaaagaagcagttactggaatcacggtctctcgcaatggatcttcagtattcacaacatcccaagattccaccttgaagatgttttctaaagaatcaaaaatgctacaaagaagtatatcattttcaaatatggctttatcgtcttgtttacttttaccaggagatgccactgtcataacttcttcatgggataataatgtctatttttattccatagcatttggaagacgccaggacacgttaatgggacatgatgatgctgttagtaagatctgttggcatgacaacaggctatattctgcatcgtgggactctacagtgaaggtgtggtctggtgttcctgcagagatgccaggcaccaaaagacaccactttgacttgctggccgagctggaacatgatgtcagtgtagatacaatcagtttaaatgctgcaagcacactgttagtttccggcaccaaagaaggcacagtgaatatttgggacctcacaacggccaccttaatgcaccagattccatgccattcagggattgtatgtgacactgcttttagcccagatagtcgccatgtcctcagcacaggaacagatggctgtcttaatgtcattgatgtgcagacaggaatgctcatctcctccatgacatcagatgagccccagaggtgctttgtctgggatggaaattccgttttatctggcagtcagtctggtgaactgctcgtttgggacctccttggagcaaaaatcagtgagagaatacagggccacacaggtgctgtgacatgtatatggatgaatgaacagtgtagcagtatcatcacaggaggggaagacagacaaattatattctggaaattgcagtattaagtgccttttcctctcctgaatattaaattgaactctatttaatgcatttttaaaccaaacttttaaacggactggtgaatgtgcaatgttagtaattagaagttttaccacatggaaaatttgtggttttaaactttctaaatcatggtgacttcattgaaagccattagttgctattctcttagggcagataaaatgcggctgtgttaggaaaaacatgttacactgtaaggcagatgatcgtccccgtatgatgattgtcagaagacaggactaagtagcagagaatagctaagagataaattgggctggggaaacttgtcagaaagcactgaacaattaagaaattttccaagaaaatgtgcagtattctctgctacttctgaatctgttttgtcttcctaatctatcacaattgccacccatcgggttttgggtgtgtgttttcatagcgtggttactttctataatgctgtacccagattctaagaacctggagaaggattagcagttcttagtaagtttactgtgtataggaacggtttgtatttcattacagctattcatcttttctacattaaaaatatttttctctaaaaaaaaaaaa

SEQ ID NO: 382386 - DNA, 3966 bp, Homo sapiens
gaattcgcctcgatggcgtttatccggaagaagcagcaggagcagcagctgcagctctactccaaggagagattttccttgctgctgcttaacttggaggagtactactttgaacagcatagagccaatcacattttgcacaagggcagtcaccatgaaaggaaaatcagaggctccttaaaaatatgttcaaaatcggtgatttttgaaccagattcaatatcccagcccatcatcaagattcctttgagagactgtataaaaataggaaagcatggagaaaatggagccaatagacacttcacaaaggcaaaatctgggggtatttcactcattttcagtcaggtatatttcattaaagaacataatgttgttgcaccatataaaatagaaaggggcaaaatggaatatgtttttgaattggatgttcccgggaaagtggaagatgttgtggagacgttgcttcagcttcacagagcatcctgccttgacaaattgggtgaccaaaccgccatgataacagctattttgcagtctcgtttagctagaacatcatttgacaaaaacaggttccaaaacatttctgaaaagctgcacatggaatgcaaagcagaaatggtgacgcctctggtgactaatcctggacacgtgtgcatcacggacacaaacctgtattttcagcccctcaacggctacccgaaacctgtggtccagataacactccaagatgtccgccgcatctacaaaaggaggcacggcctcatgcctctgggcttggaagtattttgcacagaagatgatctgtgttccgacatctacctaaagttctatgaacctcaagatagagatgatctctatttttacattgccacatacctagagcaccatgtggcggagcacactgctgagagctacatgctgcagtggcagcgtggacacctttccaactatcagtacctccttcacctcaacaacctggccgaccgcagctgcaacgacctctcccagtaccctgtgtttccatggataatacatgattattccagctcagaactagatttgtcaaatccaggaaccttccgggatctcagtaagccagtaggggccctaaataaggaacggctggagagactactgacacgctaccaggaaatgcctgaaccaaagttcatgtatgggagtcactactcttccccgggttatgtacttttttatcttgttaggattgcaccagagtatatgctgtgcctgcagaatggaagatttgataatgcagatagaatgttcaacagtattgcagaaacttggaaaaactgtctggatggtgcaacggattttaaagagttaattccagaattctatggtgatgatgtgagctttctagtcaatagcctgaagttggatttgggaaagagacaaggaggacagatggttgacgatgtggagcttcccccttgggcttccagtcccgaggactttctccagaagagcaaagatgcattggaaagcaattatgtgtctgaacaccttcacgagtggattgatctaatatttggctacaaacaaaaagggagtgatgcagttggggcccataatgtatttcatcccctgacctatgaaggaggtgtagacttgaacagcatccaggatcctgatgagaaggtagccatgcttacgcaaatcttggaatttgggcagacaccaaaacaactatttgtgacaccacatcctcgaaggatcaccccaaagtttaaaagtttgtcccagacctccagttataatgcttctatggcagattccccaggtgaagagtcttttgaagacctgaccgaagaaagcaaaacactggcctggaataacatcaccaaactgcagttacacgagcactataaaatccacaaagaagcagttactggaatcacggtctctcgcaatggatcttcagtattcacaacatcccaagattccaccttgaagatgttttctaaagaatcaaaaatgctacaaagaagtatatcattttcaaatatggctttatcgtcttgtttacttttaccaggagatgccactgtcataacttcttcatgggataataatgtctatttttattccatagcatttggaagacgccaggacacgttaatgggacatgatgatgctgttagtaagatctgttggcatgacaacaggctatattctgcatcgtgggactctacagtgaaggtgtggtctggtgttcctgcagagatgccaggcaccaaaagacaccactttgacttgctggccgagctggaacatgatgtcagtgtagatacaatcagtttaaatgctgcaagcacactgttagtttccggcaccaaagaaggcacagtgaatatttgggacctcacaacggccaccttaatgcaccagattccatgccattcagggattgtatgtgacactgcttttagcccaggtagatattatcctttttaaaacagataatactaggtaaattggaattttgaaataaacaatattgttaattttgaaataaacaataaaacttacaaagaaaaacactatttgctgataaaagaggttttgccaatggctaacactgctttatgccagggtacagtatacttgtggcatttgtatcaggtagaaaagccggactgggtatttttaattcctcattagagaaattaatttaagataaaaatgaactcataatcaaagggtcatctcatccttacatcttggaaagggctagaaccatttcaaggagaggatagtcattgcttaagtacaaggattttgaagaaaacgaatgtggagattaggccactggactcagaaataaaatccagaataatgtaaaccacattctgaagctgtcactcatatctgagtctcaccttgtgttgcagatagtcgccatgtcctcagcacaggaacagatggctgtcttaatgtcattgatgtgcagacaggaatgctcatctcctccatgacatcagatgagccccagaggtatagtttgtgagttactgggggcgaagacatttacagacatgttcatgatcacttcatttgggcttacattggccagttcaacatatccttccttcatgatgaagaaaggactatttctaaatcattcttgcaggtgctttgtctgggatggaaattccgttttatctggcagtcagtctggtgaactgctcgtttgggacctccttggagcaaaaatcagtgagagaatacagggccacacaggtgctgtgacatgtatatggatgaatgaacagtgtagcagtatcatcacaggaggggaagacagacaaattatattctggaaattgcagtattaagtgccttttcctctcctgaatattaaattgaactctatttaatgcatttttaaaccaaacttttaaacggactggtgaatgtgcaatgttagtaattagaagttttaccacatggaaaatttgtggttttaaactttctaaatcatggtgacttcattgaaagccattagttgctattctcttagggcagataaaatgcggctgtgttaggaaaaacatgttacactgtaaggcagatgatcgtccccgtatgatgattgtcagaagacaggactaagtagcagagaatagctaagagataaattgggctggggaaacttgtcagaaagcactgaacaattaagaaattttccaagaaaatgtgcagtattctctgctacttctgaatctgttttgtcttcctaatctatcacaattgccacccatcgggttttgggtgtgtgttttcatagcgtggttactttctataatgctgtacccagattctaagaacctggagaaggattagcagttcttagtaagtttactgtgtataggaacggtttgtatttcattacagctattcatcttttctacattaaaaatatttttctctaaaaaaaaaaaa

SEQ ID NO: 382387 - DNA, 1875 bp, Homo sapiens
aatcatggactggctgtgcttcaggcactttggcggctcactataatttattattcatagagttatctttctgagactgtcagttttaagctattttaaaacagcattacctttactttagcaatacttcatttcttcttgtattccctagcttataaagaatttaatttcatttttaaaataagttattccgtaggatgatgttgaaatacatctgcattagcaacaccggcatactgcacaatagagtttaatttatatcatgatgactacatatttgaatcagactcgagaaacatagctaatgaccataaatctaatggaatatgtatcaatgtgttttcttccttaggtagatacaatcagtttaaatgctgcaagcacactgttagtttccggcaccaaagaaggcacagtgaatatttgggacctcacaacggccaccttaatgcaccagattccatgccattcagggattgtatgtgacactgcttttagcccaggtagatattatcctttttaaaacagataatactaggtaaattggaattttgaaataaacaatattgttaattttgaaataaacaataaaacttacaaagaaaaacactatttgctgataaaagaggttttgccaatggctaacactgctttatgccagggtacagtatacttgtggcatttgtatcaggtagaaaagccggactgggtatttttaattcctcattagagaaattaatttaagataaaaatgaactcataatcaaagggtcatctcatccttacatcttggaaagggctagaaccatttcaaggagaggatagtcattgcttaagtacaaggattttgaagaaaacgaatgtggagattaggccactggactcagaaataaaatccagaataatgtaaaccacattctgaagctgtcactcatatctgagtctcaccttgtgttgcagatagtcgccatgtcctcagcacaggaacagatggctgtcttaatgtcattgatgtgcagacaggaatgctcatctcctccatgacatcagatgagccccagaggtgctttgtctgggatggaaattccgttttatctggcagtcagtctggtgaactgctcgtttgggacctccttggagcaaaaatcagtgagagaatacagggccacacaggtgctgtgacatgtatatggatgaatgaacagtgtagcagtatcatcacaggaggggaagacagacaaattatattctggaaattgcagtattaagtgccttttcctctcctgaatattaaattgaactctatttaatgcatttttaaaccaaacttttaaacggactggtgaatgtgcaatgttagtaattagaagttttaccacatggaaaatttgtggttttaaactttctaaatcatggtgacttcattgaaagccattagttgctattctcttagggcagataaaatgcggctgtgttaggaaaaacatgttacactgtaaggcagatgatcgtccccgtatgatgattgtcagaagacaggactaagtagcagagaatagctaagagataaattgggctggggaaacttgtcagaaagcactgaacaattaagaaattttccaagaaaatgtgcagtattctctgctacttctgaatctgttttgtcttcctaatctatcacaattgccacccatcgggttttgggtgtgtgttttcatagcgtggttactttctataatgctgtacccagattctaagaacctggagaaggattagcagttcttagtaagtttactgtgtataggaacggtttgtatttcattacagctattcatcttttctacattaaaaatatttttctctaaaaaaaaaaaa

SEQ ID NO: 382388 - DNA, 3576 bp, Homo sapiens
gaattcgcctcgatggcgtttatccggaagaagcagcaggagcagcagctgcagctctactccaaggagagattttccttgctgctgcttaacttggaggagtactactttgaacagcatagagccaatcacattttgcacaagggcagtcaccatgaaaggaaaatcagaggctccttaaaaatatgttcaaaatcggtgatttttgaaccagattcaatatcccagcccatcatcaagattcctttgagagactgtataaaaataggaaagcatggagaaaatggagccaatagacacttcacaaaggcaaaatctgggggtatttcactcattttcagtcaggtatatttcattaaagaacataatgttgttgcaccatataaaatagaaaggggcaaaatggaatatgtttttgaattggatgttcccgggaaagtggaagatgttgtggagacgttgcttcagcttcacagagcatcctgccttgacaaattgggtgaccaaaccgccatgataacagctattttgcagtctcgtttagctagaacatcatttgacaaaaacaggttccaaaacatttctgaaaagctgcacatggaatgcaaagcagaaatggtgacgcctctggtgactaatcctggacacgtgtgcatcacggacacaaacctgtattttcagcccctcaacggctacccgaaacctgtggtccagataacactccaagatgtccgccgcatctacaaaaggaggcacggcctcatgcctctgggcttggaagtattttgcacagaagatgatctgtgttccgacatctacctaaagttctatgaacctcaagatagagatgatctctatttttacattgccacatacctagagcaccatgtggcggagcacactgctgagagctacatgctgcagtggcagcgtggacacctttccaactatcagtacctccttcacctcaacaacctggccgaccgcagctgcaacgacctctcccagtaccctgtgtttccatggataatacatgattattccagctcagaactagatttgtcaaatccaggaaccttccgggatctcagtaagccagtaggggccctaaataaggaacggctggagagactactgacacgctaccaggaaatgcctgaaccaaagttcatgtatgggagtcactactcttccccgggttatgtacttttttatcttgttaggattgcaccagagtatatgctgtgcctgcagaatggaagatttgataatgcagatagaatgttcaacagtattgcagaaacttggaaaaactgtctggatggtgcaacggattttaaagagttaattccagaattctatggtgatgatgtgagctttctagtcaatagcctgaagttggatttgggaaagagacaaggaggacagatggttgacgatgtggagcttcccccttgggcttccagtcccgaggactttctccagaagagcaaagatgcattggaaagcaattatgtgtctgaacaccttcacgagtggattgatctaatatttggctacaaacaaaaagggagtgatgcagttggggcccataatgtatttcatcccctgacctatgaaggaggtgtagacttgaacagcatccaggatcctgatgagaaggtagccatgcttacgcaaatcttggaatttgggcagacaccaaaacaactatttgtgacaccacatcctcgaaggatcaccccaaagtttaaaagtttgtcccagacctccagttataatgcttctatggcagattccccaggtgaagagtcttttgaagacctgaccgaagaaagcaaaacactggcctggaataacatcaccaaactgcagttacacgagcactataaaatccacaaagaagcagttactggaatcacggtctctcgcaatggatcttcagtattcacaacatcccaagattccaccttgaagatgttttctaaagaatcaaaaatgctacaaagaagtatatcattttcaaatatggctttatcgtcttgtttacttttaccaggagatgccactgtcataacttcttcatgggataataatgtctatttttattccatagcatttggaagacgccaggacacgttaatgggacatgatgatgctgttagtaagatctgttggcatgacaacaggctatattctgcatcgtgggactctacagtgaaggtgtggtctggtgttcctgcagagatgccaggcaccaaaagacaccactttgacttgctggccgagctggaacatgatgtcagtgtagatacaatcagtttaaatgctgcaagcacactgttagtttccggcaccaaagaaggcacagtgaatatttgggacctcacaacggccaccttaatgcaccagattccatgccattcagggattgtatgtgacactgcttttagcccaggtagatattatcctttttaaaacagataatactaggtaaattggaattttgaaataaacaatattgttaattttgaaataaacaataaaacttacaaagaaaaacactatttgctgataaaagaggttttgccaatggctaacactgctttatgccagggtacagtatacttgtggcatttgtatcaggtagaaaagccggactgggtatttttaattcctcattagagaaattaatttaagataaaaatgaactcataatcaaagggtcatctcatccttacatcttggaaagggctagaaccatttcaaggagaggatagtcattgcttaagtacaaggattttgaagaaaacgaatgtggagattaggccactggactcagaaataaaatccagaataatgtaaaccacattctgaagctgtcactcatatctgagtctcaccttgtgttgcagatagtcgccatgtcctcagcacaggaacagatggctgtcttaatgtcattgatgtgcagacaggaatgctcatctcctccatgacatcagatgagccccagaggtatagtttgtgagttactgggggcgaagacatttacagacatgttcatgatcacttcatttgggcttacattggccagttcaacatatccttccttcatgatgaagaaaggactatttctaaatcattcttgcaggtgctttgtctgggatggaaattccgttttatctggcagtcagtctggtgaactgctcgtttgggacctccttggagcaaaaatcagtgagagaatacagggccacacaggtaagcagctactgcagttgccttgatctttgttctcaagataatgaactcaagcctgccttttccatcagggaacatactctttttgggcaaaaaacacccatggtttttccatgtcgtaaacatgtccctggagcctcttgattggccaggtgatctgcatctcgtaggttactcaggatttagatttatgttaacagccattggactccaaaaaggaagtctttaactttcatatggagaattaaaaaccatcgtaaagctattatttttcttaaaggtaatagcatgatcttaaatttttagaatagt

SEQ ID NO: 382389 - DNA, 2856 bp, Homo sapiens
  misc_feature (2840)..(2840): n is a, c, g, or t
gaattcgcctcgatggcgtttatccggaagaagcagcaggagcagcagctgcagctctactccaaggagagattttccttgctgctgcttaacttggaggagtactactttgaacagcatagagccaatcacattttgcacaagggcagtcaccatgaaaggaaaatcagaggctccttaaaaatatgttcaaaatcggtgatttttgaaccagattcaatatcccagcccatcatcaagattcctttgagagactgtataaaaataggaaagcatggagaaaatggagccaatagacacttcacaaaggcaaaatctgggggtatttcactcattttcagtcaggtatatttcattaaagaacataatgttgttgcaccatataaaatagaaaggggcaaaatggaatatgtttttgaattggatgttcccgggaaagtggaagatgttgtggagacgttgcttcagcttcacagagcatcctgccttgacaaattgggtgaccaaaccgccatgataacagctattttgcagtctcgtttagctagaacatcatttgacaaaaacaggttccaaaacatttctgaaaagctgcacatggaatgcaaagcagaaatggtgacgcctctggtgactaatcctggacacgtgtgcatcacggacacaaacctgtattttcagcccctcaacggctacccgaaacctgtggtccagataacactccaagatgtccgccgcatctacaaaaggaggcacggcctcatgcctctgggcttggaagtattttgcacagaagatgatctgtgttccgacatctacctaaagttctatgaacctcaagatagagatgatctctatttttacattgccacatacctagagcaccatgtggcggagcacactgctgagagctacatgctgcagtggcagcgtggacacctttccaactatcagtacctccttcacctcaacaacctggccgaccgcagctgcaacgacctctcccagtaccctgtgtttccatggataatacatgattattccagctcagaactagatttgtcaaatccaggaaccttccgggatctcagtaagccagtaggggccctaaataaggaacggctggagagactactgacacgctaccaggaaatgcctgaaccaaagttcatgtatgggagtcactactcttccccgggttatgtacttttttatcttgttaggattgcaccagagtatatgctgtgcctgcagaatggaagatttgataatgcagatagaatgttcaacagtattgcagaaacttggaaaaactgtctggatggtgcaacggattttaaagagttaattccagaattctatggtgatgatgtgagctttctagtcaatagcctgaagttggatttgggaaagagacaaggaggacagatggttgacgatgtggagcttcccccttgggcttccagtcccgaggactttctccagaagagcaaagatgcattggaaagcaattatgtgtctgaacaccttcacgagtggattgatctaatatttggctacaaacaaaaagggagtgatgcagttggggcccataatgtatttcatcccctgacctatgaaggaggtgtagacttgaacagcatccaggatcctgatgagaaggtagccatgcttacgcaaatcttggaatttgggcagacaccaaaacaactatttgtgacaccacatcctcgaaggatcaccccaaagtttaaaagtttgtcccagacctccagttataatgcttctatggcagattccccaggtgaagagtcttttgaagacctgaccgaagaaagcaaaacactggcctggaataacatcaccaaactgcagttacacgagcactataaaatccacaaagaagcagttactggaatcacggtctctcgcaatggatcttcagtattcacaacatcccaagattccaccttgaagatgttttctaaagaatcaaaaatgctacaaagaagtatatcattttcaaatatggctttatcgtcttgtttacttttaccaggagatgccactgtcataacttcttcatgggataataatgtctatttttattccatagcatttggaagacgccaggacacgttaatgggacatgatgatgctgttagtaagatctgttggcatgacaacaggctatattctgcatcgtgggactctacagtgaaggtgtggtctggtgttcctgcagagatgccaggcaccaaaagacaccactttgacttgctggccgagctggaacatgatgtcagtgtagatacaatcagtttaaatgctgcaagcacactgttagtttccggcaccaaagaaggcacagtgaatatttgggacctcacaacggccaccttaatgcaccagattccatgccattcagggattgtatgtgacactgcttttagcccagatagtcgccatgtcctcagcacaggaacagatggctgtcttaatgtcattgatgtgcagacaggaatgctcatctcctccatgacatcagatgagccccagaggtgctttgtctgggatggaaattccgttttatctggcagtcagtctggtgaactgctcgtttgggacctccttggagcaaatgaccagggtgcagtatatcccggaggggagacggacagtatatctgcaatggggataaggccttctctcgtaattatgacctattagattttagcaactttacggcggtatgtaggtgattgagtacacggatggttggttcactgggcgagccagattcggaagggggccggagcagtgatgaagtcaatattctncccgcagcgcacacac

SEQ ID NO: 382390 - DNA, 2025 bp, Homo sapiens
taagaaatatggacctcttgcctgtcctagaagctttatatacatatagatagacaagagaaatgggaggaaaaaaatgaagactccatgatttttcgattgagtctaatctaataggtcccgaggactttctccagaagagcaaagatgcattggaaagcaattatgtgtctgaacaccttcacgagtggattgatctaatatttggctacaaacaaaaagggagtgatgcagttggggcccataatgtatttcatcccctgacctatgaaggaggtgtagacttgaacagcatccaggatcctgatgagaaggtagccatgcttacgcaaatcttggaatttgggcagacaccaaaacaactatttgtgacaccacatcctcgaaggatcaccccaaagtttaaaagtttgtcccagacctccagttataatgcttctatggcagattccccaggtgaagagtcttttgaagacctgaccgaagaaagcaaaacactggcctggaataacatcaccaaactgcagttacacgagcactataaaatccacaaagaagcagttactggaatcacggtctctcgcaatggatcttcagtattcacaacatcccaagattccaccttgaagatgttttctaaagaatcaaaaatgctacaaagaagtatatcattttcaaatatggctttatcgtcttgtttacttttaccaggagatgccactgtcataacttcttcatgggataataatgtctatttttattccatagcatttggaagacgccaggacacgttaatgggacatgatgatgctgttagtaagatctgttggcatgacaacaggctatattctgcatcgtgggactctacagtgaaggtgtggtctggtgttcctgcagagatgccaggcaccaaaagacaccactttgacttgctggccgagctggaacatgatgtcagtgtagatacaatcagtttaaatgctgcaagcacactgttagtttccggcaccaaagaaggcacagtgaatatttgggacctcacaacggccaccttaatgcaccagattccatgccattcagggattgtatgtgacactgcttttagcccagatagtcgccatgtcctcagcacaggaacagatggctgtcttaatgtcattgatgtgcagacaggaatgctcatctcctccatgacatcagatgagccccagaggtgctttgtctgggatggaaattccgttttatctggcagtcagtctggtgaactgctcgtttgggacctccttggagcaaaaatcagtgagagaatacagggccacacaggtgctgtgacatgtatatggatgaatgaacagtgtagcagtatcatcacaggaggggaagacagacaaattatattctggaaattgcagtattaagtgccttttcctctcctgaatattaaattgaactctatttaatgcatttttaaaccaaacttttaaacggactggtgaatgtgcaatgttagtaattagaagttttaccacatggaaaatttgtggttttaaactttctaaatcatggtgacttcattgaaagccattagttgctattctcttagggcagataaaatgcggctgtgttaggaaaaacatgttacactgtaaggcagatgatcgtccccgtatgatgattgtcagaagacaggactaagtagcagagaatagctaagagataaattgggctggggaaacttgtcagaaagcactgaacaattaagaaattttccaagaaaatgtgcagtattctctgctacttctgaatctgttttgtcttcctaatctatcacaattgccacccatcgggttttgggtgtgtgttttcatagcgtggttactttctataatgctgtacccagattctaagaacctggagaaggattagcagttcttagtaagtttactgtgtataggaacggtttgtatttcattacagctattcatcttttctacattaaaaatatttttctctaaaaaaaaaaaa

SEQ ID NO: 382391 - DNA, 3830 bp, Homo sapiens
gaattcgcctcgatggcgtttatccggaagaagcagcaggagcagcagctgcagctctactccaaggagagattttccttgctgctgcttaacttggaggagtactactttgaacagcatagagccaatcacattttgcacaagggcagtcaccatgaaaggaaaatcagaggctccttaaaaatatgttcaaaatcggtgatttttgaaccagattcaatatcccagcccatcatcaagattcctttgagagactgtataaaaataggaaagcatggagaaaatggagccaatagacacttcacaaaggcaaaatctgggggtatttcactcattttcagtcaggtatatttcattaaagaacataatgttgttgcaccatataaaatagaaaggggcaaaatggaatatgtttttgaattggatgttcccgggaaagtggaagatgttgtggagacgttgcttcagcttcacagagcatcctgccttgacaaattgggtgaccaaaccgccatgataacagctattttgcagtctcgtttagctagaacatcatttgacaaaaacaggttccaaaacatttctgaaaagctgcacatggaatgcaaagcagaaatggtgacgcctctggtgactaatcctggacacgtgtgcatcacggacacaaacctgtattttcagcccctcaacggctacccgaaacctgtggtccagataacactccaagatgtccgccgcatctacaaaaggaggcacggcctcatgcctctgggcttggaagtattttgcacagaagatgatctgtgttccgacatctacctaaagttctatgaacctcaagatagagatgatctctatttttacattgccacatacctagagcaccatgtggcggagcacactgctgagagctacatgctgcagtggcagcgtggacacctttccaactatcagtacctccttcacctcaacaacctggccgaccgcagctgcaacgacctctcccagtaccctgtgtttccatggataatacatgattattccagctcagaactagatttgtcaaatccaggaaccttccgggatctcagtaagccagtaggggccctaaataaggaacggctggagagactactgacacgctaccaggaaatgcctgaaccaaagttcatgtatgggagtcactactcttccccgggttatgtacttttttatcttgttaggattgcaccagagtatatgctgtgcctgcagaatggaagatttgataatgcagatagaatgttcaacagtattgcagaaacttggaaaaactgtctggatggtgcaacggattttaaagagttaattccagaattctatggtgatgatgtgagctttctagtcaatagcctgaagttggatttgggaaagagacaaggaggacagatggttgacgatgtggagcttcccccttgggcttccagtcccgaggactttctccagaagagcaaagatgcattggaaagcaattatgtgtctgaacaccttcacgagtggattgatctaatatttggctacaaacaaaaagggagtgatgcagttggggcccataatgtatttcatcccctgacctatgaaggaggtgtagacttgaacagcatccaggatcctgatgagaaggtagccatgcttacgcaaatcttggaatttgggcagacaccaaaacaactatttgtgacaccacatcctcgaaggatcaccccaaagtttaaaagtttgtcccagacctccagttataatgcttctatggcagattccccaggtgaagagtcttttgaagacctgaccgaagaaagcaaaacactggcctggaataacatcaccaaactgcagttacacgagcactataaaatccacaaagaagcagttactggaatcacggtctctcgcaatggatcttcagtattcacaacatcccaagattccaccttgaagatgttttctaaagaatcaaaaatgctacaaagaagtatatcattttcaaatatggctttatcgtcttgtttacttttaccaggagatgccactgtcataacttcttcatgggataataatgtctatttttattccatagcatttggaagacgccaggacacgttaatgggacatgatgatgctgttagtaagatctgttggcatgacaacaggctatattctgcatcgtgggactctacagtgaaggtgtggtctggtgttcctgcagagatgccaggcaccaaaagacaccactttgacttgctggccgagctggaacatgatgtcagtgtagatacaatcagtttaaatgctgcaagcacactgttagtttccggcaccaaagaaggcacagtgaatatttgggacctcacaacggccaccttaatgcaccagattccatgccattcagggattgtatgtgacactgcttttagcccaggtagatattatcctttttaaaacagataatactaggtaaattggaattttgaaataaacaatattgttaattttgaaataaacaataaaacttacaaagaaaaacactatttgctgataaaagaggttttgccaatggctaacactgctttatgccagggtacagtatacttgtggcatttgtatcaggtagaaaagccggactgggtatttttaattcctcattagagaaattaatttaagataaaaatgaactcataatcaaagggtcatctcatccttacatcttggaaagggctagaaccatttcaaggagaggatagtcattgcttaagtacaaggattttgaagaaaacgaatgtggagattaggccactggactcagaaataaaatccagaataatgtaaaccacattctgaagctgtcactcatatctgagtctcaccttgtgttgcagatagtcgccatgtcctcagcacaggaacagatggctgtcttaatgtcattgatgtgcagacaggaatgctcatctcctccatgacatcagatgagccccagaggtgctttgtctgggatggaaattccgttttatctggcagtcagtctggtgaactgctcgtttgggacctccttggagcaaaaatcagtgagagaatacagggccacacaggtgctgtgacatgtatatggatgaatgaacagtgtagcagtatcatcacaggaggggaagacagacaaattatattctggaaattgcagtattaagtgccttttcctctcctgaatattaaattgaactctatttaatgcatttttaaaccaaacttttaaacggactggtgaatgtgcaatgttagtaattagaagttttaccacatggaaaatttgtggttttaaactttctaaatcatggtgacttcattgaaagccattagttgctattctcttagggcagataaaatgcggctgtgttaggaaaaacatgttacactgtaaggcagatgatcgtccccgtatgatgattgtcagaagacaggactaagtagcagagaatagctaagagataaattgggctggggaaacttgtcagaaagcactgaacaattaagaaattttccaagaaaatgtgcagtattctctgctacttctgaatctgttttgtcttcctaatctatcacaattgccacccatcgggttttgggtgtgtgttttcatagcgtggttactttctataatgctgtacccagattctaagaacctggagaaggattagcagttcttagtaagtttactgtgtataggaacggtttgtatttcattacagctattcatcttttctacattaaaaatatttttctctaaaaaaaaaaaa

SEQ ID NO: 382392 - DNA, 3318 bp, Homo sapiens
gaattcgcctcgatggcgtttatccggaagaagcagcaggagcagcagctgcagctctactccaaggagagattttccttgctgctgcttaacttggaggagtactactttgaacagcatagagccaatcacattttgcacaagggcagtcaccatgaaaggaaaatcagaggctccttaaaaatatgttcaaaatcggtgatttttgaaccagattcaatatcccagcccatcatcaagattcctttgagagactgtataaaaataggaaagcatggagaaaatggagccaatagacacttcacaaaggcaaaatctgggggtatttcactcattttcagtcaggtatatttcattaaagaacataatgttgttgcaccatataaaatagaaaggggcaaaatggaatatgtttttgaattggatgttcccgggaaagtggaagatgttgtggagacgttgcttcagcttcacagagcatcctgccttgacaaattgggtgaccaaaccgccatgataacagctattttgcagtctcgtttagctagaacatcatttgacaaaaacaggttccaaaacatttctgaaaagctgcacatggaatgcaaagcagaaatggtgacgcctctggtgactaatcctggacacgtgtgcatcacggacacaaacctgtattttcagcccctcaacggctacccgaaacctgtggtccagataacactccaagatgtccgccgcatctacaaaaggaggcacggcctcatgcctctgggcttggaagtattttgcacagaagatgatctgtgttccgacatctacctaaagttctatgaacctcaagatagagatgatctctatttttacattgccacatacctagagcaccatgtggcggagcacactgctgagagctacatgctgcagtggcagcgtggacacctttccaactatcagtacctccttcacctcaacaacctggccgaccgcagctgcaacgacctctcccagtaccctgtgtttccatggataatacatgattattccagctcagaactagatttgtcaaatccaggaaccttccgggatctcagtaagccagtaggggccctaaataaggaacggctggagagactactgacacgctaccaggaaatgcctgaaccaaagttcatgtatgggagtcactactcttccccgggttatgtacttttttatcttgttaggattgcaccagagtatatgctgtgcctgcagaatggaagatttgataatgcagatagaatgttcaacagtattgcagaaacttggaaaaactgtctggatggtgcaacggattttaaagagttaattccagaattctatggtgatgatgtgagctttctagtcaatagcctgaagttggatttgggaaagagacaaggaggacagatggttgacgatgtggagcttcccccttgggcttccagtcccgaggactttctccagaagagcaaagatgcattggaaagcaattatgtgtctgaacaccttcacgagtggattgatctaatatttggctacaaacaaaaagggagtgatgcagttggggcccataatgtatttcatcccctgacctatgaaggaggtgtagacttgaacagcatccaggatcctgatgagaaggtagccatgcttacgcaaatcttggaatttgggcagacaccaaaacaactatttgtgacaccacatcctcgaaggatcaccccaaagtttaaaagtttgtcccagacctccagttataatgcttctatggcagattccccaggtgaagagtcttttgaagacctgaccgaagaaagcaaaacactggcctggaataacatcaccaaactgcagttacacgagcactataaaatccacaaagaagcagttactggaatcacggtctctcgcaatggatcttcagtattcacaacatcccaagattccaccttgaagatgttttctaaagaatcattttaccaggagatgccactgtcataacttcttcatgggataataatgtctatttttattccatagcatttggaagacgccaggacacgttaatgggacatgatgatgctgttagtaagatctgttggcatgacaacaggctatattctgcatcgtgggactctacagtgaaggtgtggtctggtgttcctgcagagatgccaggcaccaaaagacaccactttgacttgctggccgagctggaacatgatgtcagtgtagatacaatcagtttaaatgctgcaagcacactgttagtttccggcaccaaagaaggcacagtgaatatttgggacctcacaacggccaccttaatgcaccagattccatgccattcagggattgtatgtgacactgcttttagcccagatagtcgccatgtcctcagcacaggaacagatggctgtcttaatgtcattgatgtgcagacaggaatgctcatctcctccatgacatcagatgagccccagaggtgctttgtctgggatggaaattccgttttatctggcagtcagtctggtgaactgctcgtttgggacctccttggagcaaaaatcagtgagagaatacagggccacacaggtgctgtgacatgtatatggatgaatgaacagtgtagcagtatcatcacaggaggggaagacagacaaattatattctggaaattgcagtattaagtgccttttcctctcctgaatattaaattgaactctatttaatgcatttttaaaccaaacttttaaacggactggtgaatgtgcaatgttagtaattagaagttttaccacatggaaaatttgtggttttaaactttctaaatcatggtgacttcattgaaagccattagttgctattctcttagggcagataaaatgcggctgtgttaggaaaaacatgttacactgtaaggcagatgatcgtccccgtatgatgattgtcagaagacaggactaagtagcagagaatagctaagagataaattgggctggggaaacttgtcagaaagcactgaacaattaagaaattttccaagaaaatgtgcagtattctctgctacttctgaatctgttttgtcttcctaatctatcacaattgccacccatcgggttttgggtgtgtgttttcatagcgtggttactttctataatgctgtacccagattctaagaacctggagaaggattagcagttcttagtaagtttactgtgtataggaacggtttgtatttcattacagctattcatcttttctacattaaaaatatttttctctaaaaaaaaaaaa

SEQ ID NO: 382393 - DNA, 3522 bp, Homo sapiens
gaattcgcctcgatggcgtttatccggaagaagcagcaggagcagcagctgcagctctactccaaggagagattttccttgctgctgcttaacttggaggagtactactttgaacagcatagagccaatcacattttgcacaagggcagtcaccatgaaaggaaaatcagaggctccttaaaaatatgttcaaaatcggtgatttttgaaccagattcaatatcccagcccatcatcaagattcctttgagagactgtataaaaataggaaagcatggagaaaatggagccaatagacacttcacaaaggcaaaatctgggggtatttcactcattttcagtcaggtatatttcattaaagaacataatgttgttgcaccatataaaatagaaaggggcaaaatggaatatgtttttgaattggatgttcccgggaaagtggaagatgttgtggagacgttgcttcagcttcacagagcatcctgccttgacaaattgggtgaccaaaccgccatgataacagctattttgcagtctcgtttagctagaacatcatttgacaaaaacaggttccaaaacatttctgaaaagctgcacatggaatgcaaagcagaaatggtgacgcctctggtgactaatcctggacacgtgtgcatcacggacacaaacctgtattttcagcccctcaacggctacccgaaacctgtggtccagataacactccaagatgtccgccgcatctacaaaaggaggcacggcctcatgcctctgggcttggaagtattttgcacagaagatgatctgtgttccgacatctacctaaagttctatgaacctcaagatagagatgatctctatttttacattgccacatacctagagcaccatgtggcggagcacactgctgagagctacatgctgcagtggcagcgtggacacctttccaactatcagtacctccttcacctcaacaacctggccgaccgcagctgcaacgacctctcccagtaccctgtgtttccatggataatacatgattattccagctcagaactagatttgtcaaatccaggaaccttccgggatctcagtaagccagtaggggccctaaataaggaacggctggagagactactgacacgctaccaggaaatgcctgaaccaaagttcatgtatgggagtcactactcttccccgggttatgtacttttttatcttgttaggattgcaccagagtatatgctgtgcctgcagaatggaagatttgataatgcagatagaatgttcaacagtattgcagaaacttggaaaaactgtctggatggtgcaacggattttaaagagttaattccagaattctatggtgatgatgtgagctttctagtcaatagcctgaagttggatttgggaaagagacaaggaggacagatggttgacgatgtggagcttcccccttgggcttccagtcccgaggactttctccagaagagcaaagatgcattggaaagcaattatgtgtctgaacaccttcacgagtggattgatctaatatttggctacaaacaaaaagggagtgatgcagttggggcccataatgtatttcatcccctgacctatgaaggaggtgtagacttgaacagcatccaggatcctgatgagaaggtagccatgcttacgcaaatcttggaatttgggcagacaccaaaacaactatttgtgacaccacatcctcgaaggatcaccccaaagtttaaaagtttgtcccagacctccagttataatgcttctatggcagattccccaggtgaagagtcttttgaagacctgaccgaagaaagcaaaacactggcctggaataacatcaccaaactgcagttacacgagcactataaaatccacaaagaagcagttactggaatcacggtctctcgcaatggatcttcagtattcacaacatcccaagattccaccttgaagatgttttctaaagaatcaaaaatgctacaaagaagtatatcattttcaaatatggctttatcgtcttgtttacttttaccaggagatgccactgtcataacttcttcatgggataataatgtctatttttattccatagcatttggaagacgccaggacacgttaatgggacatgatgatgctgttagtaagatctgttggcatgacaacaggctatattctgcatcgtgggactctacagtgaaggtgtggtctggtgttcctgcagagatgccaggcaccaaaagacaccactttgacttgctggccgagctggaacatgatgtcagtgtagatacaatcagtttaaatgctgcaagcacactgttagtttccggcaccaaagaaggcacagtgaatatttgggacctcacaacggccaccttaatgcaccagattccatgccattcagggattgtatgtgacactgcttttagcccaggtagatattatcctttttaaaacagataatactaggtaaattggaattttgaaataaacaatattgttaattttgaaataaacaataaaacttacaaagaaaaacactatttgctgataaaagaggttttgccaatggctaacactgctttatgccagggtacagtatacttgtggcatttgtatcaggtagaaaagccggactgggtatttttaattcctcattagagaaattaatttaagataaaaatgaactcataatcaaagggtcatctcatccttacatcttggaaagggctagaaccatttcaaggagaggatagtcattgcttaagtacaaggattttgaagaaaacgaatgtggagattaggccactggactcagaaataaaatccagaataatgtaaaccacattctgaagctgtcactcatatctgagtctcaccttgtgttgcagatagtcgccatgtcctcagcacaggaacagatggctgtcttaatgtcattgatgtgcagacaggaatgctcatctcctccatgacatcagatgagccccagaggtatagtttgtgagttactgggggcgaagacatttacagacatgttcatgatcacttcatttgggcttacattggccagttcaacatatccttccttcatgatgaagaaaggactatttctaaatcattcttgcaggtgctttgtctgggatggaaattccgttttatctggcagtcagtctggtgaactgctcgtttgggacctccttggagcatgatctttgttctcaagataatgaactcaagcctgccttttccatcagggaacatactctttttgggcaaaaaacacccatggtttttccatgtcgtaaacatgtccctggagcctcttgattggccaggtgatctgcatctcgtaggttactcaggatttagatttatgttaacagccattggactccaaaaaggaagtctttaactttcatatggagaattaaaaaccatcgtaaagctattatttttcttaaaggtaatagcatgatcttaaatttttagaatagt

SEQ ID NO: 382394 - DNA, 324 bp, Homo sapiens
atccaatatttattcactttatgaaaacagatttatttgtactgtcaggcttattataggccttgattgcatttccaaaagggcctgtcatttggcagctacagtttaatgcttttattcacaatttgtagaagacatgtaataactactcatcacattttgggatgtcataaagatgggaaagacaacagatgtaaaagataatggagtaagattcaaaaatactttgatgtgttggaacaaatggccttaaacccacaaagatgaagtttaatgggaaaaaatataagagcatgagagtcacctgtgggccttgttggccat

SEQ ID NO: 382395 - DNA, 250 bp, Homo sapiens
caaatagatggaacaaaactaaaattttagaaacttatgtacccatatataaacactggatgatagagtttgggtatttgttccccccaaacctcatattgaactgtaatcctcaattttggaggtagagcccagtgggaggtgatcggatcatgggagcatatttccaatgaatggtttagcaccatctccttggtgccatcctgacgacaatgagttcttacaagatctggttgtttaagtgcacggc

SEQ ID NO: 382396 - DNA, 445 bp, Homo sapiens
tgtataaattttctaaaacacatcgcactgcatattttaaaacatatgaattgtatatcatgtaaattatacctcaataaagctgtttaacttgaaaaaaaatgaggcagctttataagttctgataagggagcaatctccaacctgtatagttaagtaaaaaggccaaggtactttaattctacagagtgctatcatttttgtaaaaaaaaaaaagtgtatttttcatatgtatagaatatctccagaaagatacaatagactggctaatagaatttgcctttggacaggggagtaggatggctggaagacagggatgtaaggaaacatttaactgtatttcctttttgtaccagggtggggtggggtggttgagacccaggtcagccataccagctcttttatagtgggcaaatgtctgagcctttgttttctcatctgtaaa

SEQ ID NO: 382397 - DNA, 366 bp, Homo sapiens
tcgtgtcactgcactgcagcctgggtaacagagaaagaccctatctcaaaaaaaaaaaaccaaacaaaaacaaagctagaaaaccccactgacttctccaaagcctccaggaagacacgttcctcctcctcccagggctgaggtctccccactgcacagccacactcccaggtagacagaagaggcctccctgagtcacaacctcctcctccagggctccagcgattctctcagctcagcctcctgagtagctgggaccaccatgcaccaccatgcctgtctaacttttttttgtactttttgtgaagatggggtttgtccatattgcccagtctggtcttgagctcctgacctcaagtgatccac

SEQ ID NO: 382398 - DNA, 367 bp, Homo sapiens
ttgagttcttcattcacataagccacgtgttaaggacttgatagctgcatgtggctactgggttagtcagggcagccatagaacgtttttaccatcgcagaatgggcagcaccgttctacttcttaccacctgaatagtccacaagcacctcaaactcattgtgctgcaaacatatcatcagcagaatgttggtgtatgtggaaaagtgtggcaaagagaaataagggaaggaggaaaaggatcctttcagttattaagttctataacatttgtctcaaacagacttcaataataaagggggtttggctggtcatggtggttcacacctgtaattccagcactttgggaggctgaggtcggcggatc

SEQ ID NO: 382399 - DNA, 732 bp, Homo sapiens
  misc_feature (3)..(3): n is a, c, g, or t
  misc_feature (9)..(9): n is a, c, g, or t
  misc_feature (13)..(14): n is a, c, g, or t
  misc_feature (35)..(35): n is a, c, g, or t
  misc_feature (37)..(38): n is a, c, g, or t
tgnctattnttanntttggaatcctttgcactttngnnccctgcgtgcactctccggcgtcccaagtgagtggaggggggatcccgactccagtccggggccttggccagcggagccgcgctattcggaagcgggaatcccactcagagcccgggcctgtaggggcggggcgtcccgggcacccgggattggggcgtctcccgtcgtgcaccggggcaccggcgactcacccggaaggagaagccgtgatctggctatatggtggggcgcgggcggtgtcgctgtggggagctggtgctgttctcagatgtttccttccaatgggcttttggtgtaggatgtcggagaaccaagaacaggaggtaagagtatggtctgcagagaacaggtgggtaaaagttggagaggggatttaggaggaaagaggacatagagatgcaaatcattaattattacctgcagtattactttggtggttctgatgagctcagaataaagtcaggagaaagaaatcaacagcagaggcattcctaggaaattggggttccattctgactaaattttcctttgattggaatatactggaatgtaagcttcatgggggcaggcacttacgtctcttgttcatgctttatccccagtgcctataacagtgtctgacacgtagtggggctcagtaaaaatttgttgaattgagtgactgaattgagtgaatgaaagttgaattgaata

SEQ ID NO: 382400 - DNA, 279 bp, Homo sapiens
caggaatttcccaggaccctgaaggggccatgatggcaacaaatttggaacctcagcctggccagagctggtaggagccgagtgccacaggcattctgcattgctctactcttaggtttgtgtgtgtgatccttcccctccctgtcgcccactcctccctcctctggctatcctaccctgtctgtgggctcttttactaccagcctatgctgtgggactgtcatggcatttagttcagagtggaggggctttggcctgaaataaaatgcaagtatttaa

SEQ ID NO: 382401 - DNA, 2430 bp, Homo sapiens
  misc_feature (3)..(3): n is a, c, g, or t
  misc_feature (9)..(9): n is a, c, g, or t
  misc_feature (13)..(14): n is a, c, g, or t
  misc_feature (35)..(35): n is a, c, g, or t
  misc_feature (37)..(38): n is a, c, g, or t
tgnctattnttanntttggaatcctttgcactttngnnccctgcgtgcactctccggcgtcccaagtgagtggaggggggatcccgactccagtccggggccttggccagcggagccgcgctattcggaagcgggaatcccactcagagcccgggcctgtaggggcggggcgtcccgggcacccgggattggggcgtctcccgtcgtgcaccggggcaccggcgactcacccggaaggagaagccgtgatctggctatatggtggggcgcgggcggtgtcgctgtggggagctggtgctgttctcaggagccagcctggatcatttgttggcagtacatattggctgaagtcagttttcatttcaagatgtttccttccaatgggcttttggtgtaggatgtcggagaaccaagaacaggaggaggtgattacagtgcgtgttcaggacccccgagtgcagaatgagggctcctggaactcttatgtggattataagatattcctccataccaacagcaaagcctttactgccaagacttcctgtgtgcggcgccgctaccgtgagttcgtgtggctgagaaagcagctacagagaaatgctggtttggtgcctgttcctgaacttcctgggaagtcaaccttcttcggcacctcagatgagttcattgagaagcgacgacaaggtctgcagcacttccttgaaaaggtcctgcagagtgtggttctcctgtcagacagccagttgcacctattcctgcaaagccagctctcggtgcctgagatagaagcctgtgtccagggccgaagtaccatgactgtgtctgatgccattcttcgatatgctatgtcaaactgtggctgggcccaggaagagaggcagagctcttctcacctggctaaaggagaccagcctaagagttgctgctttcttccaagatcgggtaggaggagctctccctcaccgcctcccagtgaagaaaaggaccatttagaagtgtgggctccagttgttgactctgaggttccttccttggaaagtcccactctcccacccctctcctcaccattatgctgtgattttggaagacccaaagagggaacctccactcttcagtctgtgaggagggctgtgggaggagatcatgctgtgcctttggaccctggtcagttagaaacagttttggaaaagtgagctctcggttctgctctgagatggtcagagaagatgcgggccaggagacttactcaggtgggactgggcacagggcaggtatgtgggaggctgggctgcttagtgtcttctagtcacctctgcttgggctgattgacagaggtcagtcattacagccccttatgcctcttccatgggaacaaatactgtgcagatgtttgtaagttaaacataagacacaggggctgttgcttttgaacagaaccctatattactctcctgggatctgagtttctgcaggtcatttgtatgtaggaccaggagtatctcctcaggtgaccagttttggggacccgtatgtggcaaattctaagctgccatattgaacatcatcccactgggagtggttatgttgtatccccatcttggctggcttcagtttttgctgtagccctagagcactttgtttgtgggaggctggcctcttgcctacctccttgcatggacagggggatgaatatttactttcccacctccttgctttttctttcactgataccactgaatggaactggtgctgtgactcctgctgctggggatttatgtcccgagaccttagcctggctgagtggagcctgagacctgcacaacagctcatggtcatgcatgagagagaagtggctggccacagccagagggaacagtaacagcccaggggcctttattttgggaaaggctgtccggggctgttactgtctcttctggttataaagcagacatgtggccatcttttccgcagggttagagtgggctcctttctttttggaatccttttcttctcctttggtagcagctccctgcctccagggcttccgccaccagcgtctctgctgtgttgcgcagtgcagtggggtgcaagggctttgtttctgcctgcctgaaagagagggctctggggatggagatgagaaacaacacgctctccttcagacaatgaggcattctgtcctcctgctgccattcttcatctccactgagagccagagctggtaggagccgagtgccacaggcattctgcattgctctactcttaggtttgtgtgtgtgatccttcccctccctgtcgcccactcctccctcctctggctatcctaccctgtctgtgggctcttttactaccagcctatgctgtgggactgtcatggcatttagttcagagtggaggggctttggcctgaaataaaatgcaagtatttaa

SEQ ID NO: 382402 - DNA, 2209 bp, Homo sapiens
gtgggcttgagcgtcagtagtggcactcgggatggtggcatcgctttacatcctagggagggactctcttaccacccgggattaaggagccagcctggatcatttgttggcagtacatattggctgaagtcagttttcatttcaagatgtttccttccaatgggcttttggtgtaggatgtcggagaaccaagaacaggaggaggtgattacagtgcgtgttcaggacccccgagtgcagaatgagggctcctggaactcttatgtggattataagatattcctccataccaacagcaaagcctttactgccaagacttcctgtgtgcggcgccgctaccgtgagttcgtgtggctgagaaagcagctacagagaaatgctggtttggtgcctgttcctgaacttcctgggaagtcaaccttcttcggcacctcagatgagttcattgagaagcgacgacaaggtctgcagcacttccttgaaaaggtcctgcagagtgtggttctcctgtcagacagccagttgcacctattcctgcaaagccagctctcggtgcctgagatagaagcctgtgtccagggccgaagtaccatgactgtgtctgatgccattcttcgatatgctatgtcaaactgtggctgggcccaggaagagaggcagagctcttctcacctggctaaaggagaccagcctaagagttgctgctttcttccaagatcgggtaggaggagctctccctcaccgcctcccagtgaagaaaaggaccatttagaagtgtgggctccagttgttgactctgaggttccttccttggaaagtcccactctcccacccctctcctcaccattatgctgtgattttggaagacccaaagagggaacctccactcttcagtctgtgaggagggctgtgggaggagatcatgctgtgcctttggaccctggtcagttagaaacagttttggaaaagtgagctctcggttctgctctgagatggtcagagaagatgcgggccaggagacttactcaggtgggactgggcacagggcaggtatgtgggaggctgggctgcttagtgtcttctagtcacctctgcttgggctgattgacagaggtcagtcattacagccccttatgcctcttccatgggaacaaatactgtgcagatgtttgtaagttaaacataagacacaggggctgttgcttttgaacagaaccctatattactctcctgggatctgagtttctgcaggtcatttgtatgtaggaccaggagtatctcctcaggtgaccagttttggggacccgtatgtggcaaattctaagctgccatattgaacatcatcccactgggagtggttatgttgtatccccatcttggctggcttcagtttttgctgtagccctagagcactttgtttgtgggaggctggcctcttgcctacctccttgcatggacagggggatgaatatttactttcccacctccttgctttttctttcactgataccactgaatggaactggtgctgtgactcctgctgctggggatttatgtcccgagaccttagcctggctgagtggagcctgagacctgcacaacagctcatggtcatgcatgagagagaagtggctggccacagccagagggaacagtaacagcccaggggcctttattttgggaaaggctgtccggggctgttactgtctcttctggttataaagcagacatgtggccatcttttccgcagggttagagtgggctcctttctttttggaatccttttcttctcctttggtagcagctccctgcctccagggcttccgccaccagcgtctctgctgtgttgcgcagtgcagtggggtgcaagggctttgtttctgcctgcctgaaagagagggctctggggatggagatgagaaacaacacgctctccttcagacaatgaggcattctgtcctcctgctgccattcttcatctccactgagagccagagctggtaggagccgagtgccacaggcattctgcattgctctactcttaggtttgtgtgtgtgatccttcccctccctgtcgcccactcctccctcctctggctatcctaccctgtctgtgggctcttttactaccagcctatgctgtgggactgtcatggcatttagttcagagtggaggggctttggcctgaaataaaatgcaagtatttaa

SEQ ID NO: 382403 - DNA, 2151 bp, Homo sapiens
agagggcctggggttgggcgaaatttcgggcgaccgaaggggcgggcgggatgatcgactggatggagggagctggtgctgttctcagatgtttccttccaatgggcttttggtgtaggatgtcggagaaccaagaacaggaggaggtgattacagtgcgtgttcaggacccccgagtgcagaatgagggctcctggaactcttatgtggattataagatattcctccataccaacagcaaagcctttactgccaagacttcctgtgtgcggcgccgctaccgtgagttcgtgtggctgagaaagcagctacagagaaatgctggtttggtgcctgttcctgaacttcctgggaagtcaaccttcttcggcacctcagatgagttcattgagaagcgacgacaaggtctgcagcacttccttgaaaaggtcctgcagagtgtggttctcctgtcagacagccagttgcacctattcctgcaaagccagctctcggtgcctgagatagaagcctgtgtccagggccgaagtaccatgactgtgtctgatgccattcttcgatatgctatgtcaaactgtggctgggcccaggaagagaggcagagctcttctcacctggctaaaggagaccagcctaagagttgctgctttcttccaagatcgggtaggaggagctctccctcaccgcctcccagtgaagaaaaggaccatttagaagtgtgggctccagttgttgactctgaggttccttccttggaaagtcccactctcccacccctctcctcaccattatgctgtgattttggaagacccaaagagggaacctccactcttcagtctgtgaggagggctgtgggaggagatcatgctgtgcctttggaccctggtcagttagaaacagttttggaaaagtgagctctcggttctgctctgagatggtcagagaagatgcgggccaggagacttactcaggtgggactgggcacagggcaggtatgtgggaggctgggctgcttagtgtcttctagtcacctctgcttgggctgattgacagaggtcagtcattacagccccttatgcctcttccatgggaacaaatactgtgcagatgtttgtaagttaaacataagacacaggggctgttgcttttgaacagaaccctatattactctcctgggatctgagtttctgcaggtcatttgtatgtaggaccaggagtatctcctcaggtgaccagttttggggacccgtatgtggcaaattctaagctgccatattgaacatcatcccactgggagtggttatgttgtatccccatcttggctggcttcagtttttgctgtagccctagagcactttgtttgtgggaggctggcctcttgcctacctccttgcatggacagggggatgaatatttactttcccacctccttgctttttctttcactgataccactgaatggaactggtgctgtgactcctgctgctggggatttatgtcccgagaccttagcctggctgagtggagcctgagacctgcacaacagctcatggtcatgcatgagagagaagtggctggccacagccagagggaacagtaacagcccaggggcctttattttgggaaaggctgtccggggctgttactgtctcttctggttataaagcagacatgtggccatcttttccgcagggttagagtgggctcctttctttttggaatccttttcttctcctttggtagcagctccctgcctccagggcttccgccaccagcgtctctgctgtgttgcgcagtgcagtggggtgcaagggctttgtttctgcctgcctgaaagagagggctctggggatggagatgagaaacaacacgctctccttcagacaatgaggcattctgtcctcctgctgccattcttcatctccactgagagccagagctggtaggagccgagtgccacaggcattctgcattgctctactcttaggtttgtgtgtgtgatccttcccctccctgtcgcccactcctccctcctctggctatcctaccctgtctgtgggctcttttactaccagcctatgctgtgggactgtcatggcatttagttcagagtggaggggctttggcctgaaataaaatgcaagtatttaa

SEQ ID NO: 382404 - DNA, 2154 bp, Homo sapiens
  misc_feature (3)..(3): n is a, c, g, or t
  misc_feature (9)..(9): n is a, c, g, or t
  misc_feature (13)..(14): n is a, c, g, or t
  misc_feature (35)..(35): n is a, c, g, or t
  misc_feature (37)..(38): n is a, c, g, or t
tgnctattnttanntttggaatcctttgcactttngnnccctgcgtgcactctccggcgtcccaaatgtttccttccaatgggcttttggtgtaggatgtcggagaaccaagaacaggaggtaagagtatggtctgcagagaacaggaggtgattacagtgcgtgttcaggacccccgagtgcagaatgagggctcctggaactcttatgtggattataagatattcctccataccaacagcaaagcctttactgccaagacttcctgtgtgcggcgccgctaccgtgagttcgtgtggctgagaaagcagctacagagaaatgctggtttggtgcctgttcctgaacttcctgggaagtcaaccttcttcggcacctcagatgagttcattgagaagcgacgacaaggtctgcagcacttccttgaaaaggtcctgcagagtgtggttctcctgtcagacagccagttgcacctattcctgcaaagccagctctcggtgcctgagatagaagcctgtgtccagggccgaagtaccatgactgtgtctgatgccattcttcgatatgctatgtcaaactgtggctgggcccaggaagagaggcagagctcttctcacctggctaaaggagaccagcctaagagttgctgctttcttccaagatcgggtaggaggagctctccctcaccgcctcccagtgaagaaaaggaccatttagaagtgtgggctccagttgttgactctgaggttccttccttggaaagtcccactctcccacccctctcctcaccattatgctgtgattttggaagacccaaagagggaacctccactcttcagtctgtgaggagggctgtgggaggagatcatgctgtgcctttggaccctggtcagttagaaacagttttggaaaagtgagctctcggttctgctctgagatggtcagagaagatgcgggccaggagacttactcaggtgggactgggcacagggcaggtatgtgggaggctgggctgcttagtgtcttctagtcacctctgcttgggctgattgacagaggtcagtcattacagccccttatgcctcttccatgggaacaaatactgtgcagatgtttgtaagttaaacataagacacaggggctgttgcttttgaacagaaccctatattactctcctgggatctgagtttctgcaggtcatttgtatgtaggaccaggagtatctcctcaggtgaccagttttggggacccgtatgtggcaaattctaagctgccatattgaacatcatcccactgggagtggttatgttgtatccccatcttggctggcttcagtttttgctgtagccctagagcactttgtttgtgggaggctggcctcttgcctacctccttgcatggacagggggatgaatatttactttcccacctccttgctttttctttcactgataccactgaatggaactggtgctgtgactcctgctgctggggatttatgtcccgagaccttagcctggctgagtggagcctgagacctgcacaacagctcatggtcatgcatgagagagaagtggctggccacagccagagggaacagtaacagcccaggggcctttattttgggaaaggctgtccggggctgttactgtctcttctggttataaagcagacatgtggccatcttttccgcagggttagagtgggctcctttctttttggaatccttttcttctcctttggtagcagctccctgcctccagggcttccgccaccagcgtctctgctgtgttgcgcagtgcagtggggtgcaagggctttgtttctgcctgcctgaaagagagggctctggggatggagatgagaaacaacacgctctccttcagacaatgaggcattctgtcctcctgctgccattcttcatctccactgagagccagagctggtaggagccgagtgccacaggcattctgcattgctctactcttaggtttgtgtgtgtgatccttcccctccctgtcgcccactcctccctcctctggctatcctaccctgtctgtgggctcttttactaccagcctatgctgtgggactgtcatggcatttagttcagagtggaggggctttggcctgaaataaaatgcaagtatttaa

SEQ ID NO: 382405 - DNA, 2414 bp, Homo sapiens
  misc_feature (3)..(3): n is a, c, g, or t
  misc_feature (9)..(9): n is a, c, g, or t
  misc_feature (13)..(14): n is a, c, g, or t
  misc_feature (35)..(35): n is a, c, g, or t
  misc_feature (37)..(38): n is a, c, g, or t
tgnctattnttanntttggaatcctttgcactttngnnccctgcgtgcactctccggcgtcccaagtgagtggaggggggatcccgactccagtccggggccttggccagcggagccgcgctattcggaagcgggaatcccactcagagcccgggcctgtaggggcggggcgtcccgggcacccgggattggggcgtctcccgtcgtgcaccggggcaccggcgactcacccggaaggagaagccgtgatctggctatatggtggggcgcgggcggtgtcgctgtggggagctggtgctgttctcagatgtttccttccaatgggcttttggtgtaggatgtcggagaaccaagaacaggaggaggtgattacagtgcgtgttcaggacccccgagtgcagaatgagggctcctggaactcttatgtggattataagatattcctccataccaacagcaaagcctttactgccaagacttcctgtgtgcggcgccgctaccgtgagttcgtgtggctgagaaagcagctacagagaaatgctggtttggtgcctgttcctgaacttcctgggaagtcaaccttcttcggcacctcagatgagttcattgagaagcgacgacaaggtctgcagcacttccttgaaaaggtcctgcagagtgtggttctcctgtcagacagccagttgcacctattcctgcaaagccagctctcggtgcctgagatagaagcctgtgtccagggccgaagtaccatgactgtgtctgatgccattcttcgatatgctatgtcaaactgtggctgggcccaggaagagaggcagagctcttctcacctggctaaaggagaccagcctaagagttgctgctttcttccaagatcgggtaggaggagctctccctcaccgcctcccagtgaagaaaaggaccatttagaagtgtgggctccagttgttgactctgaggttccttccttggaaagtcccactctcccacccctctcctcaccattatgctgtgattttggaagacccaaagagggaacctccactcttcagtctgtgaggagggctgtgggaggagatcatgctgtgcctttggaccctggtcagttagaaacagttttggaaaagtgagctctcggttctgctctgagatggtcagagaagatgcgggccaggagacttactcaggtgggactgggcacagggcaggtatgtgggaggctgggctgcttagtgtcttctagtcacctctgcttgggctgattgacagaggtcagtcattacagccccttatgcctcttccatgggaacaaatactgtgcagatgtttgtaagttaaacataagacacaggggctgttgcttttgaacagaaccctatattactctcctgggatctgagtttctgcaggtcatttgtatgtaggaccaggagtatctcctcaggtgaccagttttggggacccgtatgtggcaaattctaagctgccatattgaacatcatcccactgggagtggttatgttgtatccccatcttggctggcttcagtttttgctgtagccctagagcactttgtttgtgggaggctggcctcttgcctacctccttgcatggacagggggatgaatatttactttcccacctccttgctttttctttcactgataccactgaatggaactggtgctgtgactcctgctgctggggatttatgtcccgagaccttagcctggctgagtggagcctgagacctgcacaacagctcatggtcatgcatgagagagaagtggctggccacagccagagggaacagtaacagcccaggggcctttattttgggaaaggctgtccggggctgttactgtctcttctggttataaagcagacatgtggccatcttttccgcagggttagagtgggctcctttctttttggaatccttttcttctcctttggtagcagctccctgcctccagggcttccgccaccagcgtctctgctgtgttgcgcagtgcagtggggtgcaagggctttgtttctgcctgcctgaaagagagggctctggggatggagatgagaaacaacacgctctccttcagacaatgaggcattctgtcctcctgctgccattcttcatctccactgagagccagagctggtaggagccgagtgccacaggcattctgcattgctctactcttaggtttgtgtgtgtgatccttcccctccctgtcgcccactcctccctcctctggctatcctaccctgtctgtgggctcttttactaccagcctatgctgtgggactgtcatggcatttagttcagagtggaggggctttggcctgaaataaaatgcaagtatttaaaaaaaaaaaaaaaaaactcgggtgggggcccgtacccaattcga

SEQ ID NO: 382406 - DNA, 2124 bp, Homo sapiens
  misc_feature (3)..(3): n is a, c, g, or t
  misc_feature (9)..(9): n is a, c, g, or t
  misc_feature (13)..(14): n is a, c, g, or t
  misc_feature (35)..(35): n is a, c, g, or t
  misc_feature (37)..(38): n is a, c, g, or t
tgnctattnttanntttggaatcctttgcactttngnnccctgcgtgcactctccggcgtcccaagtgagtggaggggggatcccgactccagtccggggccttggccagcggagccgcgctattcggaagcgggaatcccactcagagcccgggcctgtaggggcggggcgtcccgggcacccgggattggggcgtctcccgtcgtgcaccggggcaccggcgactcacccggaaggagaagccgtgatctggctatatggtggggcgcgggcggtgtcgctgtggggagctggtgctgttctcagatgtttccttccaatgggcttttggtgtaggatgtcggagaaccaagaacaggaggaggtgattacagtgcgtgttcaggacccccgagtgcagaatgagggctcctggaactcttatgtggattataagatattcctccataccaacagcaaagcctttactgccaagacttcctgtgtgcggcgccgctaccgtgagttcgtgtggctgagaaagcagctacagagaaatgctggtttggtgcctgttcctgaacttcctgggaagtcaaccttcttcggcacctcagatgagttcattgagaagcgacgacaaggtctgcagcacttccttgaaaaggtcctgcagagtgtggttctcctgtcagacagccagttgcacctattcctgcaaagccagctctcggtgcctgagatagaagcctgtgtccagggccgaagtaccatgactgtgtctgatgccattcttcgatatgctatgtcaaactgtggctgggcccaggaagagaggcagagctcttctcacctggctaaaggagaccagcctaagagttgctgctttcttccaagatcgggtaggaggagctctccctcaccgcctcccagtgaagaaaaggaccatttagaagtgtgggctccagttgttgactctgaggttccttccttggaaagtcccactctcccacccctctcctcaccattatgctgtgattttggaagacccaaagagggaacctccactcttcagtctgtgaggagggctgtgggaggagatcatgctgtgcctttggaccctggtcagttagaaacagttttggaaaagtgagctctcggttctgctctgagatggtcagagaagatgcgggccaggagacttactcaggtgggactgggcacagggcaggtatgtgggaggctgggctgcttagtgtcttctagtcacctctgcttgggctgattgacagaggtcagtcattacagccccttatgcctcttccatgggaacaaatactgtgcagatgtttgtaagttaaacataagacacaggggctgttgcttttgaacagaaccctatattactctcctgggatctgagtttctgcaggtcatttgtatgtaggaccaggagtatctcctcaggtgaccagttttggggacccgtatgtggcaaattctaagctgccatattgaacatcatcccactgggagtggttatgttgtatccccatcttggctggcttcagtttttgctgtagccctagagcactttgtttgtgggaggctggcctcttgcctacctccttgcatggacagggggatgaatatttactttcccacctccttgctttttctttcactgataccactgaatggaactggtgctgtgactcctgctgctggggatttatgtcccgagaccttagcctggctgagtggagcctgagacctgcacaacagctcatggtcatgcatgagagagaagtggctggccacagccagagggaacagtaacagcccaggggcctttattttgggaaaggctgtccggggctgttactgtctcttctggttataaagcagacatgtggccatcttttccgcagggttagagtgggctcctttctttttggaatccttttcttctcctttggtagcagctccctgcctccagggcttccgccaccagcgtctctgctgtgttgcgcagtgcagtggggtgcaagggctttgtttctgccagcctatgctgtgggactgtcatggcatttagttcagagtggaggggctttggcctgaaataaaatgcaagtatttaa

SEQ ID NO: 382407 - DNA, 1602 bp, Homo sapiens
  misc_feature (3)..(3): n is a, c, g, or t
  misc_feature (9)..(9): n is a, c, g, or t
  misc_feature (13)..(14): n is a, c, g, or t
  misc_feature (35)..(35): n is a, c, g, or t
  misc_feature (37)..(38): n is a, c, g, or t
tgnctattnttanntttggaatcctttgcactttngnnccctgcgtgcactctccggcgtcccaagtgagtggaggggggatcccgactccagtccggggccttggccagcggagccgcgctattcggaagcgggaatcccactcagagcccgggcctgtaggggcggggcgtcccgggcacccgggattggggcgtctcccgtcgtgcaccggggcaccggcgactcacccggaaggagaagccgtgatctggctatatggtggggcgcgggcggtgtcgctgtggggagctggtgctgttctcagatgtttccttccaatgggcttttggtgtaggatgtcggagaaccaagaacaggaggaggtgattacagtgcgtgttcaggacccccgagtgcagaatgagggctcctggaactcttatgtggattataagatattcctccataccaacagcaaagcctttactgccaagacttcctgtgtgcggcgccgctaccgtgagttcgtgtggctgagaaagcagctacagagaaatgctggtttggtgcctgttcctgaacttcctgggaagtcaaccttcttcggcacctcagatgagttcattgagaagcgacgacaaggtctgcagcacttccttgaaaaggtcctgcagagtgtggttctcctgtcagacagccagttgcacctattcctgcaaagccagctctcggtgcctgagatagaagcctgtgtccagggccgaagtaccatgactgtgtctgatgccattcttcgatatgctatgtcaaactgtggctgggcccaggaagagaggcagagctcttctcacctggctaaaggagaccagcctaagagttgctgctttcttccaagatcgggtaggaggagctctccctcaccgcctcccagtgaagaaaaggaccatttagaagtgtgggctccagttgttgactctgaggttccttccttggaaagtcccactctcccacccctctcctcaccattatgctgtgattttggaagacccaaagagggaacctccactcttcagtctgtgaggagggctgtgggaggagatcatgctgtgcctttggaccctggtcagttagaaacagttttggaaaagtgagctctcggttctgctctgagatggtcagagaagatgcgggccaggagacttactcaggtgggactgggcacagggcaggtatgtgggaggctgggctgcttagtgtcttctagtcacctctgcttgggctgattgacagaggtcagtcattacagccccttatgcctcttccatgggaacaaatactgtgcagatgtttgtaagttaaacataagacacaggggctgttgcttttgaacagaaccctatattactctcctgggatctgagtttctgcaggtcatttgtatgtaggaccaggagtatctcctcaggtgaccagttttggggacccgtatgtggcaaattctaagctgccatattgaacatcatcccactgggagtggttatgttgtatccccagcagcaggagtcacagcaccagttccattcagtggtatcgtcgacgcgaccgcgaatttagtagtag

SEQ ID NO: 382408 - DNA, 2370 bp, Homo sapiens
  misc_feature (3)..(3): n is a, c, g, or t
  misc_feature (9)..(9): n is a, c, g, or t
  misc_feature (13)..(14): n is a, c, g, or t
  misc_feature (35)..(35): n is a, c, g, or t
  misc_feature (37)..(38): n is a, c, g, or t
tgnctattnttanntttggaatcctttgcactttngnnccctgcgtgcactctccggcgtcccaagtgagtggaggggggatcccgactccagtccggggccttggccagcggagccgcgctattcggaagcgggaatcccactcagagcccgggcctgtaggggcggggcgtcccgggcacccgggattggggcgtctcccgtcgtgcaccggggcaccggcgactcacccggaaggagaagccgtgatctggctatatggtggggcgcgggcggtgtcgctgtggggagctggtgctgttctcagatgtttccttccaatgggcttttggtgtaggatgtcggagaaccaagaacaggaggaggtgattacagtgcgtgttcaggacccccgagtgcagaatgagggctcctggaactcttatgtggattataagatattcctccataccaacagcaaagcctttactgccaagacttcctgtgtgcggcgccgctaccgtgagttcgtgtggctgagaaagcagctacagagaaatgctggtttggtgcctgttcctgaacttcctgggaagtcaaccttcttcggcacctcagatgagttcattgagaagcgacgacaaggtctgcagcacttccttgaaaaggtcctgcagagtgtggttctcctgtcagacagccagttgcacctattcctgcaaagccagctctcggtgcctgagatagaagcctgtgtccagggccgaagtaccatgactgtgtctgatgccattcttcgatatgctatgtcaaactgtggctgggcccaggaagagaggcagagctcttctcacctggctaaaggagaccagcctaagagttgctgctttcttccaagatcgggtaggaggagctctccctcaccgcctcccagtgaagaaaaggaccatttagaagtgtgggctccagttgttgactctgaggttccttccttggaaagtcccactctcccacccctctcctcaccattatgctgtgattttggaagacccaaagagggaacctccactcttcagtctgtgaggagggctgtgggaggagatcatgctgtgcctttggaccctggtcagttagaaacagttttggaaaagtgagctctcggttctgctctgagatggtcagagaagatgcgggccaggagacttactcaggtgggactgggcacagggcaggtatgtgggaggctgggctgcttagtgtcttctagtcacctctgcttgggctgattgacagaggtcagtcattacagccccttatgcctcttccatgggaacaaatactgtgcagatgtttgtaagttaaacataagacacaggggctgttgcttttgaacagaaccctatattactctcctgggatctgagtttctgcaggtcatttgtatgtaggaccaggagtatctcctcaggtgaccagttttggggacccgtatgtggcaaattctaagctgccatattgaacatcatcccactgggagtggttatgttgtatccccatcttggctggcttcagtttttgctgtagccctagagcactttgtttgtgggaggctggcctcttgcctacctccttgcatggacagggggatgaatatttactttcccacctccttgctttttctttcactgataccactgaatggaactggtgctgtgactcctgctgctggggatttatgtcccgagaccttagcctggctgagtggagcctgagacctgcacaacagctcatggtcatgcatgagagagaagtggctggccacagccagagggaacagtaacagcccaggggcctttattttgggaaaggctgtccggggctgttactgtctcttctggttataaagcagacatgtggccatcttttccgcagggttagagtgggctcctttctttttggaatccttttcttctcctttggtagcagctccctgcctccagggcttccgccaccagcgtctctgctgtgttgcgcagtgcagtggggtgcaagggctttgtttctgcctgcctgaaagagagggctctggggatggagatgagaaacaacacgctctccttcagacaatgaggcattctgtcctcctgctgccattcttcatctccactgagagccagagctggtaggagccgagtgccacaggcattctgcattgctctactcttaggtttgtgtgtgtgatccttcccctccctgtcgcccactcctccctcctctggctatcctaccctgtctgtgggctcttttactaccagcctatgctgtgggactgtcatggcatttagttcagagtggaggggctttggcctgaaataaaatgcaagtatttaa

SEQ ID NO: 382409 - DNA, 2316 bp, Homo sapiens
  misc_feature (3)..(3): n is a, c, g, or t
  misc_feature (9)..(9): n is a, c, g, or t
  misc_feature (13)..(14): n is a, c, g, or t
  misc_feature (35)..(35): n is a, c, g, or t
  misc_feature (37)..(38): n is a, c, g, or t
tgnctattnttanntttggaatcctttgcactttngnnccctgcgtgcactctccggcgtcccaagtgagtggaggggggatcccgactccagtccggggccttggccagcggagccgcgctattcggaagcgggaatcccactcagagcccgggcctgtaggggcggggcgtcccgggcacccgggattggggcgtctcccgtcgtgcaccggggcaccggcgactcacccggaaggagaagccgtgatctggctatatggtggggcgcgggcggtgtcgctgtggggagctggtgctgttctcagatgtttccttccaatgggcttttggtgtaggatgtcggagaaccaagaacaggaggaggtgattacagtgcgtgttcaggacccccgagtgcagaatgagggctcctggaactcttatgtggattataagatattcctccataccaacagcaaagcctttactgccaagacttcctgtgtgcggcgccgctaccgtgagttcgtgtggctgagaaagcagctacagagaaatgctggtttggtgcctgttcctgaacttcctgggaagtcaaccttcttcggcacctcagatgagttcattgagaagcgacgacaaggtctgcagcacttccttgaaaaggtcctgcagagtgtggttctcctgtcagacagccagttgcacctattcctgcaaagccagctctcggtgcctgagatagaagcctgtgtccagggccgaagtaccatgactgtgtctgatgccattcttcgatatgctatgtcaaactgtggctgggcccaggaagagaggcagagctcttctcacctggctaaaggagaccagcctaagagttgctgctttcttccaagatcgggtaggaggagctctccctcaccgcctcccagtgaagaaaaggaccatttagaagtgtgggctccagttgttgactctgaggttccttccttggaaagtcccactctcccacccctctcctcaccattatgctgtgattttggaagacccaaagagggaacctccactcttcagtctgtgaggagggctgtgggaggagatcatgctgtgcctttggaccctggtcagttagaaacagttttgggacttactcaggtgggactgggcacagggcaggtatgtgggaggctgggctgcttagtgtcttctagtcacctctgcttgggctgattgacagaggtcagtcattacagccccttatgcctcttccatgggaacaaatactgtgcagatgtttgtaagttaaacataagacacaggggctgttgcttttgaacagaaccctatattactctcctgggatctgagtttctgcaggtcatttgtatgtaggaccaggagtatctcctcaggtgaccagttttggggacccgtatgtggcaaattctaagctgccatattgaacatcatcccactgggagtggttatgttgtatccccatcttggctggcttcagtttttgctgtagccctagagcactttgtttgtgggaggctggcctcttgcctacctccttgcatggacagggggatgaatatttactttcccacctccttgctttttctttcactgataccactgaatggaactggtgctgtgactcctgctgctggggatttatgtcccgagaccttagcctggctgagtggagcctgagacctgcacaacagctcatggtcatgcatgagagagaagtggctggccacagccagagggaacagtaacagcccaggggcctttattttgggaaaggctgtccggggctgttactgtctcttctggttataaagcagacatgtggccatcttttccgcagggttagagtgggctcctttctttttggaatccttttcttctcctttggtagcagctccctgcctccagggcttccgccaccagcgtctctgctgtgttgcgcagtgcagtggggtgcaagggctttgtttctgcctgcctgaaagagagggctctggggatggagatgagaaacaacacgctctccttcagacaatgaggcattctgtcctcctgctgccattcttcatctccactgagagccagagctggtaggagccgagtgccacaggcattctgcattgctctactcttaggtttgtgtgtgtgatccttcccctccctgtcgcccactcctccctcctctggctatcctaccctgtctgtgggctcttttactaccagcctatgctgtgggactgtcatggcatttagttcagagtggaggggctttggcctgaaataaaatgcaagtatttaa

SEQ ID NO: 382410 - DNA, 2112 bp, Homo sapiens
cattcgccgtccctcacccggcacctgcgtgcactctccggcgtcccaaatgtttccttccaatgggcttttggtgtaggatgtcggagaaccaagaacaggaggaggtgattacagtgcgtgttcaggacccccgagtgcagaatgagggctcctggaactcttatgtggattataagatattcctccataccaacagcaaagcctttactgccaagacttcctgtgtgcggcgccgctaccgtgagttcgtgtggctgagaaagcagctacagagaaatgctggtttggtgcctgttcctgaacttcctgggaagtcaaccttcttcggcacctcagatgagttcattgagaagcgacgacaaggtctgcagcacttccttgaaaaggtcctgcagagtgtggttctcctgtcagacagccagttgcacctattcctgcaaagccagctctcggtgcctgagatagaagcctgtgtccagggccgaagtaccatgactgtgtctgatgccattcttcgatatgctatgtcaaactgtggctgggcccaggaagagaggcagagctcttctcacctggctaaaggagaccagcctaagagttgctgctttcttccaagatcgggtaggaggagctctccctcaccgcctcccagtgaagaaaaggaccatttagaagtgtgggctccagttgttgactctgaggttccttccttggaaagtcccactctcccacccctctcctcaccattatgctgtgattttggaagacccaaagagggaacctccactcttcagtctgtgaggagggctgtgggaggagatcatgctgtgcctttggaccctggtcagttagaaacagttttggaaaagtgagctctcggttctgctctgagatggtcagagaagatgcgggccaggagacttactcaggtgggactgggcacagggcaggtatgtgggaggctgggctgcttagtgtcttctagtcacctctgcttgggctgattgacagaggtcagtcattacagccccttatgcctcttccatgggaacaaatactgtgcagatgtttgtaagttaaacataagacacaggggctgttgcttttgaacagaaccctatattactctcctgggatctgagtttctgcaggtcatttgtatgtaggaccaggagtatctcctcaggtgaccagttttggggacccgtatgtggcaaattctaagctgccatattgaacatcatcccactgggagtggttatgttgtatccccatcttggctggcttcagtttttgctgtagccctagagcactttgtttgtgggaggctggcctcttgcctacctccttgcatggacagggggatgaatatttactttcccacctccttgctttttctttcactgataccactgaatggaactggtgctgtgactcctgctgctggggatttatgtcccgagaccttagcctggctgagtggagcctgagacctgcacaacagctcatggtcatgcatgagagagaagtggctggccacagccagagggaacagtaacagcccaggggcctttattttgggaaaggctgtccggggctgttactgtctcttctggttataaagcagacatgtggccatcttttccgcagggttagagtgggctcctttctttttggaatccttttcttctcctttggtagcagctccctgcctccagggcttccgccaccagcgtctctgctgtgttgcgcagtgcagtggggtgcaagggctttgtttctgcctgcctgaaagagagggctctggggatggagatgagaaacaacacgctctccttcagacaatgaggcattctgtcctcctgctgccattcttcatctccactgagagccagagctggtaggagccgagtgccacaggcattctgcattgctctactcttaggtttgtgtgtgtgatccttcccctccctgtcgcccactcctccctcctctggctatcctaccctgtctgtgggctcttttactaccagcctatgctgtgggactgtcatggcatttagttcagagtggaggggctttggcctgaaataaaatgcaagtatttaa

SEQ ID NO: 382411 - DNA, 3226 bp, Homo sapiens
  misc_feature (3)..(3): n is a, c, g, or t
  misc_feature (9)..(9): n is a, c, g, or t
  misc_feature (13)..(14): n is a, c, g, or t
  misc_feature (35)..(35): n is a, c, g, or t
  misc_feature (37)..(38): n is a, c, g, or t
tgnctattnttanntttggaatcctttgcactttngnnccctgcgtgcactctccggcgtcccaagtgagtggaggggggatcccgactccagtccggggccttggccagcggagccgcgctattcggaagcgggaatcccactcagagcccgggcctgtaggggcggggcgtcccgggcacccgggattggggcgtctcccgtcgtgcaccggggcaccggcgactcacccggaaggagaagccgtgatctggctatatggtggggcgcgggcggtgtcgctgtggggagctggtgctgttctcagatgtttccttccaatgggcttttggtgtaggatgtcggagaaccaagaacaggaggaggtgattacagtgcgtgttcaggacccccgagtgcagaatgagggctcctggaactcttatgtggattataagatattcctccataccaacagcaaagcctttactgccaagacttcctgtgtgcggcgccgctaccgtgagttcgtgtggctgagaaagcagctacagagaaatgctggtttggtgcctgttcctgaacttcctgggaagtcaaccttcttcggcacctcagatgagttcattgagaagcgacgacaaggtctgcagcacttccttgaaaaggtcctgcagagtgtggttctcctgtcagacagccagttgcacctattcctgcaaagccagctctcggtgcctgagatagaagcctgtgtccagggccgaagtaccatgactgtgtctgatgccattcttcgatatgctatgtcaaactgtggctgggcccaggaagagaggcagagctcttctcacctggctaaaggagaccagcctaagagttgctgctttcttccaagatcgggtaggaggagctctccctcaccgcctcccagtgaagaaaaggaccatttagaagtgtgggctccagttgttgactctgaggttccttccttggaaagtcccactctcccacccctctcctcaccattatgctgtgattttggaagacccaaagagggaacctccactcttcagtctgtgaggagggctgtgggaggagatcatgctgtgcctttggaccctggtcagttagaaacagttttggaaaagtgagctctcggttctgctctgagatggtcagagaagatgcgggccaggagacttactcaggtgggactgggcacagggcaggtatgtgggaggctgggctgcttagtgtcttctagtcacctctgcttgggctgattgacagaggtcagtcattacagccccttatgcctcttccatgggaacaaatactgtgcagatgtttgtaagttaaacataagacacaggggctgttgcttttgaacagaaccctatattactctcctgggatctgagtttctgcaggtcatttgtatgtaggaccaggagtatctcctcaggtgaccagttttggggacccgtatgtggcaaattctaagctgccatattgaacatcatcccactgggagtggttatgttgtatccccatcttggctggcttcagtttttgctgtagccctagagcactttgtttgtgggaggctggcctcttgcctacctccttgcatggacagggggatgaatatttactttcccacctccttgctttttctttcactgataccactgaatggaactggtgctgtgactcctgctgctggggatttatgtcccgagaccttagcctggctgagtggagcctgagacctgcacaacagctcatggtcatgcatgagagagaagtggctggccacagccagagggaacagtaacagcccaggggcctttattttgggaaaggctgtccggggctgttactgtctcttctggttataaagcagacatgtggccatcttttccgcagggttagagtgggctcctttctttttggaatccttttcttctcctttggtagcagctccctgcctccagggcttccgccaccagcgtctctgctgtgttgcgcagtgcagtggggtgcaagggctttgtttctgcctgcctgaaagagagggctctggggatggagatgagaaacaacacgctctccttcagacaatgaggcattctgtcctcctgctgccattcttcatctccactgagagccagagctggtaggagccgagtgccacaggcattctgcattgctctactcttaggtttgtgtgtgtgatccttcccctccctgtcgcccactcctccctcctctggctatcctaccctgtctgtgggctcttttactaccagcctatgctgtgggactgtcatggcatttagttcagagtggaggggctttggcctgaaataaaatgcaagtatttaagattgttgttgcaatttgtgtctaacaagctgtagcagagaaggagggagtgagcgctggcagtatttcctttcataaatcatgaatttatcagtgtggaaataatgcttcagaactgtgctctgtagccctcctgcattgtgtgtgcagctcaagttcaccactggaggaaggattgtcttccaaagagctgggatccaactcttctcacagttctgggcgtgaaccttgttaggtatactttacctgatgctgcttccatcctcgcagtctgtctgaggtgccaggtgctgaaagagaaataaagtttgtcaacaggcagatgcaaagccctggctggtattcatccctctttcctgcccgcctcccctgggtctctcctttatatgatgcagcagagcaaggcgaggatagaaaacctacagaggcaaatccaaaatgtcagaagaagttcatttaaaaggggaaaaaaactccatgtgcaaccctcacaaaaacccgacagatgctaagctaatggcatccgctctgccgattggtggggatggctcatgaatattaatgagcccaatgctccaaatggtgcagctgtgaacccagctgtgcctgaagctctctgatctcgaaacttccagacaggagctggaggtggtctgtgtcaattccctactcagccaaaaaaacagcaagctgggttggccttcttctgtttgctccttttcttcctggagttggtgctcagcagctagttctgccagccggctaggctgctgggacagcaggagccattcaaagacatggatgtgatttttctgactcccagcttttttaatgatccattagcagcatgcataca

SEQ ID NO: 382412 - DNA, 2255 bp, Homo sapiens
  misc_feature (3)..(3): n is a, c, g, or t
  misc_feature (9)..(9): n is a, c, g, or t
  misc_feature (13)..(14): n is a, c, g, or t
  misc_feature (35)..(35): n is a, c, g, or t
  misc_feature (37)..(38): n is a, c, g, or t
tgnctattnttanntttggaatcctttgcactttngnnccctgcgtgcactctccggcgtcccaagtgagtggaggggggatcccgactccagtccggggccttggccagcggagccgcgctattcggaagcgggaatcccactcagagcccgggcctgtaggggcggggcgtcccgggcacccgggattggggcgtctcccgtcgtgcaccggggcaccggcgactcacccggaaggagaagccgtgatctggctatatggtggggcgcgggcggtgtcgctgtggggagctggtgctgttctcagatgtttccttccaatgggcttttggtgtaggatgtcggagaaccaagaacaggaggaggtgattacagtgcgtgttcaggacccccgagtgcagaatgagggctcctggaactcttatgtggattataagatattcctccataccaacagcaaagcctttactgccaagacttcctgtgtgcggcgccgctaccgtgagttcgtgtggctgagaaagcagctacagagaaatgctggtttggtgcctgttcctgaacttcctgggaagtcaaccttcttcggcacctcagatgagttcattgagaagcgacgacaaggtctgcagcacttccttgaaaaggtcctgcagagtgtggttctcctgtcagacagccagttgcacctattcctgcaaagccagctctcggtgcctgagatagaagcctgtgtccagggccgaagtaccatgactgtgtctgatgccattcttcgatatgctatgtcaaactgtggctgggcccaggaagagaggcagagctcttctcacctggctaaaggagaccagcctaagagttgctgctttcttccaagatcgggtaggaggagctctccctcaccgcctcccagtgaagaaaaggaccatttagaagtgtgggctccagttgttgactctgaggttccttccttggaaagtcccactctcccacccctctcctcaccattatgctgtgattttggaagacccaaagagggaacctccactcttcagtctgtgaggagggctgtgggaggagatcatgctgtgcctttggaccctggtcagttagaaacagttttggaaaagtgagctctcggttctgctctgagatggtcagagaagatgcgggccaggagacttactcaggtgggactgggcacagggcaggtatgtgggaggctgggctgcttagtgtcttctagtcacctctgcttgggctgattgacagaggtcagtcattacagccccttatgcctcttccatgggaacaaatactgtgcagatgtttgtaagttaaacataagacacaggggctgttgcttttgaacagaaccctatattactctcctgggatctgagtttctgcaggtcatttgtatgtaggaccaggagtatctcctcaggtgaccagttttggggacccgtatgtggcaaattctaagctgccatattgaacatcatcccactgggagtggttatgttgtatccccatcttggctggcttcagtttttgctgtagccctagagcactttgtttgtgggaggctggcctcttgcctacctccttgcatggacagggggatgaatatttactttcccacctccttgctttttctttcactgataccactgaatggaactggtgctgtgactcctgctgctggggatttatgtcccgagaccttagcctggctgagtggagcctgagacctgcacaacagctcatggtcatgcatgagagagaagtggctggccacagccagagggaacagtaacagcccaggggcctttattttgggaaaggctgtccggggctgttactgtctcttctggttataaagcagacatgtggccatcttttccgcagggttagagtgggctcctttctttttggaatccttttcttctcctttggtagcagctccctgcctccagggcttccgccaccagcgtctctgctgtgttgcgcagtgcagtggggtgcaagggctttgtttctgcctgcctgaaagagagggctctggggatggagatgagaaacaacacgctctccttcagacaatgaggcattctgtcctcctgctgccattcttcatctccactgagagcctgtctgtgggctcttttactaccagcctatgctgtgggactgtcatggcatttagttcagagtggaggggctttggcctgaaataaaatgcaagtatttaa

SEQ ID NO: 382413 - DNA, 800 bp, Homo sapiens
  misc_feature (3)..(3): n is a, c, g, or t
  misc_feature (9)..(9): n is a, c, g, or t
  misc_feature (13)..(14): n is a, c, g, or t
  misc_feature (35)..(35): n is a, c, g, or t
  misc_feature (37)..(38): n is a, c, g, or t
tgnctattnttanntttggaatcctttgcactttngnnccctgcgtgcactctccggcgtcccaagtgagtggaggggggatcccgactccagtccggggccttggccagcggagccgcgctattcggaagcgggaatcccactcagagcccgggcctgtaggggcggggcgtcccgggcacccgggattggggcgtctcccgtcgtgcaccggggcaccggcgactcacccggaaggagaagccgtgatctggctatatggtggggcgcgggcggtgtcgctgtggggagctggtgctgttctcaggagccagcctggatcatttgttggcagtacatattggctgaagtcagttttcatttcaagatgtttccttccaatgggcttttggtgtaggatgtcggagaaccaagaacaggaggtaagagtatggtctgcagagaacaggaggtgattacagtgcgtgttcaggacccccgagtgcagaatgagggctcctggaactcttatgtggattataagatattcctccataccaacagcaaagcctttactgccaagacttcctgtgtgcggcgccgctaccgtgagttcgtgtggctgagaaagcagctacagagaaatgctggtttggtgtgagtttgctcttgcttccttcttgggtctgtgactggctttttgggtgcttatgtaggaactggagttgacaatgaagagaacttgcaacataccaggcactaaggaaattgggaaatatgttgtttctttttttgttttttgggtttttttttttttttga

SEQ ID NO: 382414 - DNA, 233 bp, Homo sapiens
aataattttttaaaaatactcaagtactttgatgtttgaactgcagagaatttttgaaaaattgcctacttatttttttttgttttagccaaaaggccaagaagtgataattgcctatttattttcaaaagttgattaatgatacgttgccattttataccattaaattgttgtcccatttattttgatattttaataagaattgcttgttccacatgagaatttcatacctc

SEQ ID NO: 382415 - DNA, 559 bp, Homo sapiens
tttgggcactatttcaaattattaggcttctggaaagagtgcttccagggacagcaagttactactgcacttgaccattcctagtcctcacctgattaccagaaggtacgcaaggtaaaagttagctgataggccctgaattgagaaaaaggaatcaccaagcaatatccgtaacattacacattttgccagcacattttctatgctatcagctaaaacgtaattttggtcacaaaatagggctgtagtgtagtttctacttcttattccagttgtttgattatgaggatacatttcttgctgctgtcctccactaaacagcagacaaattgccaggtgtgctggctcatgcctgtaatcccagtgctttgggaggccaaggcaggagtttgagaccagcctaggcaacatcgtgagaccccatctctacaaaaaaaaaaaaagaaaaaaaaaattagttgggcatggcaatgccgcctgtggtcctagctactggggaggctgaggcaggattgcttgaacccagaagtttgaggttacagtgagctatgatcatgtc

SEQ ID NO: 382416 - DNA, 256 bp, Homo sapiens
catagacctaatgccaggttacagaaaattcactggagagagaaataacaccacaagaaatcaatcagtcagaagagaatgcagggtcttctacaagacaactgacccagtctcttcaaaaaagttaatgtcatttttctaaaaaggttggaagattcttctattcttctagattaaaaaaagttggagatgtataactcaatgcaatatatgaaccttgcttggatcctagtttggaaaaaaaaaaaagctataa

SEQ ID NO: 382417 - DNA, 1532 bp, Homo sapiens
gcaccaagctggccctgcacggctgcaagggaggctcctgtggacaggccaggcaggtgggcctcaggaggtgcctccaggcggccagtgggcctgaggccccagcaagggctagggtccatctccagtcccaggacacagcagcggccaccatggccacgcctgggctccagcagcatcagcagcccccaggaccggggaggcacaggtggcccccaccacccggaggagcagctcctgcccctgtccgggggatgactgattctcctccgccaggccacccagaggagaaggccaccccgcctggaggcacaggccatgaggggctctcaggaggtgctgctgatgtggcttctggtgttggcagtgggcggcacagagcacgcctaccggcccggccgtagggtgtgtgctgtccgggctcacggggaccctgtctccgagtcgttcgtgcagcgtgtgtaccagcccttcctcaccacctgcgacgggcaccgggcctgcagcacctaccgaaccatctataggaccgcctaccgccgcagccctgggctggcccctgccaggcctcgctacgcgtgctgccccggctggaagaggaccagcgggcttcctggggcctgtggagcagcaatatgccagccgccatgccggaacggagggagctgtgtccagcctggccgctgccgctgccctgcaggatggcggggtgacacttgccagtcagatgtggatgaatgcagtgctaggaggggcggctgtccccagcgctgcgtcaacaccgccggcagttactggtgccagtgttgggaggggcacagcctgtctgcagacggtacactctgtgtgcccaagggagggccccccagggtggcccccaacccgacaggagtggacagtgcaatgaaggaagaagtgcagaggctgcagtccagggtggacctgctggaggagaagctgcagctggtgctggccccactgcacagcctggcctcgcaggcactggagcatgggctcccggaccccggcagcctcctggtgcactccttccagcagctcggccgcatcgactccctgagcgagcagatttccttcctggaggagcagctggggtcctgctcctgcaagaaagactcgtgactgcccagcgccccaggctggactgagcccctcacgccgccctgcagcccccatgcccctgcccaacatgctgggggtccagaagccacctcggggtgactgagcggaaggccaggcagggccttcctcctcttcctcctccccttcctcgggaggctccccagaccctggcatgggatgggctgggatcttctctgtgaatccacccctggctacccccaccctggctaccccaacggcatcccaaggccaggtgggccctcagctgagggaaggtacgagctccctgctggagcctgggacccatggcacaggccaggcagcccggaggctgggtggggcctcagtgggggctgctgcctgacccccagcacaataaaaatgaaacgtga

SEQ ID NO: 382418 - DNA, 1286 bp, Homo sapiens
gggcggcgcgtgcgcgccccggatccggcggccacccagaggagaaggccaccccgcctggaggcacaggccatgaggggctctcaggaggtgctgctgatgtggcttctggtgttggcagtgggcggcacagagcacgcctaccggcccggccgtagggtgtgtgctgtccgggctcacggggaccctgtctccgagtcgttcgtgcagcgtgtgtaccagcccttcctcaccacctgcgacgggcaccgggcctgcagcacctaccgaaccatctataggaccgcctaccgccgcagccctgggctggcccctgccaggcctcgctacgcgtgctgccccggctggaagaggaccagcgggcttcctggggcctgtggagcagcaatatgccagccgccatgccggaacggagggagctgtgtccagcctggccgctgccgctgccctgcaggatggcggggtgacacttgccagtcagatgtggatgaatgcagtgctaggaggggcggctgtccccagcgctgcgtcaacaccgccggcagttactggtgccagtgttgggaggggcacagcctgtctgcagacggtacactctgtgtgcccaagggagggccccccagggtggcccccaacccgacaggagtggacagtgcaatgaaggaagaagtgcagaggctgcagtccagggtggacctgctggaggagaagctgcagctggtgctggccccactgcacagcctggcctcgcaggcactggagcatgggctcccggaccccggcagcctcctggtgcactccttccagcagctcggccgcatcgactccctgagcgagcagatttccttcctggaggagcagctggggtcctgctcctgcaagaaagactcgtgactgcccagcgccccaggctggactgagcccctcacgccgccctgcagcccccatgcccctgcccaacatgctgggggtccagaagccacctcggggtgactgagcggaaggccaggcagggccttcctcctcttcctcctccccttcctcgggaggctccccagaccctggcatgggatgggctgggatcttctctgtgaatccacccctggctacccccaccctggctaccccaacggcatcccaaggccaggtgggccctcagctgagggaaggtacgagctccctgctggagcctgggacccatggcacaggccaggcagcccggaggctgggtggggcctcagtgggggctgctgcctgacccccagcacaataaaaatgaaacgtga

SEQ ID NO: 382419 - DNA, 390 bp, Homo sapiens
tccctcctttgcaccctgtaaagggtcagggtgaatcagatgggggactgagcaagtagctatgactgcagatcatgtaaggaagggcctgacaagaagctcccagatgctggggagaatcttcctcctcttcctcctccccttcctcgggaggctccccagaccctggcatgggatgggctgggatcttctctgtgaatccacccctggctacccccaccctggctaccccaacggcatcccaaggccaggtgggccctcagctgagggaaggtacgagctccctgctggagcctgggacccatggcacaggccaggcagcccggaggctgggtggggcctcagtgggggctgctgcctgacccccagcacaataaaaatgaaacgtga

SEQ ID NO: 382420 - DNA, 1521 bp, Homo sapiens
cgcgccacctgagatgcccaggctggcctctgccaggggcttagtctgccctctcctggggcttcagaggccaaaagcaccctggtgaggggtccgggaggcccgggagggcccggggggctctgccaggcccctccacgcctctctgcccagccagcacgctctgggaagcagcccccaggaccggggaggcacaggtggcccccaccacccggaggagcagctcctgcccctgtccgggggatgactgattctcctccgccaggccacccagaggagaaggccaccccgcctggaggcacaggccatgaggggctctcaggaggtgctgctgatgtggcttctggtgttggcagtgggcggcacagagcacgcctaccggcccggccgtagggtgtgtgctgtccgggctcacggggaccctgtctccgagtcgttcgtgcagcgtgtgtaccagcccttcctcaccacctgcgacgggcaccgggcctgcagcacctaccgaaccatctataggaccgcctaccgccgcagccctgggctggcccctgccaggcctcgctacgcgtgctgccccggctggaagaggaccagcgggcttcctggggcctgtggagcagcaatatgccagccgccatgccggaacggagggagctgtgtccagcctggccgctgccgctgccctgcaggatggcggggtgacacttgccagtcagatgtggatgaatgcagtgctaggaggggcggctgtccccagcgctgcgtcaacaccgccggcagttactggtgccagtgttgggaggggcacagcctgtctgcagacggtacactctgtgtgcccaagggagggccccccagggtggcccccaacccgacaggagtggacagtgcaatgaaggaagaagtgcagaggctgcagtccagggtggacctgctggaggagaagctgcagctggtgctggccccactgcacagcctggcctcgcaggcactggagcatgggctcccggaccccggcagcctcctggtgcactccttccagcagctcggccgcatcgactccctgagcgagcagatttccttcctggaggagcagctggggtcctgctcctgcaagaaagactcgtgactgcccagcgccccaggctggactgagcccctcacgccgccctgcagcccccatgcccctgcccaacatgctgggggtccagaagccacctcggggtgactgagcggaaggccaggcagggccttcctcctcttcctcctccccttcctcgggaggctccccagaccctggcatgggatgggctgggatcttctctgtgaatccacccctggctacccccaccctggctaccccaacggcatcccaaggccaggtgggccctcagctgagggaaggtacgagctccctgctggagcctgggacccatggcacaggccaggcagcccggaggctgggtggggcctcagtgggggctgctgcctgacccccagcacaataaaaatgaaacgtga

SEQ ID NO: 382421 - DNA, 1413 bp, Homo sapiens
gccagcggaggagagagtgggcgccaccgtggggctgtcccaccggtggaggctccagcggagatgagctgggcaggcctcgcggagcaagtgcaaactgcacccgcgtcctgggggcatctgcggggagacttaggggtcatgctttgtgccccaggccacccagaggagaaggccaccccgcctggaggcacaggccatgaggggctctcaggaggtgctgctgatgtggcttctggtgttggcagtgggcggcacagagcacgcctaccggcccggccgtagggtgtgtgctgtccgggctcacggggaccctgtctccgagtcgttcgtgcagcgtgtgtaccagcccttcctcaccacctgcgacgggcaccgggcctgcagcacctaccgaaccatctataggaccgcctaccgccgcagccctgggctggcccctgccaggcctcgctacgcgtgctgccccggctggaagaggaccagcgggcttcctggggcctgtggagcagcaatatgccagccgccatgccggaacggagggagctgtgtccagcctggccgctgccgctgccctgcaggatggcggggtgacacttgccagtcagatgtggatgaatgcagtgctaggaggggcggctgtccccagcgctgcgtcaacaccgccggcagttactggtgccagtgttgggaggggcacagcctgtctgcagacggtacactctgtgtgcccaagggagggccccccagggtggcccccaacccgacaggagtggacagtgcaatgaaggaagaagtgcagaggctgcagtccagggtggacctgctggaggagaagctgcagctggtgctggccccactgcacagcctggcctcgcaggcactggagcatgggctcccggaccccggcagcctcctggtgcactccttccagcagctcggccgcatcgactccctgagcgagcagatttccttcctggaggagcagctggggtcctgctcctgcaagaaagactcgtgactgcccagcgccccaggctggactgagcccctcacgccgccctgcagcccccatgcccctgcccaacatgctgggggtccagaagccacctcggggtgactgagcggaaggccaggcagggccttcctcctcttcctcctccccttcctcgggaggctccccagaccctggcatgggatgggctgggatcttctctgtgaatccacccctggctacccccaccctggctaccccaacggcatcccaaggccaggtgggccctcagctgagggaaggtacgagctccctgctggagcctgggacccatggcacaggccaggcagcccggaggctgggtggggcctcagtgggggctgctgcctgacccccagcacaataaaaatgaaacgtga

SEQ ID NO: 382422 - DNA, 1048 bp, Homo sapiens
gggcggcgcgtgcgcgccccggatccggcgccgtagggtgtgtgctgtccgggctcacggggaccctgtctccgagtcgttcgtgcagcgtgtgtaccagcccttcctcaccacctgcgacgggcaccgggcctgcagcacctaccgcaatatgccagccgccatgccggaacggagggagctgtgtccagcctggccgctgccgctgccctgcaggatggcggggtgacacttgccagtcagatgtggatgaatgcagtgctaggaggggcggctgtccccagcgctgcgtcaacaccgccggcagttactggtgccagtgttgggaggggcacagcctgtctgcagacggtacactctgtgtgcccaagggagggccccccagggtggcccccaacccgacaggagtggacagtgcaatgaaggaagaagtgcagaggctgcagtccagggtggacctgctggaggagaagctgcagctggtgctggccccactgcacagcctggcctcgcaggcactggagcatgggctcccggaccccggcagcctcctggtgcactccttccagcagctcggccgcatcgactccctgagcgagcagatttccttcctggaggagcagctggggtcctgctcctgcaagaaagactcgtgactgcccagcgccccaggctggactgagcccctcacgccgccctgcagcccccatgcccctgcccaacatgctgggggtccagaagccacctcggggtgactgagcggaaggccaggcagggccttcctcctcttcctcctccccttcctcgggaggctccccagaccctggcatgggatgggctgggatcttctctgtgaatccacccctggctacccccaccctggctaccccaacggcatcccaaggccaggtgggccctcagctgagggaaggtacgagctccctgctggagcctgggacccatggcacaggccaggcagcccggaggctgggtggggcctcagtgggggctgctgcctgacccccagcacaataaaaatgaaacgtga

SEQ ID NO: 382423 - DNA, 907 bp, Homo sapiens
cattcggcacgagaacgccgctgagacctcagccttgacctccctcagcgtggccgggaccctgagcctctgcgcagagccacccgccccgacgtacttaggcggcatagcctgagacctctggccagcgccaggcaggcagcgggggcggcagaggcctgggctgagtcttctggctctgcctctccctggggacaggagggagcctgggggtgtgggtggggagccggccggccgtgacccagcgcctggctctgcccgcaggagtggacagtgcaatgaaggaagaagtgcagaggctgcagtccagggtggacctgctggaggagaagctgcagctggtgctggccccactgcacagcctggcctcgcaggcactggagcatgggctcccggaccccggcagcctcctggtgcactccttccagcagctcggccgcatcgactccctgagcgagcagatttccttcctggaggagcagctggggtcctgctcctgcaagaaagactcgtgactgcccagcgccccaggctggactgagcccctcacgccgccctgcagcccccatgcccctgcccaacatgctgggggtccagaagccacctcggggtgactgagcggaaggccaggcagggccttcctcctcttcctcctccccttcctcgggaggctccccagaccctggcatgggatgggctgggatcttctctgtgaatccacccctggctacccccaccctggctaccccaacggcatcccaaggccaggtgggccctcagctgagggaaggtacgagctccctgctggagcctgggacccatggcacaggccaggcagcccggaggctgggtggggcctcagtgggggctgctgcctgacccccagcacaataaaaatgaaacgtga

SEQ ID NO: 382424 - DNA, 1124 bp, Homo sapiens
gggcggcgcgtgcgcgccccggatccggcggccacccagaggagaaggccaccccgcctggaggcacaggccatgaggggctctcaggaggtgctgctgatgtggcttctggtgttggcagtgggcggcacagagcacgcctaccggcccggccgtagggtgtgtgctgtccgggctcacggggaccctgtctccgagtcgttcgtgcagcgtgtgtaccagcccttcctcaccacctgcgacgggcaccgggcctgcagcacctaccgaaccatctataggaccgcctaccgccgcagccctgggctggcccctgccaggcctcgctacgcgtgctgccccggctggaagaggaccagcgggcttcctggggcctgtggagcagcaatatgccagccgccatgccggaacggagggagctgtgtccagcctggccgctgccgctgccctgcaggatggcggggtgacacttgccagtcaggagtggacagtgcaatgaaggaagaagtgcagaggctgcagtccagggtggacctgctggaggagaagctgcagctggtgctggccccactgcacagcctggcctcgcaggcactggagcatgggctcccggaccccggcagcctcctggtgcactccttccagcagctcggccgcatcgactccctgagcgagcagatttccttcctggaggagcagctggggtcctgctcctgcaagaaagactcgtgactgcccagcgccccaggctggactgagcccctcacgccgccctgcagcccccatgcccctgcccaacatgctgggggtccagaagccacctcggggtgactgagcggaaggccaggcagggccttcctcctcttcctcctccccttcctcgggaggctccccagaccctggcatgggatgggctgggatcttctctgtgaatccacccctggctacccccaccctggctaccccaacggcatcccaaggccaggtgggccctcagctgagggaaggtacgagctccctgctggagcctgggacccatggcacaggccaggcagcccggaggctgggtggggcctcagtgggggctgctgcctgacccccagcacaataaaaatgaaacgtga

SEQ ID NO: 382425 - DNA, 1708 bp, Homo sapiens
gcaccaagctggccctgcacggctgcaagggaggctcctgtggacaggccaggcaggtgggcctcaggaggtgcctccaggcggccagtgggcctgaggccccagcaagggctagggtccatctccagtcccaggacacagcagcggccaccatggccacgcctgggctccagcagcatcagcagcccccaggaccggggaggcacaggtggcccccaccacccggaggagcagctcctgcccctgtccgggggatgactgattctcctccgccaggccacccagaggagaaggccaccccgcctggaggcacaggccatgaggggctctcaggaggtgctgctgatgtggcttctggtgttggcagtgggcggcacagagcacgcctaccggcccggccgtagggtgtgtgctgtccgggctcacggggaccctgtctccgagtcgttcgtgcagcgtgtgtaccagcccttcctcaccacctgcgacgggcaccgggcctgcagcacctaccgaaccatctataggaccgcctaccgccgcagccctgggctggcccctgccaggcctcgctacgcgtgctgccccggctggaagaggaccagcgggcttcctggggcctgtggagcagcaatatgccagccgccatgccggaacggagggagctgtgtccagcctggccgctgccgctgccctgcaggatggcggggtgacacttgccagtcagatgtggatgaatgcagtgctaggaggggcggctgtccccagcgctgcgtcaacaccgccggcagttactggtgccagtgttgggaggggcacagcctgtctgcagacggtacactctgtgtgcccaagggagggccccccagggtggcccccaacccgacaggagtggacagtgcaatgaaggaagaagtgcagaggctgcagtccagggtggacctgctggaggagaagctgcagctggtgctggccccactgcacagcctggcctcgcaggcactggagcatgggctcccggaccccggcagcctcctggtgcactccttccagcagctcggccgcatcgactccctgagcgagcagatttccttcctggaggagcagctggggtcctgctcctgcaagaaagactcgtgactgcccagcgccccaggctggactgagcccctcacgccgccctgcagcccccatgcccctgcccaacatgctgggggtccagaagccacctcggggtgactgagcggaaggccaggcagggccttcctcctcttcctcctccccttcctcgggaggctccccagaccctggcatgggatgggctgggatcttctctgtgaatccacccctggctacccccaccctggctaccccaacggcatcccaaggccaggtgggccctcagctgagggaaggtacgagctccctgctggagcctgggacccatggcacaggccaggcagcccggaggctgggtggggcctcagtgggggctgctgcctgacccccagcacaataaaaatgaaacgtgaaaaacaaacaaaacaaaaaacacaaaaaccacacaaaaaaaaaaaaaacgaagagaaataaaaagaggacgaaaacaccaaacaagagagcagggccacaccgaaccacacacaagagaacgaacaaggagaaacggcgcgcccaaagagaagaaacagagaacgggcaacagcaa

SEQ ID NO: 382426 - DNA, 1091 bp, Homo sapiens
gcaccaagctggccctgcacggctgcaagggaggctcctgtggacaggccaggcaggtgggcctcaggaggtgcctccaggcggccagtgggcctgaggccccagcaagggctagggtccatctccagtcccaggacacagcagcggccaccatggccacgcctgggctccagcagcatcagcagcccccaggaccggggaggcacaggtggcccccaccacccggaggagcagctcctgcccctgtccgggggatgactgattctcctccgccaggccacccagaggagaaggccaccccgcctggaggcacaggccatgaggggctctcaggaggtgctgctgatgtggcttctggtgttggcagtgggcggcacagagcacgcctaccggcccggccgtagggtgtgtgctgtccgggctcacggggaccctgtctccgagtcgttcgtgcagcgtgtgtaccagcccttcctcaccacctgcgacgggcaccgggcctgcagcacctaccgaaccatctataggaccgcctaccgccgcagccctgggctggcccctgccaggcctcgctacgcgtgctgccccggctggaagaggaccagcgggcttcctggggcctgtggagcagcaatatgccagccgccatgccggaacggagggagctgtgtccagcctggccgctgccgctgccctgcaggatggcggggtgacacttgccagtcagatgtggatgaatgcagtgctaggaggggcggctgtccccagcgctgcgtcaacaccgccggcagttactggtgccagtgttgggaggggcacagcctgtctgcagacggtacactctgtgtgcccaagggagggccccccagggtggcccccaacccgacaggagtggacagtgcaatgaaggaagaagtgcagaggctgcagtccagggtggacctgctggaggagaagctgcagctggtgctggccccactgcacagcctggcctcgcaggcactggagcatgggctcccggaccccggcagcctcctggtgcactccctttccaaggacacagcatttccgagacccgcacatcagactac

SEQ ID NO: 382427 - DNA, 803 bp, Homo sapiens
gcaccaagctggccctgcacggctgcaagggaggctcctgtggacaggccaggcaggtgggcctcaggaggtgcctccaggcggccagtgggcctgaggccccagcaagggctagggtccatctccagtcccaggacacagcagcggccaccatggccacgcctgggctccagcagcatcagcagcccccaggaccggggaggcacaggtggcccccaccacccggaggagcagctcctgcccctgtccgggggatgactgattctcctccgccaggccacccagaggagaaggccaccccgcctggaggcacaggccatgaggggctctcaggaggtgctgctgatgtggcttctggtgttggcagtgggcggcacagagcacgcctaccggcccggccgtagggtgtgtgctgtccgggctcacggggaccctgtctccgagtcgttcgtgcagcgtgtgtaccagcccttcctcaccacctgcgacgggcaccgggcctgcagcacctaccgaaccatctataggaccgcctaccgccgcagccctgggctggcccctgccaggcctcgctacgcgtgctgccccggctggaagaggaccagcgggcttcctggggcctgtggagcaggtgagggctatgtccctcggcgcccggtgttaggagggcgactgttccccaatcttccagcaacgctcctgctgcttttcttgaaccccgagcaaagcaccaccttgccgcagagcacccactccctagcagctgcccccacagggtgctggggacccaactgagctggtga

SEQ ID NO: 382428 - DNA, 224 bp, Homo sapiens
ggcggggaggctgtggggagcagtgatctctgaccttcgcctcatccaaccctaggctcctgcaagaaagactcgtgactgcccagcgccccaggctggactgagcccctcacgccgccctgcagcccccatgcccctgcccaacatgctgggggtccagaagccacctcggggtgactgagcggaaggccaggcagggccttcctcctcttcctcctcccctt

SEQ ID NO: 382429 - DNA, 260 bp, Homo sapiens
gagcctccctgcaccaagctggccctgcacggctgcaagggaggctcctgtggacaggccaggcaggtgggcctcaggaggtgcctccaggcggccagtgggcctgaggccccagcaagggctagggtccatctccagtcccaggacacagcagcggccaccatggccacgcctgggctccagcagcatcaggtatggcaggggtggcctcggaggggcagggagcggacagggcgggccccccattcccctcactcccg

SEQ ID NO: 382430 - DNA, 264 bp, Homo sapiens
gacgtacttaggcggcatagcctgagacctctggccagcgccaggcaggcagcgggggcggcagaggcctgggctgagtcttctggctctgcctctccctggggacaggagggagcctgggggtgtgggtggggagccggccggccgtgacccagcgcctggctctgcccgcaggagtggacagtgcaatgaaggaagaagtgcagaggctgcagtccagggtggacctgctggaggaggtgaggcattggtgggggggggggg

SEQ ID NO: 382431 - DNA, 1607 bp, Homo sapiens
cattcggcacgagaacgccgctgagacctcagccttgacctccctcagcgtggccgggaccctgagcctctgcgcagagccacccgccccgacgtacttaggcggcatagcctgagacctctggccagcgccaggcaggcagcgggggcggcagaggcctgggctgagtcttctggctctgcctctccctggggacaggagggagcctgggggtgtgggtggggagccggccggccgtgacccagcgcctggctctgcccgcaggagtggacagtgcaatgaaggaagaagtgcagaggctgcagtccagggtggacctgctggaggagaagctgcagctggtgctggccccactgcacagcctggcctcgcaggcactggagcatgggctcccggaccccggcagcctcctggtgcactccttccagcagctcggccgcatcgactccctgagcgagcagatttccttcctggaggagcagctggggtcctgctcctgcaagaaagactcgtgactgcccagcgccccaggctggactgagcccctcacgccgccctgcagcccccatgcccctgcccaacatgctgggggtccagaagccacctcggggtgactgagcggaaggccaggcagggccttcctcctcttcctcctccccttcctcgggaggctccccagaccctggcatgggatgggctgggatcttctctgtgaatccacccctggctacccccaccctggctaccccaacggcatcccaaggccaggtgggccctcagctgagggaaggtacgagctccctgctggagcctgggacccatggcacaggccaggcagcccggaggctgggtggggcctcagtgggggctgctgcctgacccccagcacaataaaaatgaaacgtgaatgataaaaacaaaaataaaatcaaagacaccagaaaaaataaaataacagaaatagatacatcgaggcgcgtagtatggagaaagaattcactcaccggggaggacgcgcgaagatggacaagcgcgcgctagaccacacgattggggaagagcagacgaaagtccggccaccccaataattagagagaggggccccttcctgaatgatgcaccccgcaatacgccgccgaagcagaccggacgctggatgcagacacgccatgttggagaaacggcaagagccatgagaacgggccgaaccacgcggagggcgatcccacttctgacgagaagggaaggaacagcaaccaattttgctctatgggcggcggtacggttgtgcgcaaacaaggaataatgtctggagggcgaaggacatggttaccgaccagtatagatagacattcgattttaagcattaagttcgctggtgtagaggggagaagacaatattatgatacacacattgtgtgaaagaactgggtgggggaaattagaacgtagtgggtttagtatgaaaccatacaaaaaggagtgtgccaaatataaatcgtgttcagtgcgtgaggtagcgaaaaagaggaaggttcgcgcccatgtagagggacaggggatatcgtaatcattttgtgggacaaaggcctatgtatttacttgta

SEQ ID NO: 382432 - DNA, 2232 bp, Homo sapiens
gcaccaagctggccctgcacggctgcaagggaggctcctgtggacaggccaggcaggtgggcctcaggaggtgcctccaggcggccagtgggcctgaggccccagcaagggctagggtccatctccagtcccaggacacagcagcggccaccatggccacgcctgggctccagcagcatcagcagcccccaggaccggggaggcacaggtggcccccaccacccggaggagcagctcctgcccctgtccgggggatgactgattctcctccgccaggccacccagaggagaaggccaccccgcctggaggcacaggccatgaggggctctcaggaggtgctgctgatgtggcttctggtgttggcagtgggcggcacagagcacgcctaccggcccggccgtagggtgtgtgctgtccgggctcacggggaccctgtctccgagtcgttcgtgcagcgtgtgtaccagcccttcctcaccacctgcgacgggcaccgggcctgcagcacctaccgaaccatctataggaccgcctaccgccgcagccctgggctggcccctgccaggcctcgctacgcgtgctgccccggctggaagaggaccagcgggcttcctggggcctgtggagcagcaatatgccagccgccatgccggaacggagggagctgtgtccagcctggccgctgccgctgccctgcaggatggcggggtgacacttgccagtcagatgtggatgaatgcagtgctaggaggggcggctgtccccagcgctgcgtcaacaccgccggcagttactggtgccagtgttgggaggggcacagcctgtctgcagacggtacactctgtgtgcccaagggagggccccccagggtggcccccaacccgacaggagtggacagtgcaatgaaggaagaagtgcagaggctgcagtccagggtggacctgctggaggagaagctgcagctggtgctggccccactgcacagcctggcctcgcaggcactggagcatgggctcccggaccccggcagcctcctggtgcactccttccagcagctcggccgcatcgactccctgagcgagcagatttccttcctggaggagcagctggggtcctgctcctgcaagaaagactcgtgactgcccagcgccccaggctggactgagcccctcacgccgccctgcagcccccatgcccctgcccaacatgctgggggtccagaagccacctcggggtgactgagcggaaggccaggcagggccttcctcctcttcctcctccccttcctcgggaggctccccagaccctggcatgggatgggctgggatcttctctgtgaatccacccctggctacccccaccctggctaccccaacggcatcccaaggccaggtgggccctcagctgagggaaggtacgagctccctgctggagcctgggacccatggcacaggccaggcagcccggaggctgggtggggcctcagtgggggctgctgcctgacccccagcacaataaaaatgaaacgtgaatgataaaaacaaaaataaaatcaaagacaccagaaaaaataaaataacagaaatagatacatcgaggcgcgtagtatggagaaagaattcactcaccggggaggacgcgcgaagatggacaagcgcgcgctagaccacacgattggggaagagcagacgaaagtccggccaccccaataattagagagaggggccccttcctgaatgatgcaccccgcaatacgccgccgaagcagaccggacgctggatgcagacacgccatgttggagaaacggcaagagccatgagaacgggccgaaccacgcggagggcgatcccacttctgacgagaagggaaggaacagcaaccaattttgctctatgggcggcggtacggttgtgcgcaaacaaggaataatgtctggagggcgaaggacatggttaccgaccagtatagatagacattcgattttaagcattaagttcgctggtgtagaggggagaagacaatattatgatacacacattgtgtgaaagaactgggtgggggaaattagaacgtagtgggtttagtatgaaaccatacaaaaaggagtgtgccaaatataaatcgtgttcagtgcgtgaggtagcgaaaaagaggaaggttcgcgcccatgtagagggacaggggatatcgtaatcattttgtgggacaaaggcctatgtatttacttgta

SEQ ID NO: 382433 - DNA, 1434 bp, Homo sapiens
gcaccaagctggccctgcacggctgcaagggaggctcctgtggacaggccaggcaggtgggcctcaggaggtgcctccaggcggccagtgggcctgaggccccagcaagggctagggtccatctccagtcccaggacacagcagcggccaccatggccacgcctgggctccagcagcatcagcagcccccaggaccggggaggcacaggtggcccccaccacccggaggagcagctcctgcccctgtccgggggatgactgattctcctccgccaggccacccagaggagaaggccaccccgcctggaggcacaggccatgaggggctctcaggaggtgctgctgatgtggcttctggtgttggcagtgggcggcacagagcacgcctaccggcccggccgtagggtgtgtgctgtccgggctcacggggaccctgtctccgagtcgttcgtgcagcgtgtgtaccagcccttcctcaccacctgcgacgggcaccgggcctgcagcacctaccgaaccatctataggaccgcctaccgccgcagccctgggctggcccctgccaggcctcgctacgcgtgctgccccggctggaagaggaccagcgggcttcctggggcctgtggagcagcaatatgccagccgccatgccggaacggagggagctgtgtccagcctggccgctgccgctgccctgcaggatggcggggtgacacttgccagtcagatgtggatgaatgcagtgctaggaggggcggctgtccccagcgctgcgtcaacaccgccggcagttactggtgccagtgttgggaggggcacagcctgtctgcagacggtacactctgtgtgcccaagggagggccccccagggtggcccccaacccgacaggagtggacagtgcaatgaaggaagaagtgcagaggctgcagtccagggtggacctgctggaggagaagctgcagctggtgctggccccactgcacagcctggcctcgcaggcactggagcatgggctcccggaccccggcagcctcctggtgcactccttccagcagctcggccgcatcgactccctgagcgagcagatttccttcctggaggagcagctggggtcctggtccagaagccacctcggggtgactgagcggaaggccaggcagggccttcctcctcttcctcctccccttcctcgggaggctccccagaccctggcatgggatgggctgggatcttctctgtgaatccacccctggctacccccaccctggctaccccaacggcatcccaaggccaggtgggccctcagctgagggaaggtacgagctccctgctggagcctgggacccatggcacaggccaggcagcccggaggctgggtggggcctcagtgggggctgctgcctgacccccagcacaataaaaatgaaacgtga

SEQ ID NO: 382434 - DNA, 2050 bp, Homo sapiens
gcaccaagctggccctgcacggctgcaagggaggctcctgtggacaggccaggcaggtgggcctcaggaggtgcctccaggcggccagtgggcctgaggccccagcaagggctagggtccatctccagtcccaggacacagcagcggccaccatggccacgcctgggctccagcagcatcagcagcccccaggaccggggaggcacaggtggcccccaccacccggaggagcagctcctgcccctgtccgggggatgactgattctcctccgccaggccacccagaggagaaggccaccccgcctggaggcacaggccatgaggggctctcaggaggtgctgctgatgtggcttctggtgttggcagtgggcggcacagagcacgcctaccggcccggccgtagggtgtgtgctgtccgggctcacggggaccctgtctccgagtcgttcgtgcagcgtgtgtaccagcccttcctcaccacctgcgacgggcaccgggcctgcagcacctaccgaaccatctataggaccgcctaccgccgcagccctgggctggcccctgccaggcctcgctacgcgtgctgccccggctggaagaggaccagcgggcttcctggggcctgtggagcagcaatatgccagccgccatgccggaacggagggagctgtgtccagcctggccgctgccgctgccctgcaggatggcggggtgacacttgccagtcagatgtggatgaatgcagtgctaggaggggcggctgtccccagcgctgcgtcaacaccgccggcagttactggtgccagtgttgggaggggcacagcctgtctgcagacggtacactctgtgtgcccaagggagggccccccagggtggcccccaacccgacaggagtggacagtgcaatgaaggaagaagtgcagaggctgcagtccagggtggacctgctggaggagaagctgcagctggtgctggccccactgcacagcctggcctcgcaggcactggagcatgggctcccggaccccggcagcctcctggtgcactccttccagcagctcggccgcatcgactccctgagcgagcagatttccttcctggaggagcagctggggtcctgctcctgcaagaaagactcgtgactgcccagcgccccaggctggactgagcccctcacgccgccctgcagcccccatgcccctgcccaacatgctgggggtccagaagccacctcggggtgactgagcggaaggccaggcagggccttcctcctcttcctcctccccttcctcgggaggctccccagaccctggcatgggatgggctgggatcttctctgtgaatccacccctggctacccccaccctggctaccccaacggcatcccaaggccaggtgggccctcagctgagggaaggtacgagctccctgctggagcctgggacccatggcacaggccaggcagcccggaggctgggtggggcctcagtgggggctgctgcctgacccccagcacaataaaaatgaaacgtgaaaaaacaaaaaaaaaaaaaaaaaaaaaaatatacaacaaaaaaaaaacacaaacaaaaaaaaaaacaaaaaagggggcgcccctactaaatatactctccagaggagggcgcaaataatacacgtctacccacgtttttttgataacaagggggccccaataatggagccgtctatacaaaaccagcagactgcatcgcgcccgtgttttacacacctgtatacattgagaaaaaatggtatatgtgggaaaatctttttgtggaaaggagacccccccataaatcacgagaggggagcaacaacaaacattatggggaacacacacaataccctcatagacaagatattaggacgacccccatgacggcagagtaccactctatacactctttatcaagcgatcgctttaaacaggtgtttacacacacaacactcaagatatatatcttcggtgataatcagaaaattttggcccacagagaggatttatcacataggagaaaaaatttattacgg

SEQ ID NO: 382435 - DNA, 1067 bp, Homo sapiens
gcaccaagctggccctgcacggctgcaagggaggctcctgtggacaggccaggcaggtgggcctcaggaggtgcctccaggcggccagtgggcctgaggccccagcaagggctagggtccatctccagtcccaggacacagcagcggccaccatggccacgcctgggctccagcagcatcagcagcccccaggaccggggaggcacaggtggcccccaccacccggaggagcagctcctgcccctgtccgggggatgactgattctcctccgccaggccacccagaggagaaggccaccccgcctggaggcacaggccatgaggggctctcaggaggtgctgctgatgtggcttctggtgttggcagtgggcggcacagagcacgcctaccggcccggccgtagggtgtgtgctgtccgggctcacggggaccctgtctccgagtcgttcgtgcagcgtgtgtaccagcccttcctcaccacctgcgacgggcaccgggcctgcagcacctaccgaaccatctataggaccgcctaccgccgcagccctgggctggcccctgccaggcctcgctacgcgtgctgccccggctggaagaggaccagcgggcttcctggggcctgtggagcagcaatatgccagccgccatgccggaacggagggagctgtgtccagcctggccgctgccgctgccctgcaggatggcggggtgacacttgccagtcagatgtggatgaatgcagtgctaggaggggcggctgtccccagcgctgcgtcaacaccgccggcagttactggtgccagtgttgggaggggcacagcctgtctgcagacggtacactctgtgtgcccaagggagggccccccagggtggcccccaacccgacaggagtggacagtgcaatgaaggaagaagtgcagaggctgcagtccagggtggacctgctggaggaggagctccctgctggagcctgggacccatggcacaggccaggcagcccggaggctgggtggggcctcagtgggggctgctgcctgacccccagcacaataaaaatgaaacgtga

SEQ ID NO: 382436 - DNA, 356 bp, Homo sapiens
ctcgccgtaggccgggcacaccctctcctctgggcctggatgcccccacagtaggagaccagataggtgggggcacacacaggcctggccactgcctctgctccatgcggagtgtggctgggccttcctgctgtggcttgagtcccggccagcaccggaaggcccaggcagggaaacggctgtgcagtgacccctcagtgccatcccttgaggagaagacccttgggggcatgctggggtgaccctgtgcactctgagaggggactctagatgcccagcaggtgactaagggggagtaggatgcccctctgagctgtcccacccaccccacagaaccatctataggaccgcctacc

SEQ ID NO: 382437 - DNA, 378 bp, Homo sapiens
tcaccttccctggcctgtttcctcaaacttaaatgccatagttggcgcagccagatgatcccaaagtgagcaatctgagaagcaacaggaactccaggactctctgaccttggtgcttggtttccagtagggaacgatacatttacctaaggaagaacctgcttaagggaaatctacctggactgctaaagtcctcagtactgctcaccgtagcttcctcccttcttctcaagtgaatcaccattattcttattttgtcagcaagcgctttccctcactttactgatgggtcctgatctataattgttctgtgttcacccataattcctttccttttgtcttttacatacttaccaaattttggcccatccagaattt

SEQ ID NO: 382438 - DNA, 495 bp, Homo sapiens
cctgggtgaggggctggtgggcaggaaggtaaaggggagaccatctgagcagccgccacccgctccccagtgcctctgtatggccctatccagggacacccatgggcatgcgcacatggcaatcctgaccaccacctgagcacaggtgccccctcgggaccaccccccttctctttgtttccatcagaataaccaaaagcatttaaacgtgttacctttctccatccatctagactccagaaacaaaaatcaacacaaatctttattttttgatttaaaagatataacaaaaaattatggggagagtattcattatggcaggtgtctgtctgtaagaaaaaaatatatatctctatgtcatatagcgtgttagcaggtttattttttaaatgaaaggtaagaaagaaattgatttgaaatatataccacaagaagtcccgtgtcctgtcaaactgtcagtattttataaataaacttttttttttggagatttga

SEQ ID NO: 382439 - DNA, 440 bp, Homo sapiens
gtttttgtttatgtgaaaatatttacatatgtatcatttctgtatatatcacagaaaagttttcacttgcttgacattttattctacaatgatttttagtttaagtttaaagaatggctacattcagatttattttcacaactatagtcctgctaaactgccttcattgaaaactcagtttttatgataaaaaatatcaaagcacaagtttgttattggaggtaaattatacatttcttagatatctattggtactagacctttgtaattaaaattaatttattttacaatagtaactgacctgtatggaaaaaaaaacaaccttgaattatgggttctaatatttaaatatcgaaaaatatggttatttgtgcatattcttattacaaccaagaaaagaactcctgataagaaaataaataaatatttaacatttctaa

SEQ ID NO: 382440 - DNA, 577 bp, Homo sapiens
taaccagaaataagttgcatctttctgctggacaccactctttgccgagatatcaagtatatttgttttaagagctgaaatttcctataggatgttcaccattaggacagtacataagatggggaggaagtggatgggattttcattttcagccacatgacactttcccatcaggtacttgatctgaagaaatatattcctcagaacttaagaacttggatcctggagatgagagtcaaacctcctaatgtttataggcaccaaacaagcccagagtggtgaagaggcctgcgtggggtcacagttcttaggaacaaggccagtgcctgctgctcagggccctggtgggctgtgtgtcctccgtgcgctgggttccctgggctctatgcttgcccctttgtaccaccgaacagggcactccccagagtgaggactggcatctcgctctatttctatgcggggccagtttctactgtttttatgtattttaatattatgaactttttacatttttgattgtaagatcgtatcttttatttattgactctgaaaacacaggccttcttcatttagctag

SEQ ID NO: 382441 - DNA, 360 bp, Homo sapiens
cttctcaaattgctattacatctgtgctcctggcaaaatttttacttgtcatctccaaagtataccttgtattttcctgtacatattgttagtattttctttccaaacaggagtatcttcctttcattctcatttctactttggttatccttcaattttacttcagttgttgctttcttcacaaagtcttccccactcacccagaaggcagtgaaccccacctctatgagcttatccagcagagcttttaatgttcatattactcaccaagatatgtcattctttcaacaagcacgcacagatggcctcatgtgcatgtggcacatgcaatagccacaccctgcgcttcagggtattacc

SEQ ID NO: 382442 - DNA, 378 bp, Homo sapiens
aacaatggcggtcctgcagataggagatgggtgctttccataaagccactggaaactatgaaagctcagcaaacatttgaaggaggtagtattatcttctcaacatgacactcatttctttccgagtgcttatactttgtcctcactgcccccaaatcaacttttttccttttttcatccaactaatgtttatttagcacatgccacatagagaaaagatatatatacttcatattctcagtacagggaataaaaataaaattcagtttgccttgaattatcaattgcatcaaattgtttggctgtcttccggaccagagggaggaaaaatggtgaaaacattgcttcaagaacatagtggccaggcgcagtggctca

SEQ ID NO: 382443 - DNA, 1239 bp, Homo sapiens
gagcctcctggggtgtccacgtgagcgcgcgtgagtccgcccccccagtcacgtgaccgctgactcggggcgttctccactatcgcttacctacctccctctgcaggaacccggcgatatggctgccgctgtgccccgcgccgcatttctctccccgctgcttccccttctcctgggcttcctgctcctctccgctccgcatggcggcagcggcctgcacaccaagggcgcccttcccctggatacggtcactttctacaaggtcattcccaaaagcaagttcgtcttggtgaagttcgacacccagtacccctacggtgagaagcaggatgagttcaagcgtcttgctgaaaactcggcttccagcgatgatctcttggtggcagaggtggggatctcagattatggtgacaagctgaacatggagctgagtgagaaatacaagctggacaaagagagctacccagtcttctacctcttccgggatggggactttgagaacccagtcccatacactggggcagttaaggttggagccatccagcgctggctgaaggggcaaggggtctacctaggtatgcctggttgcctgcctgtatacgacgccctggccggggagttcatcagggcctctggtgtggaggcccgccaggccctcttgaagcaggggcaagataacctctcaagtgtgaaggagactcagaagaagtgggccgagcaatacctgaagatcatggggaagatcttagaccaaggggaggacttcccagcatcagagatgacacggatcgccaggctgattgagaagaacaagatgagtgacgggaagaaggaggagctccagaagagcttaaacatcctgactgccttccagaagaagggggccgagaaagaggagctgtaaaaaggctgtctgtgattttccagggtttggtgggggtagggaggggagagttaacctgctggctgtgagtcccttgtggaatataagggggtagtgggaaaagtggtactaacccacgattctgagccctgagtatgcctggacattgatgctaacatgaccatgcttgggatgtctctagctggtctggggatagctggagcacttactcaggtggctggtgaaatgacacctcagaaggaatgagtgctatagagaggagagaggagtgtactgcccaggtctttgacagatgtaattctcattcaattaaagtttcagtgttttggttaagt

SEQ ID NO: 382444 - DNA, 235 bp, Homo sapiens
gcggccgcctactactactactgctcgaattcaagcttctaacgatgtacggggacatgaccatgcttgggatgtctctagctggtctggggatagctggagcacttactcaggtggctggtgaaatgacacctcagaaggaatgagtgctatagagaggagagaggagtgtactgcccaggtctttgacagatgtaattctcattcaattaaagtttcagtgttttggttaagt

SEQ ID NO: 382445 - DNA, 281 bp, Homo sapiens
gagctgctggaaagatctttattctcattttctcttcagctactgctgagaagccaggagaacggctcaagaccagattagtgtcatatcatctcaactcatttcagtcaggatggacgattatgtcctaaattctgccagctagtttaggctaagacccagcattaacctggtgcggtgagaggctggagagtgctatagagaggagagaggagtgtactgcccaggtctttgacagatgtaattctcattcaattaaagtttcagtgttttggttaagt

SEQ ID NO: 382446 - DNA, 1669 bp, Homo sapiens
gagcctcctggggtgtccacgtgagcgcgcgtgagtccgcccccccagtcacgtgaccgctgactcggggcgttctccactatcgcttacctacctccctctgcaggaacccggcgatatggctgccgctgtgccccgcgccgcatttctctccccgctgcttccccttctcctgggcttcctgctcctctccgctccgcatggcggcagcggcctgcacaccaagggcgcccttcccctggatacggtcactttctacaaggtcattcccaaaagcaagttcgtcttggtgaagttcgacacccagtacccctacggtgagaagcaggatgagttcaagcgtcttgctgaaaactcggcttccagcgatgatctcttggtggcagaggtggggatctcagattatggtgacaagctgaacatggagctgagtgagaaatacaagctggacaaagagagctacccagtcttctacctcttccgggatggggactttgagaacccagtcccatacactggggcagttaaggttggagccatccagcgctggctgaaggggcaaggggtctacctaggtatgcctggttgcctgcctgtatacgacgccctggccggggagttcatcagggcctctggtgtggaggcccgccaggccctcttgaagcaggggcaagataacctctcaagtgtgaaggagactcagaagaagtgggccgagcaatacctgaagatcatggggaagatcttagaccaaggggaggacttcccagcatcagagatgacacggatcgccaggctgattgagaagaacaagatgagtgacgggaagaaggaggagctccagaagagcttaaacatcctgactgccttccagaagaagggggccgagaaagaggagctgtaaaaaggctgtctgtgattttccagggtttggtgggggtagggaggggagagttaacctgctggctgtgagtcccttgtggaatataagggggtagtgggaaaagtggtactaacccacgattctgagccctgagtatgcctggacattgatgctaacatgaccatgcttgggatgtctctagctggtctggggatagctggagcacttactcaggtggctggtgaaatgacacctcagaaggaatgagtgctatagagaggagagaggagtgtactgcccaggtctttgacagatgtaattctcattcaattaaagtttcagtgttttggttaagtggacctgaagccattcttttttcttttcaaattatactttcgtctatgacctgctttcctctttgaatctaagctggtatagactccactttcccagggtaacaaactatcctcataacactgtggaaactggcatacctttgttattttccagtgatattcagactgacatggattgactgtcaatggtaaagtttgtctattttccagtccttaaaactcaatagcagtattgatgaatatattgaaccaacattgatggaccatggtgtaattattttccatgctttgtgaggtacacatagcaaattcttagttttactgatatattctgtgacttggatttacacagctaaatgatatagtccgatttcaaaattaaaaaatattttccatctaaatcactatcactaaataaatactaacttct

SEQ ID NO: 382447 - DNA, 1386 bp, Homo sapiens
gagcctcctggggtgtccacgtgagcgcgcgtgagtccgcccccccagtcacgtgaccgctgactcggggcgttctccactatcgcttacctacctccctctgcaggaacccggcgatatggctgccgctgtgccccgcgccgcatttctctccccgctgcttccccttctcctgggcttcctgctcctctccgctccgcatggcggcagcggcctgcacaccaagggcgcccttcccctggatacggtcactttctacaaggtcattcccaaaagcaagttcgtcttggtgaagttcgacacccagtacccctacggtgagaagcaggatgagttcaagcgtcttgctgaaaactcggcttccagcgatgatctcttggtggcagaggtggggatctcagattatggtgacaagctgaacatggagctgagtgagaaatacaagctggacaaagagagctacccagtcttctacctcttccgggatggggactttgagaacccagtcccatacactggggcagttaaggttggagccatccagcgctggctgaaggggcaaggggtctacctaggtatgcctggttgcctgcctgtatacgacgccctggccggggagttcatcagggcctctggtgtggaggcccgccaggccctcttgaagcaggggcaagataacctctcaagtgtgaaggagactcagaagaagtgggccgagcaatacctgaagatcatggggaagatcttagaccaaggggaggacttcccagcatcagagatgacacggatcgccaggctgattgagaagaacaagatgagtgacgggaagaaggaggagctccagaagagcttaaacatcctgactgccttccagaagaagggggccgagaaagaggagctgtaaaaaggctgtctgtgattttccagggtttggtgggggtagggaggggagagttaacctgctggctgtgagtcccttgtggaatataagggggtagtgggaaaagtggtactaacccacgattctgagccctgagtatgcctggacattgatgctaacatgaccatgcttgggatgtctctagctggtctggggatagctggagcacttactcaggtggctggtgaaatgacacctcagaaggaatgagtgctatagagaggagagaggagtgtactgcccaggtctttgacagatgtaattctcattcaattaaagtttcagtgttttggttaagtaaaaaaaaaaaaaaaaaaaaaaaaacggggggttttatggggggggggaaaaaaggtagaaagggctgggatgggtttcgggcccctttttggaaagggggaaaaggcggggccccaaaaggggggtaaaataaagcgggtacgtaa

SEQ ID NO: 382448 - DNA, 1881 bp, Homo sapiens
gagcctcctggggtgtccacgtgagcgcgcgtgagtccgcccccccagtcacgtgaccgctgactcggggcgttctccactatcgcttacctacctccctctgcaggaacccggcgatatggctgccgctgtgccccgcgccgcatttctctccccgctgcttccccttctcctgggcttcctgctcctctccgctccgcatggcggcagcggcctgcacaccaagggcgcccttcccctggatacggtcactttctacaaggtcattcccaaaagcaagttcgtcttggtgaagttcgacacccagtacccctacggtgagaagcaggatgagttcaagcgtcttgctgaaaactcggcttccagcgatgatctcttggtggcagaggtggggatctcagattatggtgacaagctgaacatggagctgagtgagaaatacaagctggacaaagagagctacccagtcttctacctcttccgggatggggactttgagaacccagtcccatacactggggcagttaaggttggagccatccagcgctggctgaaggggcaaggggtctacctaggtatgcctggttgcctgcctgtatacgacgccctggccggggagttcatcagggcctctggtgtggaggcccgccaggccctcttgaagcaggggcaagataacctctcaagtgtgaaggagactcagaagaagtgggccgagcaatacctgaagatcatggggaagatcttagaccaaggggaggacttcccagcatcagagatgacacggatcgccaggctgattgagaagaacaagatgagtgacgggaagaaggaggagctccagaagagcttaaacatcctgactgccttccagaagaagggggccgagaaagaggagctgtaaaaaggctgtctgtgattttccagggtttggtgggggtagggaggggagagttaacctgctggctgtgagtcccttgtggaatataagggggtagtgggaaaagtggtactaacccacgattctgagccctgagtatgcctggacattgatgctaacatgaccatgcttgggatgtctctagctggtctggggatagctggagcacttactcaggtggctggtgaaatgacacctcagaaggaatgagtgctatagagaggagagaggagtgtactgcccaggtctttgacagatgtaattctcattcaattaaagtttcagtgttttggttaagtaaaaaaaaaaaaaaaaaaaaaaaaaagaaaaaaacaaaaaaaaataacaacaaaaaaaaaacagagaggagcgggcgggggcgcgcgagccacacaaattatcccccgcgggggcgacgccaaatgtacgagcgcgacaccccacggcgtttctttctgtgagacagaagggggccccccctaaaggggggggccgctagtctataacaacggcgacgagagcgaggcgaggcgcgcggggtctataaacaacagcgcgcgacacgcggggacaaacaacagcgcggcgcagtcgccgggcgagcacactttcgagggggagaagcgagcaaaccccacctacctgcgcgggggggggggggcgagacacacacatggtggggagcaaaccaacatcgaccgctaccagagaggataatattaaaggcgcgtgacagggggaggaaaaatattatatagctaactttctaagagagcgtgtgaatatagtggggtgggtgtgaacacaacaaaacggggggactaaataatttgcgagggggagcggagagaaaaaaaaattattggtggaacaacgagggattatatatgtttgttgtggcaaataaatttcttcttcaagcgggggcggtgtatgtaaaa

SEQ ID NO: 382449 - DNA, 1224 bp, Homo sapiens
gagcctcctggggtgtccacgtgagcgcgcgtgagtccgcccccccagtcacgtgaccgctgactcggggcgttctccactatcgcttacctacctccctctgcaggaacccggcgatatggctgccgctgtgccccgcgccgcatttctctccccgctgcttccccttctcctgggcttcctgctcctctccgctccgcatggcggcagcggcctgcacaccaagggcgcccttcccctggatacggtcactttctacaaggtcattcccaaaagcaagttcgtcttggtgaagttcgacacccagtacccctacggtgagaagcaggatgagttcaagcgtcttgctgaaaactcggcttccagcgatgatctcttggtggcagaggtggggatctcagattatggtgacaagctgaacatggagctgagtgagaaatacaagctggacaaagagagctacccagtcttctacctcttccgggatggggactttgagaacccagtcccatacactggggcagttaaggttggagccatccagcgctggctgaaggggcaaggggtctacctaggtatgcctggttgcctgcctgtatacgacgccctggccggggagttcatcagggcctctggtgtggaggcccgccaggccctcttgaagcaggggcaagataacctctcaagtgtgaaggagactcagaagaagtgggccgagcaatacctgaagatcatggggaagatcttagaccaaggggaggacttcccagcatcagagatgacacggatcgccaggctgattgagaagaacaagatgagtgacgggaagaaggaggagctccagaagagcttaaacatcctgactgccttccagaagaagggggccgagaaagaggagctgtaaaaaggctgtctgtgattttccagggtttggtgggggtagggaggggagagttaacctgctggctgtgagtcccttgtggaatataagggggtagtgggaaaagtggtactaacccacgattctgagccctgagtatgcctggacattgatgctaacatgaccatgcttgggatgtctctagctggtctggggatagctggagcacttactcaggtggctggtgaaatgacacctcagaaggaatgagtgctatagagaggagagaggagtgtactgcccaggtctttgacagatatcgtgggtacagcgctcgattcgta

SEQ ID NO: 382450 - DNA, 1064 bp, Homo sapiens
  misc_feature (21)..(21): n is a, c, g, or t
  misc_feature (23)..(23): n is a, c, g, or t
ccggtaccagagactgagcanantgaagatcatggggaagatcttagaccaaggcgccttcccctggatacggtcactttctacaaggtcattcccaaaagcaagttcgtcttggtgaagttcgacacccagtacccctacggtgagaagcaggatgagttcaagcgtcttgctgaaaactcggcttccagcgatgatctcttggtggcagaggtggggatctcagattatggtgacaagctgaacatggagctgagtgagaaatacaagctggacaaagagagctacccagtcttctacctcttccgggatggggactttgagaacccagtcccatacactggggcagttaaggttggagccatccagcgctggctgaaggggcaaggggtctacctaggtatgcctggttgcctgcctgtatacgacgccctggccggggagttcatcagggcctctggtgtggaggcccgccaggccctcttgaagcaggggcaagataacctctcaagtgtgaaggagactcagaagaagtgggccgagcaatacctgaagatcatggggaagatcttagaccaaggggaggacttcccagcatcagagatgacacggatcgccaggctgattgagaagaacaagatgagtgacgggaagaaggaggagctccagaagagcttaaacatcctgactgccttccagaagaagggggccgagaaagaggagctgtaaaaaggctgtctgtgattttccagggtttggtgggggtagggaggggagagttaacctgctggctgtgagtcccttgtggaatataagggggtagtgggaaaagtggtactaacccacgattctgagccctgagtatgcctggacattgatgctaacatgaccatgcttgggatgtctctagctggtctggggatagctggagcacttactcaggtggctggtgaaatgacacctcagaaggaatgagtgctatagagaggagagaggagtgtactgcccaggtctttgacagatgtaattctcattcaattaaagtttcagtgttttggttaagt

SEQ ID NO: 382451 - DNA, 1100 bp, Homo sapiens
gagcctcctggggtgtccacgtgagcgcgcgtgagtccgcccccccagtcacgtgaccgctgactcggggcgttctccactatcgcttacctacctccctctgcaggaacccggcgatatggctgccgctgtgccccgcgccgcatttctctccccgctgcttccccttctcctgggcttcctgctcctctccgctccgcatggcggcagcggcctgcacaccaagggcgcccttcccctggatacggtcactttctacaagattatggtgacaagctgaacatggagctgagtgagaaatacaagctggacaaagagagctacccagtcttctacctcttccgggatggggactttgagaacccagtcccatacactggggcagttaaggttggagccatccagcgctggctgaaggggcaaggggtctacctaggtatgcctggttgcctgcctgtatacgacgccctggccggggagttcatcagggcctctggtgtggaggcccgccaggccctcttgaagcaggggcaagataacctctcaagtgtgaaggagactcagaagaagtgggccgagcaatacctgaagatcatggggaagatcttagaccaaggggaggacttcccagcatcagagatgacacggatcgccaggctgattgagaagaacaagatgagtgacgggaagaaggaggagctccagaagagcttaaacatcctgactgccttccagaagaagggggccgagaaagaggagctgtaaaaaggctgtctgtgattttccagggtttggtgggggtagggaggggagagttaacctgctggctgtgagtcccttgtggaatataagggggtagtgggaaaagtggtactaacccacgattctgagccctgagtatgcctggacattgatgctaacatgaccatgcttgggatgtctctagctggtctggggatagctggagcacttactcaggtggctggtgaaatgacacctcagaaggaatgagtgctatagagaggagagaggagtgtactgcccaggtctttgacagatgtaattctcattcaattaaagtttcagtgttttggttaagt

SEQ ID NO: 382452 - DNA, 945 bp, Homo sapiens
cgccaggccctcttgaagcagggcaagatatcctctccgctccgcatggcggcagcggcctgcacaccaagggcgcccttcccctggatacggtcactttctacaagattatggtgacaagctgaacatggagctgagtgagaaatacaagctggacaaagagagctacccagtcttctacctcttccgggatggggactttgagaacccagtcccatacactggggcagttaaggttggagccatccagcgctggctgaaggggcaaggggtctacctaggtatgcctggttgcctgcctgtatacgacgccctggccggggagttcatcagggcctctggtgtggaggcccgccaggccctcttgaagcaggggcaagataacctctcaagtgtgaaggagactcagaagaagtgggccgagcaatacctgaagatcatggggaagatcttagaccaaggggaggacttcccagcatcagagatgacacggatcgccaggctgattgagaagaacaagatgagtgacgggaagaaggaggagctccagaagagcttaaacatcctgactgccttccagaagaagggggccgagaaagaggagctgtaaaaaggctgtctgtgattttccagggtttggtgggggtagggaggggagagttaacctgctggctgtgagtcccttgtggaatataagggggtagtgggaaaagtggtactaacccacgattctgagccctgagtatgcctggacattgatgctaacatgaccatgcttgggatgtctctagctggtctggggatagctggagcacttactcaggtggctggtgaaatgacacctcagaaggaatgagtgctatagagaggagagaggagtgtactgcccaggtctttgacagatgtaattctcattcaattaaagtttcagtgttttggttaagt

SEQ ID NO: 382453 - DNA, 873 bp, Homo sapiens
  misc_feature (21)..(21): n is a, c, g, or t
  misc_feature (23)..(23): n is a, c, g, or t
ccggtaccagagactgagcanantgaagatcatggggaagatcttagaccatggggaggacttcccagcatcagagatacacggatcgccgttcgatagagtcttctacctcttccgggatggggactttgagaacccagtcccatacactggggcagttaaggttggagccatccagcgctggctgaaggggcaaggggtctacctaggtatgcctggttgcctgcctgtatacgacgccctggccggggagttcatcagggcctctggtgtggaggcccgccaggccctcttgaagcaggggcaagataacctctcaagtgtgaaggagactcagaagaagtgggccgagcaatacctgaagatcatggggaagatcttagaccaaggggaggacttcccagcatcagagatgacacggatcgccaggctgattgagaagaacaagatgagtgacgggaagaaggaggagctccagaagagcttaaacatcctgactgccttccagaagaagggggccgagaaagaggagctgtaaaaaggctgtctgtgattttccagggtttggtgggggtagggaggggagagttaacctgctggctgtgagtcccttgtggaatataagggggtagtgggaaaagtggtactaacccacgattctgagccctgagtatgcctggacattgatgctaacatgaccatgcttgggatgtctctagctggtctggggatagctggagcacttactcaggtggctggtgaaatgacacctcagaaggaatgagtgctatagagaggagagaggagtgtactgcccaggtctttgacagatgtaattctcattcaattaaagtttcagtgttttggttaagt

SEQ ID NO: 382454 - DNA, 1163 bp, Homo sapiens
gagcctcctggggtgtccacgtgagcgcgcgtgagtccgcccccccagtcacgtgaccgctgactcggggcgttctccactatcgcttacctacctccctctgcaggaacccggcgatatggctgccgctgtgccccgcgccgcatttctctccccgctgcttccccttctcctgggcttcctgctcctctccgctccgcatggcggcagcggcctgcacaccaagggcgcccttcccctggatacggtcactttctacaaggtcattcccaaaagcaagttcgtcttggtgaagttcgacacccagtacccctacggtgagaagcaggatgagttcaagcgtcttgctgaaaactcggcttccagcgatgatctcttggtggcagaggtggggatctcagattatggtgacaagctgaacatggagctgagtgagaaatacaagctggacaaagagagctacccagtcttctacctcttccgggatggggactttgagaacccagtcccatacactggggcagttaaggttggagccatccagcgctggctgaaggggcaaggggtctacctaggtatgcctggttgcctgcctgtatacgacgccctggccggggagttcatcagggcctctggtgtggaggcccgccaggccctcttgaagcaggggcaagataacctctcaagtgtgaaggagactcagaagaagtgggccgagcaatacctgaagatcatggggaagatcttagaccaaggggaggacttcccagcatcagagatgacacggatcgccaggctgattgagaagaacaagatgagtgacgggaagaaggaggagctccagaagagcttaaacatcctgactgccttccagaagaagggggccgagaaagaggagctgtaaaaaggctgtctgtgattttccagggtttggtgggggtagggaggggagagttaacctgctggctgtgagtcccttgtggaatataagggggtagtgggaaaagtggtactaacccaccaatgtccatgctgacgaagccgggaccgggaccctgccctggccatgcctgggatagctactcgacatctgggagcctatgactcatagagctaagcagagcgccatgtccacaccacgcaagcaactgagcgccagcagg

SEQ ID NO: 382455 - DNA, 1053 bp, Homo sapiens
gagcctcctggggtgtccacgtgagcgcgcgtgagtccgcccccccagtcacgtgaccgctgactcggggcgttctccactatcgcttacctacctccctctgcaggaacccggcgatatggctgccgctgtgccccgcgccgcatttctctccccgctgcttccccttctcctgggcttcctgctcctctccgctccgcatggcggcagcggcctgcacaccaagggcgcccttcccctggatacggtcactttctacaaggtcattcccaaaagcaagttcgtcttggtgaagttcgacacccagtacccctacggtgagaagcaggatgagttcaagcgtcttgctgaaaactcggcttccagcgatgatctcttggtggcagaggtggggatctcagattatggtgacaagctgaacatggagctgagtgagaaatacaagctggacaaagagagctacccagtcttctacctcttccgggatggggactttgagaacccagtcccatacactggggcagttaaggttggagccatccagcgctggctgaaggggcaaggggtctacctaggtatgcctggttgcctgcctgtatacgacgccctggccggggagttcatcagggcctctggtgtggaggcccgccaggccctcttgaagcaggggcaagataacctctcaagtgtgaaggagactcagaagaagtgggccgagcaatacctgaagatcatggggaagatcttagaccaaggggaggacttcccagcatcagagatgacacggatcgccaggctgattgagaagaacaagatgagtgacgggaagaaggaggagctccagaagagcttaaacatcctgactgccttccagaagaagggggccgagaaagaggagctgtaaaaaggctgtctgtgattttccagggtttggtggggtgaaatgacacctcagaaggaatgagtgctatagagaggagagaggagtgtactgcccaggtctttgacagatgtaattctcattcaattaaagtttcagtgttttggttaagt

SEQ ID NO: 382456 - DNA, 1175 bp, Homo sapiens
gagcctcctggggtgtccacgtgagcgcgcgtgagtccgcccccccagtcacgtgaccgctgactcggggcgttctccactatcgcttacctacctccctctgcaggaacccggcgatatggctgccgctgtgccccgcgccgcatttctctccccgctgcttccccttctcctgggcttcctgctcctctccgctccgcatggcggcagcggcctgcacaccaagggcgcccttcccctggatacggtcactttctacaaggtcattcccaaaagcaagttcgtcttggtgaagttcgacacccagtacccctacggtgagaagcaggatgagttcaagcgtcttgctgaaaactcggcttccagcgatgatctcttggtggcagaggtggggatctcagattatggtgacaagctgaacatggagctgagtgagaaatacaagctggacaaagagagctacccagtcttctacctcttccgggatggggactttgagaacccagtcccatacactggggcagttaaggttggagccatccagcgctggctgaaggggcaaggggtctacctaggtatgcctggttgcctgcctgtatacgacgccctggccggggagttcatcagggcctctggtgtggaggcccgccaggccctcttgaagcaggggcaagataacctctcaagtgtgaaggagactcagaagaagtgggccgagcaatacctgaagatcatggggaagatcttagaccaaggggaggacttcccagcatcagagatgacacggatcgccaggctgattgagaagaacaagatgagtgacgggaagaggagctgtaaaaaggctgtctgtgattttccagggtttggtgggggtagggaggggagagttaacctgctggctgtgagtcccttgtggaatataagggggtagtgggaaaagtggtactaacccacgattctgagccctgagtatgcctggacattgatgctaacatgaccatgcttgggatgtctctagctggtctggggatagctggagcacttactcaggtggctggtgaaatgacacctcagaaggaatgagtgctatagagaggagagaggagtgtactgcccaggtctttgacagatgtaattctcattcaattaaagtttcagtgttttggttaagt

SEQ ID NO: 382457 - DNA, 1558 bp, Homo sapiens
gagcctcctggggtgtccacgtgagcgcgcgtgagtccgcccccccagtcacgtgaccgctgactcggggcgttctccactatcgcttacctacctccctctgcaggaacccggcgatatggctgccgctgtgccccgcgccgcatttctctccccgctgcttccccttctcctgggcttcctgctcctctccgctccgcatggcggcagcggcctgcacaccaagggcgcccttcccctggatacggtcactttctacaaggtcattcccaaaagcaagttcgtcttggtgaagttcgacacccagtacccctacggtgagaagcaggatgagttcaagcgtcttgctgaaaactcggcttccagcgatgatctcttggtggcagaggtggggatctcagattatggtgacaagctgaacatggagctgagtgagaaatacaagctggacaaagagagctacccagtcttctacctcttccgggatggggactttgagaacccagtcccatacactggggcagttaaggttggagccatccagcgctggctgaaggggcaaggggtctacctaggtatgcctggttgcctgcctgtatacgacgccctggccggggagttcatcagggcctctggtgtggaggcccgccaggccctcttgaagcaggggcaagataacctctcaagtgtgaaggagactcagaagaagtgggccgagcaatacctgaagatcatggggaagatcttagaccaaggggaggacttcccagcatcagagatgacacggatcgccaggctgattgagaagaacaagatgagtgacgggaggtagggaggggagagttaacctgctggctgtgagtcccttgtggaatataagggggtagtgggaaaagtggtactaacccacgattctgagccctgagtatgcctggacattgatgctaacatgaccatgcttgggatgtctctagctggtctggggatagctggagcacttactcaggtggctggtgaaatgacacctcagaaggaatgagtgctatagagaggagagaggagtgtactgcccaggtctttgacagatgtaattctcattcaattaaagtttcagtgttttggttaagtggacctgaagccattcttttttcttttcaaattatactttcgtctatgacctgctttcctctttgaatctaagctggtatagactccactttcccagggtaacaaactatcctcataacactgtggaaactggcatacctttgttattttccagtgatattcagactgacatggattgactgtcaatggtaaagtttgtctattttccagtccttaaaactcaatagcagtattgatgaatatattgaaccaacattgatggaccatggtgtaattattttccatgctttgtgaggtacacatagcaaattcttagttttactgatatattctgtgacttggatttacacagctaaatgatatagtccgatttcaaaattaaaaaatattttccatctaaatcactatcactaaataaatactaacttct

SEQ ID NO: 382458 - DNA, 604 bp, Homo sapiens
aaaaaagaaagaaaaggacggaagagtacataagagaacgaggcagaataacataccaacacatcatgcagaccggcgatatggctgccgctgtgccccgcgccgcatttctctccccgctgcttccccttctcctgggcttcctgctcctctccgctccgcatggcggcagcggcctgcacaccaagggcgcccttcccctggatacggtcactttctacaaggtcattcccaaaagcaagttcgtcttggtgaagttcgacacccagtacccctacggtgagaagcaggatgagttcaagcgtcttgctgaaaactcggcttccagcgatgatctcttggtggcagaggtggggatctcagattatggtgacaagctgaacatggagctgagtgagaaatacaagctggacaaagagagctacccagtcttctacctcttccgggatggggactttgagaacccagtcccatacactggggcagttaaggttggagccatccagcgctggctgaaggggcaaggggtgctcccggagggttaaggctcccggagggttaaggctcccggagtattaaggcgtcccggagggctaaggcactt

SEQ ID NO: 382459 - DNA, 379 bp, Homo sapiens
  misc_feature (3)..(3): n is a, c, g, or t
tgnaaaaaagcagctgtaccgtcggaatcccggatcgcccggcgatatggctgccgctgtgccccgcgccgcatttctctccccgctgcttccccttctcctgggcttcctgctcccttgtggaatataagggggtagtgggaaaagtggtactaacccacgattctgagccctgagtatgcctggacattgatgctaacatgaccatgcttgggatgtctctagctggtctggggatagctggagcacttactcaggtggctggtgaaatgacacctcagaaggaatgagtgctatagagaggagagaggagtgtactgcccaggtctttgacagatgtaattctcattcaattaaagtttcagtgttttggttaagt

SEQ ID NO: 382460 - DNA, 692 bp, Homo sapiens
cagacacaaaagggcacatattgtacatttccatcagaatagacaaatctatagagacagaaaatagatgagtggttgctggggctgggaggaggaagactggggagtgactgcgtaatgagtatagggtttccttttgggatgatgaaaatgttctggcactagatagtaacctctatggttgcacattcttaatgcactgaatcatgcagaatgtacacttttaaatggttacaatggcaaatattatgtgaattttactgcaattaaaagtcttggccctgacagtttaaaacccagagatctagccagagggaagtgtagtctagggagaagacattgtcccaagcctggcctctcactagcttatctgccctgaaattgctgggttcaaactctggcctatctagccaaagcgtcctccatgatgccaactcctttgtaggtaggtttgtttatttttgtcagatttcttgttcagggtttactgcgaaaggcctcctgggatgatgagcatgacaggggctgatgtagtatgcagagggtctccttcacctaactgaaaggaaccctgaaggagaaggccttagtatgtctgcagccttgtttattctggacagggttgtgtatatctttgattagtgtgaacaggtactaatggggtgccctgcatgttgctggcactcactaaa

SEQ ID NO: 382461 - DNA, 1167 bp, Homo sapiens
  misc_feature (3)..(3): n is a, c, g, or t
tgnaaaaaagcagctgtaccgtcggaatcccggatcgcccggcgatatggctgccgctgtgccccgcgccgcatttctctccccgctgcttccccttctcctgggcttcctgctcctctccgctccgcatggcggcagcggcctgcacaccaagggcgcccttcccctggatacggtcactttctacaaggtcattcccaaaagcaagttcgtcttggtgaagttcgacacccagtacccctacggtgagaagcaggatgagttcaagcgtcttgctgaaaactcggcttccagcgatgatctcttggtggcagaggtggggatctcagattatggtgacaagctgaacatggagctgagtgagaaatacaagctggacaaagagagctacccagtcttctacctcttccgggatggggactttgagaacccagtcccatacactggggcagttaaggttggagccatccagcgctggctgaaggggcaaggggtctacctaggtatgcctggttgcctgcctgtatacgacgccctggccggggagttcatcagggcctctggtgtggaggcccgccaggccctcttgaagcaggggcaagataacctctcaagtgtgaaggagactcagaagaagtgggccgagcaatacctgaagatcatggggaagatcttagaccaaggggaggacttcccagcatcagagatgacacggatcgccaggctgattgagaagaacaagatgagtgacgggaagaaggaggagctccagaagagcttaaacatcctgactgccttccagaagaagggggccgagaaagaggagctgtaaaaaggctgtctgtgattttccagggtttggtgggggtagggaggggagagttaacctgctggctgtgagtcccttgtggaatataagggggtagtgggaaaagtggtactaacccacgattctgagccctgagtatgcctggacattgatgctaacatgaccatgcttgggatgtctctagctggtctggggatagctggagcacttactcaggtggctggtgaaatgacacctcagaaggaatgagtgctatagagaggagagaggagtgtactgcccaggtctttgacagatgtaattctcattcaattaaagtttcagtgttttggttaagt

SEQ ID NO: 382462 - DNA, 1201 bp, Homo sapiens
aaaaaagaaagaaaaggacggaagagtacataagagaacgaggcagaataacataccaacacatcatgcagaccggcgatatggctgccgctgtgccccgcgccgcatttctctccccgctgcttccccttctcctgggcttcctgctcctctccgctccgcatggcggcagcggcctgcacaccaagggcgcccttcccctggatacggtcactttctacaaggtcattcccaaaagcaagttcgtcttggtgaagttcgacacccagtacccctacggtgagaagcaggatgagttcaagcgtcttgctgaaaactcggcttccagcgatgatctcttggtggcagaggtggggatctcagattatggtgacaagctgaacatggagctgagtgagaaatacaagctggacaaagagagctacccagtcttctacctcttccgggatggggactttgagaacccagtcccatacactggggcagttaaggttggagccatccagcgctggctgaaggggcaaggggtctacctaggtatgcctggttgcctgcctgtatacgacgccctggccggggagttcatcagggcctctggtgtggaggcccgccaggccctcttgaagcaggggcaagataacctctcaagtgtgaaggagactcagaagaagtgggccgagcaatacctgaagatcatggggaagatcttagaccaaggggaggacttcccagcatcagagatgacacggatcgccaggctgattgagaagaacaagatgagtgacgggaagaaggaggagctccagaagagcttaaacatcctgactgccttccagaagaagggggccgagaaagaggagctgtaaaaaggctgtctgtgattttccagggtttggtgggggtagggaggggagagttaacctgctggctgtgagtcccttgtggaatataagggggtagtgggaaaagtggtactaacccacgattctgagccctgagtatgcctggacattgatgctaacatgaccatgcttgggatgtctctagctggtctggggatagctggagcacttactcaggtggctggtgaaatgacacctcagaaggaatgagtgctatagagaggagagaggagtgtactgcccaggtctttgacagatgtaattctcattcaattaaagtttcagtgttttggttaagt

SEQ ID NO: 382463 - DNA, 1711 bp, Homo sapiens
cagtaagttaaatgtagacttagcatatgaccaccacagttccacttgtatatatacccaaaagagtggaatacaggtgttcaaacaaaatgtgttatgtgaatgttcatagcagcactattgacagtagccaaaaggtggaaacaacccaaacattcagctgatgagtgaataaacaaaaatgtggtctatcgtacagtgtaatatttatttggccataaaaagtaacagtgtgccaatacatggtacaacatggacaaaccttgaaaacatgctaagtgaaaaaagccagacacaaaagggcacatattgtacatttccatcagaatagacaaatctatagagacagaaaatagatgagtggttgctggggctgggaggaggaagactggggagtgactgcgtaatgagtatagggtttccttttgggatgatgaaaatgttctggcactagatagtaacctctatggttgcacattcttaatgcactgaatcatgcagaatgtacacttttaaatggttacaatggcaaatattatgtgaattttactgcaattaaaagtcttggccctgacagtttaaaacccagagatctagccagagggaagtgtagtctagggagaagacattgtcccaagcctggcctctcactagcttatctgccctgaaattgctgggttcaaactctggcctatctagccaaagcgtcctccatgatgccaactcctttgtaggtcattcccaaaagcaagttcgtcttggtgaagttcgacacccagtacccctacggtgagaagcaggatgagttcaagcgtcttgctgaaaactcggcttccagcgatgatctcttggtggcagaggtggggatctcagattatggtgacaagctgaacatggagctgagtgagaaatacaagctggacaaagagagctacccagtcttctacctcttccgggatggggactttgagaacccagtcccatacactggggcagttaaggttggagccatccagcgctggctgaaggggcaaggggtctacctaggtatgcctggttgcctgcctgtatacgacgccctggccggggagttcatcagggcctctggtgtggaggcccgccaggccctcttgaagcaggggcaagataacctctcaagtgtgaaggagactcagaagaagtgggccgagcaatacctgaagatcatggggaagatcttagaccaaggggaggacttcccagcatcagagatgacacggatcgccaggctgattgagaagaacaagatgagtgacgggaagaaggaggagctccagaagagcttaaacatcctgactgccttccagaagaagggggccgagaaagaggagctgtaaaaaggctgtctgtgattttccagggtttggtgggggtagggaggggagagttaacctgctggctgtgagtcccttgtggaatataagggggtagtgggaaaagtggtactaacccacgattctgagccctgagtatgcctggacattgatgctaacatgaccatgcttgggatgtctctagctggtctggggatagctggagcacttactcaggtggctggtgaaatgacacctcagaaggaatgagtgctatagagaggagagaggagtgtactgcccaggtctttgacagatgtaattctcattcaattaaagtttcagtgttttggttaagt

SEQ ID NO: 382464 - DNA, 1240 bp, Homo sapiens
  misc_feature (3)..(3): n is a, c, g, or t
tgnaaaaaagcagctgtaccgtcggaatcccggatcgcccggcgatatggctgccgctgtgccccgcgccgcatttctctccccgctgcttccccttctcctgggcttcctgctcctctccgctccgcatggcggcagcggcctgcacaccaagggcgcccttcccctggatacggtcactttctacaaggggccccttgggaaggggaattagccccaaaagtccctggaacacccacttgctcagctctatacgccctcaggtcattcccaaaagcaagttcgtcttggtgaagttcgacacccagtacccctacggtgagaagcaggatgagttcaagcgtcttgctgaaaactcggcttccagcgatgatctcttggtggcagaggtggggatctcagattatggtgacaagctgaacatggagctgagtgagaaatacaagctggacaaagagagctacccagtcttctacctcttccgggatggggactttgagaacccagtcccatacactggggcagttaaggttggagccatccagcgctggctgaaggggcaaggggtctacctaggtatgcctggttgcctgcctgtatacgacgccctggccggggagttcatcagggcctctggtgtggaggcccgccaggccctcttgaagcaggggcaagataacctctcaagtgtgaaggagactcagaagaagtgggccgagcaatacctgaagatcatggggaagatcttagaccaaggggaggacttcccagcatcagagatgacacggatcgccaggctgattgagaagaacaagatgagtgacgggaagaaggaggagctccagaagagcttaaacatcctgactgccttccagaagaagggggccgagaaagaggagctgtaaaaaggctgtctgtgattttccagggtttggtgggggtagggaggggagagttaacctgctggctgtgagtcccttgtggaatataagggggtagtgggaaaagtggtactaacccacgattctgagccctgagtatgcctggacattgatgctaacatgaccatgcttgggatgtctctagctggtctggggatagctggagcacttactcaggtggctggtgaaatgacacctcagaaggaatgagtgctatagagaggagagaggagtgtactgcccaggtctttgacagatgtaattctcattcaattaaagtttcagtgttttggttaagt

SEQ ID NO: 382465 - DNA, 1364 bp, Homo sapiens
  misc_feature (1045)..(1045): n is a, c, g, or t
gagcctcctggggtgtccacgtgagcgcgcgtgagtccgcccccccagtcacgtgaccgctgactcggggcgttctccactatcgcttacctacctccctctgcaggaacccggcgatatggctgccgctgtgccccgcgccgcatttctctccccgctgcttccccttctcctgggcttcctgctcctctccgctccgcatggcggcagcggcctgcacaccaagggcgcccttcccctggatacggtcactttctacaaggtcattcccaaaagcaagttcgtcttggtgaagttcgacacccagtacccctacggtgagaagcaggatgagttcaagcgtcttgctgaaaactcggcttccagcgatgatctcttggtggcagaggtggggatctcagattatggtgacaagctgaacatggagctgagtgagaaatacaagctggacaaagagagctacccagtcttctacctcttccgggatggggactttgagaacccagtcccatacactggggcagttaaggttggagccatccagcgctggctgaaggggcaaggggtctacctaggtatgcctggttgcctgcctgtatacgacgccctggccggggagttcatcagggcctctggtgtggaggcccgccaggccctcttgaagcaggggcaagataacctctcaagtgtgaaggagactcagaagaagtgggccgagcaatacctgaagatcatggggaagatcttagaccaaggggaggacttcccagcatcagagatgacacggatcgccaggctgattgagaagaacaagatgagtgacgggaagaaggaggagctccagaagagcttaaacatcctgactgccttccagaagaagggggccgagaaagaggagctgtaaaaaggctgtctgtgattttccagggtttggtgggggtagggaggggagagttaacctgctggctgtgagtcccttgtggaatataagggggtagtgggaaaagtggtactaacccacgattctgagccctgagtatggctnagcgctctgagcaatacctttcaaccatataaaagaataaattcatgtatggtgaagcaacagggctggaacggggagctattatcctaagtagaatacttgagaaacagaaaatcaaataccacatcttctcacttacaaggggaagctaaataataggtatacttggccataaagaggggatggagacaccttacagacttcaagtggtgtgagggtgagatgggtgaggactgaaaaattacccatggggtcaacatacacaaattcattactatacaatatattcctgtcaaaaactgccttcaaacgcccaaat

SEQ ID NO: 382466 - DNA, 845 bp, Homo sapiens
agcttatctagaggatcccagcgctgcgcaatacctactcgagttacttgtcatcatcgccgtttcgatagagtcttctacctcttccgggatggggactttgagaacccagtcccatacactggggcagttaaggttggagccatccagcgctggctgaaggggcaaggggtctacctaggtatgcctggttgcctgcctgtatacgacgccctggccggggagttcatcagggcctctggtgtggaggcccgccaggccctcttgaagcaggggcaagataacctctcaagtgtgaaggagactcagaagaagtgggccgagcaatacctgaagatcatggggaagatcttagaccaaggggaggacttcccagcatcagagatgacacggatcgccaggctgattgagaagaacaagatgagtgacgggaagaaggaggagctccagaagagcttaaacatcctgactgccttccagaagaagggggccgagaaagaggagctgtaaaaaggctgtctgtgattttccagggtttggtgggggtagggaggggagagttaacctgctggctgtgagtcccttgtggaatataagggggtagtgggaaaagtggtactaacccacgattctgagccctgagtatgcctggacattgatgctaacatgaccatgcttgggatgtctctagctggtctggggatagctggagcacttactcaggtggctggtgaaatgacacctcagaaggaatgagtgctatagagaggagagaggagtgtactgcccaggtctttgacagatgtaattctcattcaattaaagtttcagtgttttggttaagt

SEQ ID NO: 382467 - DNA, 722 bp, Homo sapiens
cgagggaactatcggctaggtcgaggctggtgttgaatcggccgaggctactacctaggtatgcctggttgcctgcctgtatacgacgccctggccggggagttcatcagggcctctggtgtggaggcccgccaggccctcttgaagcaggggcaagataacctctcaagtgtgaaggagactcagaagaagtgggccgagcaatacctgaagatcatggggaagatcttagaccaaggggaggacttcccagcatcagagatgacacggatcgccaggctgattgagaagaacaagatgagtgacgggaagaaggaggagctccagaagagcttaaacatcctgactgccttccagaagaagggggccgagaaagaggagctgtaaaaaggctgtctgtgattttccagggtttggtgggggtagggaggggagagttaacctgctggctgtgagtcccttgtggaatataagggggtagtgggaaaagtggtactaacccacgattctgagccctgagtatgcctggacattgatgctaacatgaccatgcttgggatgtctctagctggtctggggatagctggagcacttactcaggtggctggtgaaatgacacctcagaaggaatgagtgctatagagaggagagaggagtgtactgcccaggtctttgacagatgtaattctcattcaattaaagtttcagtgttttggttaagt

SEQ ID NO: 382468 - DNA, 920 bp, Homo sapiens
gagcctcctggggtgtccacgtgagcgcgcgtgagtccgcccccccagtcacgtgaccgctgactcggggcgttctccactatcgcttacctacctccctctgcaggaacccggcgatatggctgccgctgtgccccgcgccgcatttctctccccgctgcttccccttctcctgggcttcctgctcctctccgctccgcatggcggcagcggcctgcacaccaagggcgcccttcccctggatacggtcactttctacaaggtcattcccaaaagcaagttcgtcttggtgaagttcgacacccagtacccctacggtgagaagcaggatgagttcaagcgtcttgctgaaaactcggcttccagcgatgatctcttggtggcagaggtggggatctcagattatggtgacaagctgaacatggagctgagtgagaaatacaagctggacaaagagagctacccagtcttctacctcttccgggatggggactttgagaacccagtcccatacactggggcagttaaggttggagccatccagcgctggctgaaggggcaaggggtctacctaggtatgcctggttgcctgcctgtatacgacgccctggccggggagttcatcagggcctctggtgtggaggcccgccaggccctcttgaagcaggggcaagataacctctcaagtgtgaaggagactcagaagaagtgggccgagcaatacctgaagatcatggggaagatcttagaccaaggggaggacttcccagcatcagagatgacacggatcgccaggctgattgagaagaacaagatgagtgacgggaagaaggaggagctccagaagagcttaaacatcctgactgccttccagaagaagggggccgagaatccgcctgtctgagggatcctctatgcca

SEQ ID NO: 382469 - DNA, 767 bp, Homo sapiens
  misc_feature (748)..(748): n is a, c, g, or t
gagcctcctggggtgtccacgtgagcgcgcgtgagtccgcccccccagtcacgtgaccgctgactcggggcgttctccactatcgcttacctacctccctctgcaggaacccggcgatatggctgccgctgtgccccgcgccgcatttctctccccgctgcttccccttctcctgggcttcctgctcctctccgctccgcatggcggcagcggcctgcacaccaagggcgcccttcccctggatacggtcactttctacaaggtcattcccaaaagcaagttcgtcttggtgaagttcgacacccagtacccctacggtgagaagcaggatgagttcaagcgtcttgctgaaaactcggcttccagcgatgatctcttggtggcagaggtggggatctcagattatggtgacaagctgaacatggagctgagtgagaaatacaagctggacaaagagagctacccagtcttctacctcttccgggatggggactttgagaacccagtcccatacactggggcagttaaggttggagccatccagcgctggctgaaggggcaaggggtctacctaggtatgcctggttgcctgcctgtatacgacgccctggccggggagttcatcagggcctctggtgtggaggcccgccaggccctcttgaagcaggggcaagataacctctcaagtgtgaaggagactcagaagaagtgggccgagcaattacgctcgatgttacttgtcatcgcnctttcgatagggggtaccg

SEQ ID NO: 382470 - DNA, 4004 bp, Homo sapiens
  misc_feature (322)..(322): n is a, c, g, or t
  misc_feature (1167)..(1167): n is a, c, g, or t
aaatgttaaggaggcttatttaaatattcagggcttcaactaaagatctaaccactaagatcaaaagagttatttaaataaaagttgttgagacattttttcatctgtattaataatgtggcttttgaagttacccggtaataatgtgtccataatgcccacacctaatttttaatttccattttggctttaggtgtggctttattttaatagctgccaaaaagttggcaattgtttttacgtttagaacttcacagtttgcttttctgtaggtttaggtagcattggggatattcgtctaataaaaacttttaaaatttcngttctgaccctgaggcacttaaaaaaaactcttatgggccaaattttaaaagtagagtgtctctactactgcataaagaatttctataaaagatgaaacatggagctgattgaaagaatagacggcgcaatggtagaggacacatagttaccactgtcactggtaatctacagcttgatgcgaagtcattccgccttgtttgttgaaatgttaatcatttcattaagaaaggttaagtaattaactgatatttcattagggaatcaatgacagacctttttttagtgatgtatggtagatattttctaatagaaagtttgccccatttaattatttggaaagaagctagttgattgagccttgggaaggaggggtggggcatcttcagataacatctatgtccataagcaactttaaataattttggagaaaatggtctattagaatagaaaatcgttcagtccccagttttcttttatgggctccatcaggcatgttgttgcagacctgctgttgttttgcatgccttctctgggtttaagaagggttcagctgcttaaatgtgttcatcttattttctaaataatggcttttgttgcagtgtgatgcatgttgacagtaaacgcgcagccgtaactttggcacaaaaaaggaacaaagagtaaatcagtgagcacccatgtacctgtagcccggcttaagagagaagacgctgctggttcaggtaggagaggctcctggaatatcccatcctcatcttacctctgtccttctttcctagaggttactttaccactgttcgcagctgggtggttttcatcttgtgtagttcttcatatttttantatgtatgcatgtacaggattcctcaaaatacaggattttgttttgcacgttcaaggtttgttctgatagcatcctactatatatgttttttagtaacttgcttttttaaaaaataaacaacagtaaaattcatccatgtggatacatgtagctatagcttattgatttttccatgtgaaccttttgaaatactggatattaattcaagacaagttctttaaatttgagcctaaaacccagtagcactctgtacattgaaaatttcagattcataagaaaccatcagtcctgactggaacttcataatttgttcatttgtctgtgttttgggggaaaaaactttaaaacctcaaccatttatcagggaatttgattaaaaaaaataatctatcaagtggctgatctcttacattaagggaaaaaacaggcaaagcattcatttgaaggagcctagccattttctctttcttatttaaagacttggcttggaacttagcagttacatatgcagggtagcgagttaaaaagccatgtttaattaacaggcgctttatacttctgtatccttgttatgatatagcaccttgttcttcagtgtagaaagtgatttctgcatattttaaaggactggcatctttatggtaagaaagccatataaataaagatatacttagatgaaaatcggaacatgtttttaaaatagtgtgtgtctactttcatctctgttatcaaacttgctgcataagccagagttgatgctctgtgattatgctaatgaccaaaagaatcgatgatgcgagactagatgaaatcagtggtataatcggggaaagttatcagtttttttgtcattaagtattagtgataaataatacactgttcatttcgagtggatagaacatatttaattctgatgtacagagtttcattttagtcaggctcattgctgagtaaaatgatcatcttttgtaatttaagaggaaagagaaaaggcatttttgtcagcctggctaactgacttgggccatctagaaatgtttaccttgaccagccagggaagattggaaaaacttaattttttttcctcctagacaacttgcttatttgtactgacattttattaagaatatcagatactcagtaaatagcataaatgactagagatgttaaacaaaatgagtataaaggtagatagtgtttccctgaagaatggggaaaatgataacaaaggggcaatgtttggataatgctctttttaaatgactagtctgcattaaccaggggctattaaagtcggtatcacccattagacagcagttttaattttttttaattgagtttttcatatcaaataagatcatacttagtaatggtttacttaaagagaagtaatacttgtaacttagaatcttttcctgggttactaaaaccttaagggaaaacactgattctaccttccttgtcaacaaagcgtttctaacacaattctctgtaacagacatttctctgtggatagagtttagcacttgttttactactgtatgacagtacctggtgacaagagagaaaataaaagaataattagcaatgttctgtaggacatgaaaagtgattgaagtctacgagagaaggaaatcagatcgatgttattttaaaaaaatgcatcacaaaaatgattctcttcaaagcaaagcctcctacccaggctggggccagctgtgctctgccatttccctgccacagccctgtccgtccacgttggctcttaccagcagtaccatctgctgctccagcagtggccttctctatggtaaggcaggccaattgggtcaaatcttgtgatatggcagatgtccactgagagctaagattgggccaggctcatttttatgtgtgtccaaagccaagatttcaacttggtgaaaggctgtggaatttatttccccaagtgttgcccaaactctgttcttttcttcaactgcctccttgggctgagatgattgcttaatgctcttaattatgctggatccctctgtattttcgaacacctgtgggtaattcagatcatgagtggtcacagaggctggctcgacaaacggcttccctttccgaatgggaaaatcccagggagctggaccatgcaccgtgtgtcagggagctgagtggaggctgaaagaggatggaacacttcccttgaacttgaactggcattgtgttgtgtccaagtatccttcacccttggattggggagagtcttacaatgaataactcagaaaaaagttttcaaaataatcctagattgtaagatatctacgaccattatccatagccatatctttaaaaaaaaaaaaagaaaagtagaaaacaagaaacaaggtgtttctttacccaggccaagtgagcactaaagcttcctgtcataatgaggaggcagtgggggccactttgcttttgagacttggagtcccagtattactgggagtgccctgacccctcaggtagggacttgtcagagctccagaagacctaaggtacagtcagagctgagccacgcctttgtccatgaagagaatggggttgaaagtggagactgaggccgaggcgggtggatcacgaggtcaggagatccagaccatcctatcctggctaatacagtgaaaccctgtctttaaaaaattagccgggcgtggtggctggcgcctgtagtcccagctactcgggaggctgaggcaggagaatggcctgaacccaggaggcagagcttgcagtgagctgagatcgcgccactggactccagcctgggcgacagagcgagactccgtctcaaaaaaaaaaa

SEQ ID NO: 382471 - DNA, 402 bp, Homo sapiens
ttggtggaatctctgcctgggatatagtctttgagtatattctgtctttgaataattctaagggaaaaaatctacatttagaacttttgtaaactataaaacctagagcaggatataccgaaagccaccacttacattctattttgctgctgccgctagcgctttcatatccacagagcataatttcatttccttgtctagagtttgagtttgtgggccttgactacagttgaatctgtagttgttctttagatgggatattcgttattgcaaaggacacagccatgttgcaggagagtcctcgagtatgggatttccgaaaggagacagtgttgtgtatgtgcttttctcttctggttggtccccctttctgcactctccctgcccgcctttcttccagtc

SEQ ID NO: 382472 - DNA, 370 bp, Homo sapiens
gatctaagtaatcaatcaaatggtgaacagcccacaaccaaatctgaaaatagaagtgaggggatataattggcttataattattggtgaggtagagcaaaggtttaagtaaagtgagtccaatgcatttcttcagtgaacgttgtggactaccatgagccagaaactgggcattatgtcttccaagaaatgtaagacagcttttttttttttttaaactttgaaaggttgtattatacatttgttcagataatctgtttccacgaattgtcagattcacaaaacagaacttgtaggaagtagaactcagagaagtaaaatgaggtatcttcatctctatttttattttttcccctctgtcccctttttc

SEQ ID NO: 382473 - DNA, 546 bp, Homo sapiens
atatatatatataaagttattttttctttgggttaatttattataagttgtaacacttggctagttttgtttgtatatgtcttaaaatgttttcttatgatatttaagtgacagttaaagaggtatcaaggtaacttgtgtagaactattctttgatatattgtcatgtttgttgtgaatattttttcttactgcacagtagaaaaataaaaacaactgagtctttattttaatgtaactcagattggggaaaacaaaacagagctaagggaacaaaatgactgagggagcactctcccacgtccagtgcactgatcattttagtatgtttgtgctttgtacggttatatatttaaaacgaaaacaaaacaaaaaaatacaagggttcatgctcttccctgggtaatagaaacagttactcgctatgcataatctagttgatagttaaatttgctattgcttttcttgtcttgttatataaaatcttttcaatacaagtttagtcttaatggtaataaaacgttatggttatttataacttgtgct

SEQ ID NO: 382474 - DNA, 389 bp, Homo sapiens
cagaaatgggatccaggtagtctattgagcacagtttttttgtctttcctcttatcctacattccatgaaataatataaaatgtagctttaaaaagatgattcataattactgagagaaaattagaaaaattcccataagtagattaaaaaatttgaaaaacggaaaacgagtagaattggaaggatggagaaaaatacagcttgaaacacacagagcagaagatacagaaagtacatctattgtttgattcattcattttatgcaatataataaaggctttttaaaaaaaatacacacacacacccatatatataaacaattatcccctgaataatatgggcgttagaggcactgatccccatgcagtcgaaaatccacatgtacctt

SEQ ID NO: 382475 - DNA, 421 bp, Homo sapiens
tttaaatatgagtattttctgtcttctaagatgaccttttgttttctcacaaaaattttagtattctccaggtccagaattaatgttattataaaaaccactgtttttattttgttttcattgtctgggtattttattgctactagaatctgtatttttcatccctaaattaagccaaatatgggtagtgaataaattttaaaagacaagaactctgttagcagagtcaaatgcatgaaaatcattgcaatatcttgaattttaatattaaaagcccctgaaggagtagctctaacatatcacaggacaaaaatatagagaagatattattttcacacagccctaaaataaataagttgcctgatacccaggactttttaacattcatgttaagggtgatacctcaaccacttccaggaaa

SEQ ID NO: 382476 - DNA, 733 bp, Homo sapiens
aaggtatctccatcgttaagcaatgcatgactatatattcccgacaggcagatcagtaataatatcgtgctaaccccaatttgtgatttttagtgagtaattttaccttaagaaatttgaaactctcctgacaaacatacaatgttttctgttgccaaaaatattagaagcataaattgaaataataaccatttttatttttcttttttgaggttggcaaaaactgctaaaaatctatatgcttgaatagtctgtaatttagaagctacttacatctttatggctcctcccgctttttatgaaaaattagacaaaaaaagatactaacatagctttcaccagattgttaatgttttaccaaatttgctttcgtgtgtgtgtatgtgtgtgtgttcatattgtagagttggcaaaactccattctagtcttcttagggtcctggctgggtctgagaattaaatcaatgtaacatagatgaacatttattacataacataagatgatgacataacatagatgaatatttattacaagttttacatggaacagaagccattttttaaaaaacaaagaccaaagccaggcatggtggtgcacgcctatttcccagctactttggaggctgaggccaaaggatctcgaacccaggagttgcaggttactgtgagccatgattgcgccactgcactccagcctgggtaacagagcaaggccctgtctcttaaaaaaaaa

SEQ ID NO: 382477 - DNA, 350 bp, Homo sapiens
  misc_feature (347)..(347): n is a, c, g, or t
tcccatcaacagtacatgtgaatttcaatttttccacaacctcattagaacttggtattgtcagtgtggtagatactgccagttgtcccaggatctactttccccttcttcctttaataacagatttaatgagtttcacctggattgcagctgggcatgcccaaccaaatcatagacaagatgatgtggctgaaagtaatatgcatcacttctgggtcatgaccttaggaagcatgctccttagaaggtatgcttcccaaactcgagggggggcccgggtacccaatttcgccctattagttgagtcgttatttacaatttcactgggccgtcgtttttacaacgtncgt

SEQ ID NO: 382478 - DNA, 611 bp, Homo sapiens
gaagtgccgactgtatatagttctccagatgttaataagtgctatgaggaaaaataaagcaggggagtggatttagggacatgccagcagagtggtgggatggtggggttgtgattttaaataagatggttagggaaggcctcacagggagggtgacatttgaacagagccttgaaggacatgaggaagcaggccagatggatcacctgggggcacagcattgcacgcagaagaaacagcaagtgcgaagaccctgagtgggacagtccctagtttgtgctggtaacagcaaggagtccagtatggctggagctgagggagagggagagtagtaggtaagatcaaagagaaagggcaggggagattgtatagggcctcatgcagtttttaggcttttaactctgagatgggaaagtattggaaggttttgagcagagtaatgacaagatctgatgtgccttctaaaatgactgttgtggctgccatgttgggtagactatatcagggcaggggtagaggcaagagaccagttagggagctctttcagtatttgaggtgagaggctggatgctgtggctcacgcctataatcctagcactttggaaggccga

SEQ ID NO: 382479 - DNA, 263 bp, Homo sapiens
tctgtgctaagtacatttcttttataaatgaaaacataatcccctgttaaatgctttacctcatgaaaccttctcctggaaaaaacaaaacaagggaggctgaggcaggcagatcacctgaggtcaggagttcaagacaggcctggccaacatggcaaaaccccatctctactaaaaatacaaaagttagcagggtgtggtggcgggcacctgtaatcccagctacttgggaggctgagacaggagaatcgcttgaacccggg

SEQ ID NO: 382480 - DNA, 676 bp, Homo sapiens
gcaattccaaaatagattgcacgttcccagagttcagatggatccaggggaagaagtatttgtggtaagagctacagaaactccaccaaagaggtaaaagataaggaaaagcataccagacaacaattaattgatacagagaaactcctgagatgaaatgtgcgtatttgctgagcatttttaaggcattcccaggccttttaggtcattctggactgtttctctgcttttctgagctatttcaatgacagtagtagcttcctttgtatcctatttttgcaaaaggtgtatctgcctgctatggtttgaatgtttttggcccctccaaaattcacattgaaacagaattcctaatgtaacagtattaagaggtgtggcctttaggaagtgattgattcagaaccttcatgaaaaggaccagatgcccttataaaataacttgacagagagagttagccgtttttgcccttccatcccttctgccacgtgaggacatagtgttcttcccctccggagggtgcagcaacaaggtgccatcttggaagcagaaagcagccttcgccagacacgaatcctgcccacaccttgattttggactttctagcttccagagcagtgagaaataaatttttgttctttataaattataaatacagatttataaatctttataaat

SEQ ID NO: 382481 - DNA, 303 bp, Homo sapiens
tgttgttgcaaagtaatatgcagcatccagctcctccttccaggaagatctgctgtcccagttgcaggaagtgctggaggtgagctgcctttacctgtcgccccctttggggttccctgagagtctggctgagggtcaagcccacatcacagcaacccttctccttctgaccaatccagctgccttcccctccctttcaccagtgtttgccccaaagcaaactccagtagccatcctgcacatcatctcggtcccagagactgctccccaaagaagataccctgagaaaatgttggaagcatt

SEQ ID NO: 382482 - DNA, 530 bp, Homo sapiens
aaggacaggtgggggagttatttgtttgtttatttgtttgttttgatttcagaaagatgtgaactccaggatctcttgagagactgccaggtaagcaaccctgtggttaaaattcagtctttggtcccacactcatgataaatgcaatcatagcttcatacatctggcatcaagaaacagtaatctttcagcaaaaactctcacttggtgtatttttctcagccttgtcacaagaccttccaatttaacctgaagacactcctgaattagtaggaagctcaacaatatttcttccctgacaaatccttgtacttcagctccagctatctctgggaatgcaaggtgactccttgttgggaaaatactgcatttgtcccttccacggtaatgggctgttgctcaccatatatagtgagatttttccaagaaagagaaatatgtcccctttgctccataacctaagaagaaaataaaaaccatattcgcccaaatagaagaaggttgaattttgcttgttattgtcagctttg

SEQ ID NO: 382483 - DNA, 272 bp, Homo sapiens
aaggacaggtgggggagttatttgtttgtttatttgtttgttttgatttcagaaagatgtgaactccaggatctcttgagagactgccagagccagcagccccaaggatacttcgaacagtgggcactggtgcaattctataaaaagaaaccagaaaccatttagatgtgtgtcaggaagaagcacttccagatgcttgaggaaagatgcaagatagcaaggtgggaatctgagaaacaaggagtttaaggattttgccataagtcacctag

SEQ ID NO: 382484 - DNA, 3254 bp, Homo sapiens
  misc_feature (23)..(23): n is a, c, g, or t
  misc_feature (25)..(25): n is a, c, g, or t
  misc_feature (32)..(32): n is a, c, g, or t
  misc_feature (938)..(938): n is a, c, g, or t
  misc_feature (1045)..(1045): n is a, c, g, or t
tgcattcaggccaaggcggggcngncggatcnatgctcagggttccggagccgcggcccggggaggcgaaagcggagggggccgcgccgccgaccccgtccaagccgctcacgtccttcctcatccaggacatcctgcgggacggcgcgcagcggcaaggcggccgcacgagcagccagagacagcgcgacccggagccggagccagagccagagccagagggaggacgcagccgcgccggggcgcagaacgaccagctgagcaccgggccccgcgccgcgccggaggaggccgagacgctggcagagaccgagccagaaaggcacttggggtcttatctgttggactctgaaaacacttcaggcgcccttccaaggcttccccaaacccctaagcagccgcagaagcgctcccgagctgccttctcccacactcaggtgatcgagttggagaggaagttcagccatcagaagtacctgtcggcccctgaacgggcccacctggccaagaacctcaagctcacggagacccaagtgaagatatggttccagaacagacgctataagactaagcgaaagcagctctcctcggagctgggagacttggagaagcactcctctttgccggccctgaaagaggaggccttctcccgggcctccctggtctccgtgtataacagctatccttactacccatacctgtactgcgtgggcagctggagcccagctttttggtaatgccagctcaggtgacaaccattatgatcaaaaactgccttccccagggtgtctctatgaaaagcacaaggggccaaggtcagggagcaagaggtgtgcacaccaaagctattggagatttgcgtggaaatctcagattcttcactggtgagacaatgaaacaacagagacagtgaaagttttaatacctaagtcattccnccagtgcatactgtaggtcattttttttgcttctggctacctgtttgaaggggagagagggaaaatcaagtggtattttccagcactttgtatgattttggatgagntgtacacccaaggattctgttctgcaactccatcctcctgtgtcactgaatatcaactctgaaagagcaaacctaacaggagaaaggacaaccaggatgaggatgtcaccaactgaattaaacttaagtccagaagcctcctgttggccttggaatatggccaaggctctctctgtccctgtaaaagagaggggcaaatagagagtctccaagagaacgccctcatgctcagcacatatttgcatgggagggggagatgggtgggaggagatgaaaatatcagcttttcttattcctttttattccttttaaaatggtatgccaacttaagtatttacagggtggcccaaatagaacaagatgcactcgctgtgattttaagacaagctgtataaacagaactccactgcaagagggggggccgggccaggagaatctccgcttgtccaagacaggggcctaaggagggtctccacactgctgctaggggctgttgcatttttttattagtagaaagtggaaaggcctcttctcaacttttttcccttgggctggagaatttagaatcagaagtttcctggagttttcaggctatcatatatactgtatcctgaaaggcaacataattcttccttccctccttttaaaattttgtgttcctttttgcagcaattactcactaaagggcttcattttagtccagatttttagtctggctgcacctaacttatgcctcgcttatttagcccgagatctggtctttttttttttttttttttttccgtctccccaaagctttatctgtcttgactttttaaaaaagtttgggggcagattctgaattggctaaaagacatgcatttttaaaactagcaactcttatttctttcctttaaaaatacatagcattaaatcccaaatcctatttaaagacctgacagcttgagaaggtcactactgcatttataggaccttctggtggttctgctgttacgtttgaagtctgacaatccttgagaatctttgcatgcagaggaggtaagaggtattggattttcacagaggaagaacacagcgcagaatgaagggccaggcttactgagctgtccagtggagggctcatgggtgggacatggaaaagaaggcagcctaggccctggggagcccagtccactgagcaagcaagggactgagtgagccttttgcaggaaaaggctaagaaaaaggaaaaccattctaaaacacaacaagaaactgtccaaatgctttgggaactgtgtttattgcctataatgggtccccaaaatgggtaacctagacttcagagagaatgagcagagagcaaaggagaaatctggctgtccttccattttcattctgttatctcaggtgagctggtagaggggagacattagaaaaaaatgaaacaacaaaacaattactaatgaggtacgctgaggcctgggagtctcttgactccactacttaattccgtttagtgagaaacctttcaattttcttttattagaagggccagcttactgttggtggcaaaattgccaacataagttaatagaaagttggccaatttcaccccattttctgtggtttgggctccacattgcaatgttcaatgccacgtgctgctgacaccgaccggagtactagccagcacaaaaggcagggtagcctgaattgctttctgctctttacatttcttttaaaataagcatttagtgctcagtccctactgagtactctttctctcccctcctctgaatttaattctttcaacttgcaatttgcaaggattacacatttcactgtgatgtatattgtgttgcaaaaaaaaaaaaaagtgtctttgtttaaaattacttggtttgtgaatccatcttgctttttccccattggaactagtcattaacccatctctgaactggtagaaaaacatctgaagagctagtctatcagcatctgacaggtgaattggatggttctcagaaccatttcacccagacagcctgtttctatcctgtttaataaattagtttgggttctctacatgcataacaaaccctgctccaatctgtcacataaaagtctgtgacttgaagtttagtcagcacccccaccaaactttatttttctatgtgttttttgcaacatatgagtgttttgaaaataaagtacccatgtctttattaga

SEQ ID NO: 382485 - DNA, 3123 bp, Homo sapiens
  misc_feature (23)..(23): n is a, c, g, or t
  misc_feature (25)..(25): n is a, c, g, or t
  misc_feature (32)..(32): n is a, c, g, or t
  misc_feature (807)..(807): n is a, c, g, or t
  misc_feature (914)..(914): n is a, c, g, or t
tgcattcaggccaaggcggggcngncggatcnatgctcagggttccggagccgcggcccggggaggcgaaagcggagggggccgcgccgccgaccccgtccaagccgctcacgtccttcctcatccaggacatcctgcgggacggcgccgccggaggaggccgagacgctggcagagaccgagccagaaaggcacttggggtcttatctgttggactctgaaaacacttcaggcgcccttccaaggcttccccaaacccctaagcagccgcagaagcgctcccgagctgccttctcccacactcaggtgatcgagttggagaggaagttcagccatcagaagtacctgtcggcccctgaacgggcccacctggccaagaacctcaagctcacggagacccaagtgaagatatggttccagaacagacgctataagactaagcgaaagcagctctcctcggagctgggagacttggagaagcactcctctttgccggccctgaaagaggaggccttctcccgggcctccctggtctccgtgtataacagctatccttactacccatacctgtactgcgtgggcagctggagcccagctttttggtaatgccagctcaggtgacaaccattatgatcaaaaactgccttccccagggtgtctctatgaaaagcacaaggggccaaggtcagggagcaagaggtgtgcacaccaaagctattggagatttgcgtggaaatctcagattcttcactggtgagacaatgaaacaacagagacagtgaaagttttaatacctaagtcattccnccagtgcatactgtaggtcattttttttgcttctggctacctgtttgaaggggagagagggaaaatcaagtggtattttccagcactttgtatgattttggatgagntgtacacccaaggattctgttctgcaactccatcctcctgtgtcactgaatatcaactctgaaagagcaaacctaacaggagaaaggacaaccaggatgaggatgtcaccaactgaattaaacttaagtccagaagcctcctgttggccttggaatatggccaaggctctctctgtccctgtaaaagagaggggcaaatagagagtctccaagagaacgccctcatgctcagcacatatttgcatgggagggggagatgggtgggaggagatgaaaatatcagcttttcttattcctttttattccttttaaaatggtatgccaacttaagtatttacagggtggcccaaatagaacaagatgcactcgctgtgattttaagacaagctgtataaacagaactccactgcaagagggggggccgggccaggagaatctccgcttgtccaagacaggggcctaaggagggtctccacactgctgctaggggctgttgcatttttttattagtagaaagtggaaaggcctcttctcaacttttttcccttgggctggagaatttagaatcagaagtttcctggagttttcaggctatcatatatactgtatcctgaaaggcaacataattcttccttccctccttttaaaattttgtgttcctttttgcagcaattactcactaaagggcttcattttagtccagatttttagtctggctgcacctaacttatgcctcgcttatttagcccgagatctggtctttttttttttttttttttttccgtctccccaaagctttatctgtcttgactttttaaaaaagtttgggggcagattctgaattggctaaaagacatgcatttttaaaactagcaactcttatttctttcctttaaaaatacatagcattaaatcccaaatcctatttaaagacctgacagcttgagaaggtcactactgcatttataggaccttctggtggttctgctgttacgtttgaagtctgacaatccttgagaatctttgcatgcagaggaggtaagaggtattggattttcacagaggaagaacacagcgcagaatgaagggccaggcttactgagctgtccagtggagggctcatgggtgggacatggaaaagaaggcagcctaggccctggggagcccagtccactgagcaagcaagggactgagtgagccttttgcaggaaaaggctaagaaaaaggaaaaccattctaaaacacaacaagaaactgtccaaatgctttgggaactgtgtttattgcctataatgggtccccaaaatgggtaacctagacttcagagagaatgagcagagagcaaaggagaaatctggctgtccttccattttcattctgttatctcaggtgagctggtagaggggagacattagaaaaaaatgaaacaacaaaacaattactaatgaggtacgctgaggcctgggagtctcttgactccactacttaattccgtttagtgagaaacctttcaattttcttttattagaagggccagcttactgttggtggcaaaattgccaacataagttaatagaaagttggccaatttcaccccattttctgtggtttgggctccacattgcaatgttcaatgccacgtgctgctgacaccgaccggagtactagccagcacaaaaggcagggtagcctgaattgctttctgctctttacatttcttttaaaataagcatttagtgctcagtccctactgagtactctttctctcccctcctctgaatttaattctttcaacttgcaatttgcaaggattacacatttcactgtgatgtatattgtgttgcaaaaaaaaaaaaaagtgtctttgtttaaaattacttggtttgtgaatccatcttgctttttccccattggaactagtcattaacccatctctgaactggtagaaaaacatctgaagagctagtctatcagcatctgacaggtgaattggatggttctcagaaccatttcacccagacagcctgtttctatcctgtttaataaattagtttgggttctctacatgcataacaaaccctgctccaatctgtcacataaaagtctgtgacttgaagtttagtcagcacccccaccaaactttatttttctatgtgttttttgcaacatatgagtgttttgaaaataaagtacccatgtctttattaga

SEQ ID NO: 382486 - DNA, 1788 bp, Homo sapiens
tcgaactctagaggattcccccactactggccaggggcctaaggagggtctccacactgctgctaggggctgttgcatttttttattagtagaaagtggaaaggcctcttctcaacttttttcccttgggctggagaatttagaatcagaagtttcctggagttttcaggctatcatatatactgtatcctgaaaggcaacataattcttccttccctccttttaaaattttgtgttcctttttgcagcaattactcactaaagggcttcattttagtccagatttttagtctggctgcacctaacttatgcctcgcttatttagcccgagatctggtctttttttttttttttttttttccgtctccccaaagctttatctgtcttgactttttaaaaaagtttgggggcagattctgaattggctaaaagacatgcatttttaaaactagcaactcttatttctttcctttaaaaatacatagcattaaatcccaaatcctatttaaagacctgacagcttgagaaggtcactactgcatttataggaccttctggtggttctgctgttacgtttgaagtctgacaatccttgagaatctttgcatgcagaggaggtaagaggtattggattttcacagaggaagaacacagcgcagaatgaagggccaggcttactgagctgtccagtggagggctcatgggtgggacatggaaaagaaggcagcctaggccctggggagcccagtccactgagcaagcaagggactgagtgagccttttgcaggaaaaggctaagaaaaaggaaaaccattctaaaacacaacaagaaactgtccaaatgctttgggaactgtgtttattgcctataatgggtccccaaaatgggtaacctagacttcagagagaatgagcagagagcaaaggagaaatctggctgtccttccattttcattctgttatctcaggtgagctggtagaggggagacattagaaaaaaatgaaacaacaaaacaattactaatgaggtacgctgaggcctgggagtctcttgactccactacttaattccgtttagtgagaaacctttcaattttcttttattagaagggccagcttactgttggtggcaaaattgccaacataagttaatagaaagttggccaatttcaccccattttctgtggtttgggctccacattgcaatgttcaatgccacgtgctgctgacaccgaccggagtactagccagcacaaaaggcagggtagcctgaattgctttctgctctttacatttcttttaaaataagcatttagtgctcagtccctactgagtactctttctctcccctcctctgaatttaattctttcaacttgcaatttgcaaggattacacatttcactgtgatgtatattgtgttgcaaaaaaaaaaaaaagtgtctttgtttaaaattacttggtttgtgaatccatcttgctttttccccattggaactagtcattaacccatctctgaactggtagaaaaacatctgaagagctagtctatcagcatctgacaggtgaattggatggttctcagaaccatttcacccagacagcctgtttctatcctgtttaataaattagtttgggttctctacatgcataacaaaccctgctccaatctgtcacataaaagtctgtgacttgaagtttagtcagcacccccaccaaactttatttttctatgtgttttttgcaacatatgagtgttttgaaaataaagtacccatgtctttattaga

SEQ ID NO: 382487 - DNA, 1342 bp, Homo sapiens
tattactaaattcgcggcgctcgacttaaaaatacatagcattaaatcccaaatcctatttaaagacctgacagcttgagaaggtcactactgcatttataggaccttctggtggttctgctgttacgtttgaagtctgacaatccttgagaatctttgcatgcagaggaggtaagaggtattggattttcacagaggaagaacacagcgcagaatgaagggccaggcttactgagctgtccagtggagggctcatgggtgggacatggaaaagaaggcagcctaggccctggggagcccagtccactgagcaagcaagggactgagtgagccttttgcaggaaaaggctaagaaaaaggaaaaccattctaaaacacaacaagaaactgtccaaatgctttgggaactgtgtttattgcctataatgggtccccaaaatgggtaacctagacttcagagagaatgagcagagagcaaaggagaaatctggctgtccttccattttcattctgttatctcaggtgagctggtagaggggagacattagaaaaaaatgaaacaacaaaacaattactaatgaggtacgctgaggcctgggagtctcttgactccactacttaattccgtttagtgagaaacctttcaattttcttttattagaagggccagcttactgttggtggcaaaattgccaacataagttaatagaaagttggccaatttcaccccattttctgtggtttgggctccacattgcaatgttcaatgccacgtgctgctgacaccgaccggagtactagccagcacaaaaggcagggtagcctgaattgctttctgctctttacatttcttttaaaataagcatttagtgctcagtccctactgagtactctttctctcccctcctctgaatttaattctttcaacttgcaatttgcaaggattacacatttcactgtgatgtatattgtgttgcaaaaaaaaaaaaaagtgtctttgtttaaaattacttggtttgtgaatccatcttgctttttccccattggaactagtcattaacccatctctgaactggtagaaaaacatctgaagagctagtctatcagcatctgacaggtgaattggatggttctcagaaccatttcacccagacagcctgtttctatcctgtttaataaattagtttgggttctctacatgcataacaaaccctgctccaatctgtcacataaaagtctgtgacttgaagtttagtcagcacccccaccaaactttatttttctatgtgttttttgcaacatatgagtgttttgaaaataaagtacccatgtctttattaga

SEQ ID NO: 382488 - DNA, 398 bp, Homo sapiens
ctccgtaccccctttggggtctttgctattgtgttgcaaaaaaaaaagtgtctttgtttaaaattacttggtttgtgaatccatcttgctttttccccattggaactagtcattaacccatctctgaactggtagaaaaacatctgaagagctagtctatcagcatctgacaggtgaattggatggttctcagaaccatttcacccagacagcctgtttctatcctgtttaataaattagtttgggttctctacatgcataacaaaccctgctccaatctgtcacataaaagtctgtgacttgaagtttagtcagcacccccaccaaactttatttttctatgtgttttttgcaacatatgagtgttttgaaaataaagtacccatgtctttattaga

SEQ ID NO: 382489 - DNA, 3046 bp, Homo sapiens
  misc_feature (23)..(23): n is a, c, g, or t
  misc_feature (25)..(25): n is a, c, g, or t
  misc_feature (32)..(32): n is a, c, g, or t
  misc_feature (730)..(730): n is a, c, g, or t
  misc_feature (837)..(837): n is a, c, g, or t
tgcattcaggccaaggcggggcngncggatcnatgctcagggttccggagccgcggcccggggaggcgaaacgccggaggaggccgagacgctggcagagaccgagccagaaaggcacttggggtcttatctgttggactctgaaaacacttcaggcgcccttccaaggcttccccaaacccctaagcagccgcagaagcgctcccgagctgccttctcccacactcaggtgatcgagttggagaggaagttcagccatcagaagtacctgtcggcccctgaacgggcccacctggccaagaacctcaagctcacggagacccaagtgaagatatggttccagaacagacgctataagactaagcgaaagcagctctcctcggagctgggagacttggagaagcactcctctttgccggccctgaaagaggaggccttctcccgggcctccctggtctccgtgtataacagctatccttactacccatacctgtactgcgtgggcagctggagcccagctttttggtaatgccagctcaggtgacaaccattatgatcaaaaactgccttccccagggtgtctctatgaaaagcacaaggggccaaggtcagggagcaagaggtgtgcacaccaaagctattggagatttgcgtggaaatctcagattcttcactggtgagacaatgaaacaacagagacagtgaaagttttaatacctaagtcattccnccagtgcatactgtaggtcattttttttgcttctggctacctgtttgaaggggagagagggaaaatcaagtggtattttccagcactttgtatgattttggatgagntgtacacccaaggattctgttctgcaactccatcctcctgtgtcactgaatatcaactctgaaagagcaaacctaacaggagaaaggacaaccaggatgaggatgtcaccaactgaattaaacttaagtccagaagcctcctgttggccttggaatatggccaaggctctctctgtccctgtaaaagagaggggcaaatagagagtctccaagagaacgccctcatgctcagcacatatttgcatgggagggggagatgggtgggaggagatgaaaatatcagcttttcttattcctttttattccttttaaaatggtatgccaacttaagtatttacagggtggcccaaatagaacaagatgcactcgctgtgattttaagacaagctgtataaacagaactccactgcaagagggggggccgggccaggagaatctccgcttgtccaagacaggggcctaaggagggtctccacactgctgctaggggctgttgcatttttttattagtagaaagtggaaaggcctcttctcaacttttttcccttgggctggagaatttagaatcagaagtttcctggagttttcaggctatcatatatactgtatcctgaaaggcaacataattcttccttccctccttttaaaattttgtgttcctttttgcagcaattactcactaaagggcttcattttagtccagatttttagtctggctgcacctaacttatgcctcgcttatttagcccgagatctggtctttttttttttttttttttttccgtctccccaaagctttatctgtcttgactttttaaaaaagtttgggggcagattctgaattggctaaaagacatgcatttttaaaactagcaactcttatttctttcctttaaaaatacatagcattaaatcccaaatcctatttaaagacctgacagcttgagaaggtcactactgcatttataggaccttctggtggttctgctgttacgtttgaagtctgacaatccttgagaatctttgcatgcagaggaggtaagaggtattggattttcacagaggaagaacacagcgcagaatgaagggccaggcttactgagctgtccagtggagggctcatgggtgggacatggaaaagaaggcagcctaggccctggggagcccagtccactgagcaagcaagggactgagtgagccttttgcaggaaaaggctaagaaaaaggaaaaccattctaaaacacaacaagaaactgtccaaatgctttgggaactgtgtttattgcctataatgggtccccaaaatgggtaacctagacttcagagagaatgagcagagagcaaaggagaaatctggctgtccttccattttcattctgttatctcaggtgagctggtagaggggagacattagaaaaaaatgaaacaacaaaacaattactaatgaggtacgctgaggcctgggagtctcttgactccactacttaattccgtttagtgagaaacctttcaattttcttttattagaagggccagcttactgttggtggcaaaattgccaacataagttaatagaaagttggccaatttcaccccattttctgtggtttgggctccacattgcaatgttcaatgccacgtgctgctgacaccgaccggagtactagccagcacaaaaggcagggtagcctgaattgctttctgctctttacatttcttttaaaataagcatttagtgctcagtccctactgagtactctttctctcccctcctctgaatttaattctttcaacttgcaatttgcaaggattacacatttcactgtgatgtatattgtgttgcaaaaaaaaaaaaaagtgtctttgtttaaaattacttggtttgtgaatccatcttgctttttccccattggaactagtcattaacccatctctgaactggtagaaaaacatctgaagagctagtctatcagcatctgacaggtgaattggatggttctcagaaccatttcacccagacagcctgtttctatcctgtttaataaattagtttgggttctctacatgcataacaaaccctgctccaatctgtcacataaaagtctgtgacttgaagtttagtcagcacccccaccaaactttatttttctatgtgttttttgcaacatatgagtgttttgaaaataaagtacccatgtctttattaga

SEQ ID NO: 382490 - DNA, 1013 bp, Homo sapiens
cctgctcctccttccaatctctgcttctcccgggtaccccctccgccctccgtggggcccgggctctgcccctcccctcagaccctgcaccctctgcggattggtcctcggcctgctggggggcggggcccgagggccctgacgtcactggccgaggggggcgggcggctggaggagggggtgacggggccccggctcagcacctcggagagctccctccccggccttgttttgctctggcatcgccgccgggggagggagcgagggggccgggcaccgggcgcaaaggcagggggatggccatggaagggttgaggggccccgtcggacagagggcccagccgtgatccaacgagtgcctggtgagcgacagtcccgagggcagcccagcactgagccccagctgaggaacagcatgggcagtgccagccccacctgccaggggccatggacacctgccacctttcttcaacaagagtcccccaatccaggctacccttccagagaacgctacccacccagccagggttctctcggggaagatctcgtctgctcaccttagctttctgccttggcagcacgggctgcggaagaaagcacgctgggccaggaggcaggggtgcccaagccacagggagcccctggggaagcctgctccattcttctggtgaccttggcgctccttcactcatctcccctgccccctcaggaactggtggcccagcttccacacccccacctcccagtctctagcctctccatctgtctgtgtatggcctggagtcactccttcctcagcccccagggcaagagagctcaaataaaaaccagaggactgaaaaaaacaaagggaaaaaacttcggggatttatgccggggggcgaaaacacggggttatggaaatggggcatgtggttaaggtgttccttagacccggttttcttgcacaaggtggaaaattgagcgggtccacctatgaggagtggataactgggatagccggttacgctgta

SEQ ID NO: 382491 - DNA, 2804 bp, Homo sapiens
cctgctcctccttccaatctctgcttctcccgggtaccccctccgccctccgtggggcccgggctctgcccctcccctcagaccctgcaccctctgcggattggtcctcggcctgctggggggcggggcccgagggccctgacgtcactggccgaggggggcgggcggctggaggagggggtgacggggccccggctcagcacctcggagagctccctccccggccttgttttgctctggcatcgccgccgggggagggagcgagggggccgggcaccgggcgcaaaggcagggggatggccatggaagggttgaggggccccgtcggacagagggcccagccgtgatccagcgacgggtttggggctccgggaggggtgggggggcagcgggcggcggcagcagtggccgcacatctggatggaagcgagctttgtccagaccaccatggctctggggctgtcctccaagaaagcgtcctctcgcaacgtggctgtggagcgtaagaacctgatcaccgtgtgcaggttctctgtgaaaacgctgctggagaagtacacagcggagcccatcgatgactcatcggaggagtttgtcaattttgcagccattttagagcagatcctcagccaccgcttcaaagcctgtgccccagcaggtccagtgagctggttcagctcagacgggcagcggggcttttgggactatatccggctggcctgcagcaaagtgcccaacaactgtgtgagcagcatcgagaacatggagaacatcagcacagcccgggccaagggccgggcatggatccgggtggcactgatggagaagcgcatgtcagaatacatcaccacggctctgcgtgacacccggaccaccagacggttctatgactctggagccatcatgctgcgggatgaagccaccatcctcaccggaatgctgatcggactgagcgccatcgacttcagcttctgtctaaagggggaagtcctggacgggaagacccccgtggtcatcgattacacgccctacctaaagttcacgcagagctacgactacctgacggacgaggaggagcggcacagcgccgagagcagcacgagcgaggacaactcgcccgagcacccgtacctcccgctcgtcaccgatgaggacagctggtacagcaagtggcacaagatggagcagaagttccgcatcgtctacgcgcagaagggctacctggaggagctggtgcgtctgcgcgagtcgcagctgaaggacctggaggcggagaaccggcggcttcagctgcagctggaggaggcggcggcgcagaaccagcgcgagaaacgggagctggaaggcgtgatcctggagctgcaggagcagctgacaggtctgatccccagtgaccacgcccctctggcccagggttccaaggagctcactacacccctggtcaatcaatggccctcactgggaacgcttaatggggccgagggcgccagcaactccaagctctaccggagacacagcttcatgagcacggagccgctgtcagctgaagccagtctgagctcggactcccagcgcctgggagagggcacgcgggacgaggagccctggggtcccatcggaagctcagagccaaattagtggctcccttcgagcgaatgcccaggacttcaacgcatgcactttgtgttgacctcatccctggcttcaccttggtttttcccatcctagttctccctatgcctgaatatcctgtcttttcttttttataagcaaccacactgtattggatgaccctagatcttctttgagacaaggcaggctgtggccatgtagccccatcacactgtgtttgtgattgtctgtgtgtctgtctcccccaccagactgtgagctccatgagggcagggaccgtgtcttgtccgttctctgtatccccagtgcttggaacagagcgagtgctcactgtgtatttaataaatggacaaagagagaggatgaccctcacggggagacagagacatcaactgacgattacaatacagtgtccccagcacggtgcctggcacaggcaggtgcttaaccaaagtttaactgaaaatggcaaatgctgtggaatatgccaaggtctcctggggggtgacttgagggctgccccttcactgcccacccctctaccaactcccacacatgtagactggtcgcttggcctcacctgccctctctccccagggaaggaccccacgccctccatgctgggcctctgcggctccctggcctccattcccagctgcaagtccctggcgagcttcaaatccaacgagtgcctggtgagcgacagtcccgagggcagcccagcactgagccccagctgaggaacagcatgggcagtgccagccccacctgccaggggccatggacacctgccacctttcttcaacaagagtcccccaatccaggctacccttccagagaacgctacccacccagccagggttctctcggggaagatctcgtctgctcaccttagctttctgccttggcagcacgggctgcggaagaaagcacgctgggccaggaggcaggggtgcccaagccacagggagcccctggggaagcctgctccattcttctggtgaccttggcgctccttcactcatctcccctgccccctcaggaactggtggcccagcttccacacccccacctcccagtctctagcctctccatctgtctgtgtatggcctggagtcactccttcctcagcccccagggcaagagagctcaaataaaaaccagaggactga

SEQ ID NO: 382492 - DNA, 2856 bp, Homo sapiens
cctgctcctccttccaatctctgcttctcccgggtaccccctccgccctccgtggggcccgggctctgcccctcccctcagaccctgcaccctctgcggattggtcctcggcctgctggggggcggggcccgagggccctgacgtcactggccgaggggggcgggcggctggaggagggggtgacggggccccggctcagcacctcggagagctccctccccggccttgttttgctctggcatcgccgccgggggagggagcgagggggccgggcaccgggcgcaaaggcagggggatggccatggaagggttgaggggccccgtcggacagagggcccagccgtgatccagcgacgggtttggggctccgggaggggtgggggggcagcgggcggcggcagcagtggccgcacatctggatggaagcgagctttgtccagaccaccatggctctggggctgtcctccaagaaagcgtcctctcgcaacgtggctgtggagcgtaagaacctgatcaccgtgtgcaggttctctgtgaaaacgctgctggagaagtacacagcggagcccatcgatgactcatcggaggagtttgtcaattttgcagccattttagagcagatcctcagccaccgcttcaaagcctgtgccccagcaggtccagtgagctggttcagctcagacgggcagcggggcttttgggactatatccggctggcctgcagcaaagtgcccaacaactgtgtgagcagcatcgagaacatggagaacatcagcacagcccgggccaagggccgggcatggatccgggtggcactgatggagaagcgcatgtcagaatacatcaccacggctctgcgtgacacccggaccaccagacggttctatgactctggagccatcatgctgcgggatgaagccaccatcctcaccggaatgctgatcggactgagcgccatcgacttcagcttctgtctaaagggggaagtcctggacgggaagacccccgtggtcatcgattacacgccctacctaaagttcacgcagagctacgactacctgacggacgaggaggagcggcacagcgccgagagcagcacgagcgaggacaactcgcccgagcacccgtacctcccgctcgtcaccgatgaggacagctggtacagcaagtggcacaagatggagcagaagttccgcatcgtctacgcgcagaagggctacctggaggagctggtgcgtctgcgcgagtcgcagctgaaggacctggaggcggagaaccggcggcttcagctgcagctggaggaggcggcggcgcagaaccagcgcgagaaacgggagctggaaggcgtgatcctggagctgcaggagcagctgacaggtctgatccccagtgaccacgcccctctggcccagggttccaaggagctcactacacccctggtcaatcaatggccctcactgggaacgcttaatggggccgagggcgccagcaactccaagctctaccggagacacagcttcatgagcacggagccgctgtcagctgaagccagtctgagctcggactcccagcgcctgggagagggcacgcgggacgaggagccctggggtcccatcggaagctcagagccaaattagtggctcccttcgagcgaatgcccaggacttcaacgcatgcactttgtgttgacctcatccctggcttcaccttggtttttcccatcctagttctccctatgcctgaatatcctgtcttttcttttttataagcaaccacactgtattggatgaccctagatcttctttgagacaaggcaggctgtggccatgtagccccatcacactgtgtttgtgattgtctgtgtgtctgtctcccccaccagactgtgagctccatgagggcagggaccgtgtcttgtccgttctctgtatccccagtgcttggaacagagcgagtgctcactgtgtatttaataaatggacaaagagagaggatgaccctcacggggagacagagacatcaactgacgattacaatacagtgtccccagcacggtgcctggcacaggcaggtgcttaaccaaagtttaactgaaaatggcaaatgctgtggaatatgccaaggtctcctggggggtgacttgagggctgccccttcactgcccacccctctaccaactcccacacatgtagactggtcgcttggcctcacctgccctctctccccagggaaggaccccacgccctccatgctgggcctctgcggctccctggcctccattcccagctgcaagtccctggcgagcttcaaatccaacgagtgcctggtgagcgacagtcccgagggcagcccagcactgagccccagctgaggaacagcatgggcagtgccagccccacctgccaggggccatggacacctgccacctttcttcaacaagagtcccccaatccaggctacccttccagagaacgctacccacccagccagggttctctcggggaagatctcgtctgctcaccttagctttctgccttggcagcacgggctgcggaagaaagcacgctgggccaggaggcaggggtgcccaagccacagggagcccctggggaagcctgctccattcttctggtgaccttggcgctccttcactcatctcccctgccccctcaggaactggtggcccagcttccacacccccacctcccagtctctagcctctccatctgtctgtgtatggcctggagtcactccttcctcagcccccagggcaagagagctcaaataaaaaccagaggactgaaaaaaaaacaaataccgtagctatctaacaatgtacaacacaacaaagaggg

SEQ ID NO: 382493 - DNA, 2245 bp, Homo sapiens
cctgctcctccttccaatctctgcttctcccgggtaccccctccgccctccgtggggcccgggctctgcccctcccctcagaccctgcaccctctgcggattggtcctcggcctgctggggggcggggcccgagggccctgacgtcactggccgaggggggcgggcggctggaggagggggtgacggggccccggctcagcacctcggagagctccctccccggccttgttttgctctggcatcgccgccgggggagggagcgagggggccgggcaccgggcgcaaaggcagggggatggccatggaagggttgaggggccccgtcggacagagggcccagccgtgatccagcgacgggtttggggctccgggaggggtgggggggcagcgggcggcggcagcagtggccgcacatctggatggaagcgagctttgtccagaccaccatggctctggggctgtcctccaagaaagcgtcctctcgcaacgtggctgtggagcgtaagaacctgatcaccgtgtgcaggttctctgtgaaaacgctgctggagaagtacacagcggagcccatcgatgactcatcggaggagtttgtcaattttgcagccattttagagcagatcctcagccaccgcttcaaagcctgtgccccagcaggtccagtgagctggttcagctcagacgggcagcggggcttttgggactatatccggctggcctgcagcaaagtgcccaacaactgtgtgagcagcatcgagaacatggagaacatcagcacagcccgggccaagggccgggcatggatccgggtggcactgatggagaagcgcatgtcagaatacatcaccacggctctgcgtgacacccggaccaccagacggttctatgactctggagccatcatgctgcgggatgaagccaccatcctcaccggaatgctgatcggactgagcgccatcgacttcagcttctgtctaaagggggaagtcctggacgggaagacccccgtggtcatcgattacacgccctacctaaagttcacgcagagctacgactacctgacggacgaggaggagcggcacagcgccgagagcagcacgagcgaggacaactcgcccgagcacccgtacctcccgctcgtcaccgatgaggacagctggtacagcaagtggcacaagatggagcagaagttccgcatcgtctacgcgcagaagggctacctggaggagctggtgcgtctgcgcgagtcgcagctgaaggacctggaggcggagaaccggcggcttcagctgcagctggaggaggcggcggcgcagaaccagcgcgagaaacgggagctggaaggcgtgatcctggagctgcaggagcagctgacaggtctgatccccagtgaccacgcccctctggcccagggttccaaggagctcactacacccctggtcaatcaatggccctcactgggaacgcttaatggggccgagggcgccagcaactccaagctctaccggagacacagcttcatgagcacggagccgctgtcagctgaagccagtctgagctcggactcccagcgcctgggagagggcacgcgggacgaggagccctggggtcccatcgggaaggaccccacgccctccatgctgggcctctgcggctccctggcctccattcccagctgcaagtccctggcgagcttcaaatccaacgagtgcctggtgagcgacagtcccgagggcagcccagcactgagccccagctgaggaacagcatgggcagtgccagccccacctgccaggggccatggacacctgccacctttcttcaacaagagtcccccaatccaggctacccttccagagaacgctacccacccagccagggttctctcggggaagatctcgtctgctcaccttagctttctgccttggcagcacgggctgcggaagaaagcacgctgggccaggaggcaggggtgcccaagccacagggagcccctggggaagcctgctccattcttctggtgaccttggcgctccttcactcatctcccctgccccctcaggaactggtggcccagcttccacacccccacctcccagtctctagcctctccatctgtctgtgtatggcctggagtcactccttcctcagcccccagggcaagagagctcaaataaaaaccagaggactgaaaaaaaaacaaataccgtagctatctaacaatgtacaacacaacaaagaggg

SEQ ID NO: 382494 - DNA, 1998 bp, Homo sapiens
cctgctcctccttccaatctctgcttctcccgggtaccccctccgccctccgtggggcccgggctctgcccctcccctcagaccctgcaccctctgcggattggtcctcggcctgctggggggcggggcccgagggccctgacgtcactggccgaggggggcgggcggctggaggagggggtgacggggccccggctcagcacctcggagagctccctccccggccttgttttgctctggcatcgccgccgggggagggagcgagggggccgggcaccgggcgcaaaggcagggggatggccatggaagggttgaggggccccgtcggacagagggcccagccgtgatccagcgacgggtttggggctccgggaggggtgggggggcagcgggcggcggcagcagtggccgcacatctggatggaagcgagctttgtccagaccaccatggctctggggctgtcctccaagaaagcgtcctctcgcaacgtggctgtggagcgtaagaacctgatcaccgtgtgcaggttctctgtgaaaacgctgctggagaagtacacagcggagcccatcgatgactcatcggaggagtttgtcaattttgcagccattttagagcagatcctcagccaccgcttcaaagcctgtgccccagcaggtccagtgagctggttcagctcagacgggcagcggggcttttgggactatatccggctggcctgcagcaaagtgcccaacaactgtgtgagcagcatcgagaacatggagaacatcagcacagcccgggccaagggccgggcatggatccgggtggcactgatggagaagcgcatgtcagaatacatcaccacggctctgcgtgacacccggaccaccagacggttctatgactctggagccatcatgctgcgggatgaagccaccatcctcaccggaatgctgatcggactgagcgccatcgacttcagcttctgtctaaagggggaagtcctggacgggaagacccccgtggtcatcgattacacgccctacctaaagttcacgcagagctacgactacctgacggacgaggaggagcggcacagcgccgagagcagcacgagcgaggacaactcgcccgagcacccgtacctcccgctcgtcaccgatgaggacagctggtacagcaagtggcacaagatggagcagaagttccgcatcgtctacgcgcagaagggctacctggaggagctggtgcgtctgcgcgagtcgcagctgaaggacctggaggcggagaaccggcggcttcagctgcagctggaggaggcggcggcgcagaaccagcgcgagaaacgggagctggaaggcgtgatcctggagctgcaggagcagctgacaggtctgatccccagtgaccacgcccctctggcccagggttccaaggggaaggaccccacgccctccatgctgggcctctgcggctccctggcctccattcccagctgcaagtccctggcgagcttcaaatccaacgagtgcctggtgagcgacagtcccgagggcagcccagcactgagccccagctgaggaacagcatgggcagtgccagccccacctgccaggggccatggacacctgccacctttcttcaacaagagtcccccaatccaggctacccttccagagaacgctacccacccagccagggttctctcggggaagatctcgtctgctcaccttagctttctgccttggcagcacgggctgcggaagaaagcacgctgggccaggaggcaggggtgcccaagccacagggagcccctggggaagcctgctccattcttctggtgaccttggcgctccttcactcatctcccctgccccctcaggaactggtggcccagcttccacacccccacctcccagtctctagcctctccatctgtctgtgtatggcctggagtcactccttcctcagcccccagggcaagagagctcaaataaaaaccagaggactga

SEQ ID NO: 382495 - DNA, 2025 bp, Homo sapiens
cctgctcctccttccaatctctgcttctcccgggtaccccctccgccctccgtggggcccgggctctgcccctcccctcagaccctgcaccctctgcggattggtcctcggcctgctggggggcggggcccgagggccctgacgtcactggccgaggggggcgggcggctggaggagggggtgacggggccccggctcagcacctcggagagctccctccccggccttgttttgctctggcatcgccgccgggggagggagcgagggggccgggcaccgggcgcaaaggcagggggatggccatggaagggttgaggggccccgtcggacagagggcccagccgtgatccagcgacgggtttggggctccgggaggggtgggggggcagcgggcggcggcagcagtggccgcacatctggatggaagcgagctttgtccagaccaccatggctctggggctgtcctccaagaaagcgtcctctcgcaacgtggctgtggagcgtaagaacctgatcaccgtgtgcaggttctctgtgaaaacgctgctggagaagtacacagcggagcccatcgatgactcatcggaggagtttgtcaattttgcagccattttagagcagatcctcagccaccgcttcaaagcctgtgccccagcaggtccagtgagctggttcagctcagacgggcagcggggcttttgggactatatccggctggcctgcagcaaagtgcccaacaactgtgtgagcagcatcgagaacatggagaacatcagcacagcccgggccaagggccgggcatggatccgggtggcactgatggagaagcgcatgtcagaatacatcaccacggctctgcgtgacacccggaccaccagacggttctatgactctggagccatcatgctgcgggatgaagccaccatcctcaccggaatgctgatcggactgagcgccatcgacttcagcttctgtctaaagggggaagtcctggacgggaagacccccgtggtcatcgattacacgccctacctaaagttcacgcagagctacgactacctgacggacgaggaggagcggcacagcgccgagagcagcacgagcgaggacaactcgcccgagcacccgtacctcccgctcgtcaccgatgaggacagctggtacagcaagtggcacaagatggagcagaagttccgcatcgtctacgcgcagaagggctacctggaggagctggtgcgtctgcgcgagtcgcagctgaaggacctggaggcggagaaccggcggcttcagctgcagctggaggaggcggcggcgcagaaccagcgcgagaaacgggagctggaaggcgtgatcctggagctgcaggagcagctgacaggtctgatccccagtgaccacgcccctctggcccagggttccaaggagctcactacacccctggtcaatcaatggccctcactgggaacgcttaatggggccgagggcgccagcaactccaagctctaccggagacacagcttcatgagcacggagccgctgtcagctgaagccagtctgagctcggactcccagcgcctgggagagggcacgcgggacgaggagccctggggtcccatcggaagctcagagccaaattagtggctcccttcgagcgaatgcccaggacttcaacgcatgcactttgtgttgacctcatccctggcttcaccttggtttttcccatcctagttctccctatgcctgaatatcctgtcttttcttttttataagcaaccacactgtattggatgaccctagatcttctttgagacaaggcaggctgtggccatgtagccccatcacactgtgtttgtgattgtctgtgtgtctgtctcccccaccagactgtgagctccatgagggcagggaccgtgtcttgtccgttctctgtatccccagtgcttggaacagagcgagtgctcactgtgtatttaataaatggacaaagagagaggatgaaaaaaaaaagtcgacgcggccgcgaat

SEQ ID NO: 382496 - DNA, 1444 bp, Homo sapiens
cctgctcctccttccaatctctgcttctcccgggtaccccctccgccctccgtggggcccgggctctgcccctcccctcagaccctgcaccctctgcggattggtcctcggcctgctggggggcggggcccgagggccctgacgtcactggccgaggggggcgggcggctggaggagggggtgacggggccccggctcagcacctcggagagctccctccccggccttgttttgctctggcatcgccgccgggggagggagcgagggggccgggcaccgggcgcaaaggcagggggatggccatggaagggttgaggggccccgtcggacagagggcccagccgtgatccagcgacgggtttggggctccgggaggggtgggggggcagcgggcggcggcagcagtggccgcacatctggatggaagcgagctttgtccagaccaccatggctctggggctgtcctccaagaaagcgtcctctcgcaacgtggctgtggagcgtaagaacctgatcaccgtgtgcaggttctctgtgaaaacgctgctggagaagtacacagcggagcccatcgatgactcatcggaggagtttgtcaattttgcagccattttagagcagatcctcagccaccgcttcaaagcctgtgccccagcaggtccagtgagctggttcagctcagacgggcagcggggcttttgggactatatccggctggcctgcagcaaagtgcccaacaactgtgtgagcagcatcgagaacatggagaacatcagcacagcccgggccaagggccgggcatggatccgggtggcactgatggagaagcgcatgtcagaatacatcaccacggctctgcgtgacacccggaccaccagacggttctatgactctggagccatcatgctgcgggatgaagccaccatcctcaccggaatgctgatcggactgagcgccatcgacttcagcttctgtctaaagggggaagtcctggacgggaagacccccgtggtcatcgattacacgccctacctaaagttcacgcagagctacgactacctgacggacgaggaggagcggcacagcgccgagagcagcacgagcgaggacaactcgcccgagcacccgtacctcccgctcgtcaccgatgaggacagctggtacagcaagtggcacaagatggagcagaagttccgcatcgtctacgcgcagaagggctacctggaggagctggtgcgtctgcgcgagtcgcagctgaaggacctggaggcggagaaccggcggcttcagctgcagctggaggaggcggcggcgcagaaccagcgcgagaaacgggagctggaaggcgtgatcctggagctgcaggagcagctgacaggtctgatccccagtgaccatacccctctgcccagggtaaggctccctaagatccggtagagtcacc

SEQ ID NO: 382497 - DNA, 1456 bp, Homo sapiens
ccacgcgtcgcccacgcggtcgaccacgcgtccgatcagcacagcccgggccaagggccgggcatggatccgggtggcactgatggagaagcgcatgtcagaatacatcaccacggctctgcgtgacacccggaccaccagacggttctatgactctggagccatcatgctgcgggatgaagccaccatcctcaccggaatgctgatcggactgagcgccatcgacttcagcttctgtctaaagggggaagtcctggacgggaagacccccgtggtcatcgattacacgccctacctaaagttcacgcagagctacgactacctgacggacgaggaggagcggcacagcgccgagagcagcacgagcgaggacaactcgcccgagcacccgtacctcccgctcgtcaccgatgaggacagctggtacagcaagtggcacaagatggagcagaagttccgcatcgtctacgcgcagaagggctacctggaggagctggtgcgtctgcgcgagtcgcagctgaaggacctggaggcggagaaccggcggcttcagctgcagctggaggaggcggcggcgcagaaccagcgcgagaaacgggagctggaaggcgtgatcctggagctgcaggagcagctgacaggtctgatccccagtgaccacgcccctctggcccagggttccaaggagctcactacacccctggtcaatcaatggccctcactgggaacgcttaatggggccgagggcgccagcaactccaagctctaccggagacacagcttcatgagcacggagccgctgtcagctgaagccagtctgagctcggactcccagcgcctgggagagggcacgcgggacgaggagccctggggtcccatcgggaaggaccccacgccctccatgctgggcctctgcggctccctggcctccattcccagctgcaagtccctggcgagcttcaaatccaacgagtgcctggtgagcgacagtcccgagggcagcccagcactgagccccagctgaggaacagcatgggcagtgccagccccacctgccaggggccatggacacctgccacctttcttcaacaagagtcccccaatccaggctacccttccagagaacgctacccacccagccagggttctctcggggaagatctcgtctgctcaccttagctttctgccttggcagcacgggctgcggaagaaagcacgctgggccaggaggcaggggtgcccaagccacagggagcccctggggaagcctgctccattcttctggtgaccttggcgctccttcactcatctcccctgccccctcaggaactggtggcccagcttccacacccccacctcccagtctctagcctctccatctgtctgtgtatggcctggagtcactccttcctcagcccccagggcaagagagctcaaataaaaaccagaggactga

SEQ ID NO: 382498 - DNA, 2373 bp, Homo sapiens
cctgctcctccttccaatctctgcttctcccgggtaccccctccgccctccgtggggcccgggctctgcccctcccctcagaccctgcaccctctgcggattggtcctcggcctgctggggggcggggcccgagggccctgacgtcactggccgaggggggcgggcggctggaggagggggtgacggggccccggctcagcacctcggagagctccctccccggccttgttttgctctggcatcgccgccgggggagggagcgagggggccgggcaccgggcgcaaaggcagggggatggccatggaagggttgaggggccccgtcggacagagggcccagccgtgatccagcgacgggtttggggctccgggaggggtgggggggcagcgggcggcggcagcagtggccgcacatctggatggaagcgagctttgtccagaccaccatggctctggggctgtcctccaagaaagcgtcctctcgcaacgtggctgtggagcgtaagaacctgatcaccgtgtgcaggttctctgtgaaaacgctgctggagaagtacacagcggagcccatcgatgactcatcggaggagtttgtcaattttgcagccattttagagcagatcctcagccaccgcttcaaagcctgtgccccagcaggtccagtgagctggttcagctcagacgggcagcggggcttttgggactatatccggctggcctgcagcaaagtgcccaacaactgtgtgagcagcatcgagaacatggagaacatcagcacagcccgggccaagggccgggcatggatccgggtggcactgatggagaagcgcatgtcagaatacatcaccacggctctgcgtgacacccggaccaccagacggttctatgactctggagccatcatgctgcgggatgaagccaccatcctcaccggaatgctgatcggactgagcgccatcgacttcagcttctgtctaaagggggaagtcctggacgggaagacccccgtggtcatcgattacacgccctacctaaagttcacgcagagctacgactacctgacggacgaggaggagcggcacagcgccgagagcagcacgagcgaggacaactcgcccgagcacccgtacctcccgctcgtcaccgatgaggacagctggtacagcaagtggcacaagatggagcagaagttccgcatcgtctacgcgcagaagggctacctggaggagctggtgcgtctgcgcgagtcgcagctgaaggacctggaggcggagaaccggcggcttcagctgcagctggaggaggcggcggcgcagaaccagcgcgagaaacgggagctggaaggcgtgatcctggagctgcaggagcagctgacaggtctgatccccagtgaccacgcccctctggcccagggttccaaggagctcactacacccctggtcaatcaatggccctcactgggaacgcttaatggggccgagggcgccagcaactccaagctctaccggaggtaagccccagccaggtggggcttgggcctgagagcgggtcgtcctggggaagaagggcttcctctaccggcgcaccagctctcgctctgccgcagacacagcttcatgagcacggagccgctgtcagctgaagccagtctgagctcggactcccagcgcctgggagagggcacgcgggacgaggagccctggggtcccatcgagacggagtttcgccaggctggtctcgaactcctgacctcaagtgattcacccaccttggcctcccaaagtgctgggattacagggaaggaccccacgccctccatgctgggcctctgcggctccctggcctccattcccagctgcaagtccctggcgagcttcaaatccaacgagtgcctggtgagcgacagtcccgagggcagcccagcactgagccccagctgaggaacagcatgggcagtgccagccccacctgccaggggccatggacacctgccacctttcttcaacaagagtcccccaatccaggctacccttccagagaacgctacccacccagccagggttctctcggggaagatctcgtctgctcaccttagctttctgccttggcagcacgggctgcggaagaaagcacgctgggccaggaggcaggggtgcccaagccacagggagcccctggggaagcctgctccattcttctggtgaccttggcgctccttcactcatctcccctgccccctcaggaactggtggcccagcttccacacccccacctcccagtctctagcctctccatctgtctgtgtatggcctggagtcactccttcctcagcccccagggcaagagagctcaaataaaaaccagaggactga

SEQ ID NO: 382499 - DNA, 1998 bp, Homo sapiens
cctgctcctccttccaatctctgcttctcccgggtaccccctccgccctccgtggggcccgggctctgcccctcccctcagaccctgcaccctctgcggattggtcctcggcctgctggggggcggggcccgagggccctgacgtcactggccgaggggggcgggcggctggaggagggggtgacggggccccggctcagcacctcggagagctccctccccggccttgttttgctctggcatcgccgccgggggagggagcgagggggccgggcaccgggcgcaaaggcagggggatggccatggaagggttgaggggccccgtcggacagagggcccagccgtgatccagcgacgggtttggggctccgggaggggtgggggggcagcgggcggcggcagcagtggccgcacatctggatggaagcgagctttgtccagaccaccatggctctggggctgtcctccaagaaagcgtcctctcgcaacgtggctgtggagcgtaagaacctgatcaccgtgtgcaggttctctgtgaaaacgctgctggagaagtacacagcggagcccatcgatgactcatcggaggagtttgtcaattttgcagccattttagagcagatcctcagccaccgcttcaaagcctgtgccccagcaggtccagtgagctggttcagctcagacgggcagcggggcttttgggactatatccggctggcctgcagcaaagtgcccaacaactgtgtgagcagcatcgagaacatggagaacatcagcacagcccgggccaagggccgggcatggatccgggtggcactgatggagaagcgcatgtcagaatacatcaccacggctctgcgtgacacccggaccaccagacggttctatgactctggagccatcatgctgcgggatgaagccaccatcctcaccggaatgctgatcggactgagcgccatcgacttcagcttctgtctaaagggggaagtcctggacgggaagacccccgtggtcatcgattacacgccctacctaaagttcacgcagagctacgactacctgacggacgaggaggagcggcacagcgccgagagcagcacgagcgaggacaactcgcccgagcacccgtacctcccgctcgtcaccgatgaggacagctggtacagcaagtggcacaagatggagcagaagttccgcatcgtctacgcgcagaagggctacctggaggagctggtgcgtctgcgcgagtcgcagctgaaggacctggaggcggagaaccggcggcttcagctgcagctggaggaggcggcggcgcagaaccagcgcgagaaacgggagctggaaggcgtgatcctggagctgcaggagcagctgacaggtctgatccccagtgaccacgcccctctggcccagggttccaaggagctcactacacccctggtcaatcaatggccctcactgggaacgcttaatggggccgagggcgccagcaactccaagctctaccggagacacagcttcatgagcacggagccgctgtcagctgaagccagtctgagctcggactcccagcgcctgggagagggcacgcgggacgaggagccctggggtcccatcggaagctcagagccaaattagtggctcccttcgagcgaatgcccaggacttcaacgcatgcactttgtgttgacctcatccctggcttcaccttggtttttcccatcctagttctccctatgcctgaatatcctgtcttttcttttttataagcaaccacactgtattggatgaccctagatcttctttgagacaaggcaggctgtggccatgtagccccatcacactgtgtttgtgattgtctgtgtgtctgtctcccccaccagactgtgagctccatgagggcagggaccgtgtcttgtccgttctctgtatccccagtgcttggaacagagcgagtgctcactgtgtatttaataaatggacaaagagagaggatga

SEQ ID NO: 382500 - DNA, 2193 bp, Homo sapiens
cctgctcctccttccaatctctgcttctcccgggtaccccctccgccctccgtggggcccgggctctgcccctcccctcagaccctgcaccctctgcggattggtcctcggcctgctggggggcggggcccgagggccctgacgtcactggccgaggggggcgggcggctggaggagggggtgacggggccccggctcagcacctcggagagctccctccccggccttgttttgctctggcatcgccgccgggggagggagcgagggggccgggcaccgggcgcaaaggcagggggatggccatggaagggttgaggggccccgtcggacagagggcccagccgtgatccagcgacgggtttggggctccgggaggggtgggggggcagcgggcggcggcagcagtggccgcacatctggatggaagcgagctttgtccagaccaccatggctctggggctgtcctccaagaaagcgtcctctcgcaacgtggctgtggagcgtaagaacctgatcaccgtgtgcaggttctctgtgaaaacgctgctggagaagtacacagcggagcccatcgatgactcatcggaggagtttgtcaattttgcagccattttagagcagatcctcagccaccgcttcaaagcctgtgccccagcaggtccagtgagctggttcagctcagacgggcagcggggcttttgggactatatccggctggcctgcagcaaagtgcccaacaactgtgtgagcagcatcgagaacatggagaacatcagcacagcccgggccaagggccgggcatggatccgggtggcactgatggagaagcgcatgtcagaatacatcaccacggctctgcgtgacacccggaccaccagacggttctatgactctggagccatcatgctgcgggatgaagccaccatcctcaccggaatgctgatcggactgagcgccatcgacttcagcttctgtctaaagggggaagtcctggacgggaagacccccgtggtcatcgattacacgccctacctaaagttcacgcagagctacgactacctgacggacgaggaggagcggcacagcgccgagagcagcacgagcgaggacaactcgcccgagcacccgtacctcccgctcgtcaccgatgaggacagctggtacagcaagtggcacaagatggagcagaagttccgcatcgtctacgcgcagaagggctacctggaggagctggtgcgtctgcgcgagtcgcagctgaaggacctggaggcggagaaccggcggcttcagctgcagctggaggaggcggcggcgcagaaccagcgcgagaaacgggagctggaaggcgtgatcctggagctgcaggagcagctgacaggtctgatccccagtgaccacgcccctctggcccagggttccaaggagctcactacacccctggtcaatcaatggccctcactgggaacgcttaatggggccgagggcgccagcaactccaagctctaccggagacacagcttcatgagcacggagccgctgtcagctgaagccagtctgagctcggactcccagcgcctgggagagggcacgcgggacgaggagccctggggtcccatcgggaaggaccccacgccctccatgctgggcctctgcggctccctggcctccattcccagctgcaagtccctggcgagcttcaaatccaacgagtgcctggtgagcgacagtcccgagggcagcccagcactgagccccagctgaggaacagcatgggcagtgccagccccacctgccaggggccatggacacctgccacctttcttcaacaagagtcccccaatccaggctacccttccagagaacgctacccacccagccagggttctctcggggaagatctcgtctgctcaccttagctttctgccttggcagcacgggctgcggaagaaagcacgctgggccaggaggcaggggtgcccaagccacagggagcccctggggaagcctgctccattcttctggtgaccttggcgctccttcactcatctcccctgccccctcaggaactggtggcccagcttccacacccccacctcccagtctctagcctctccatctgtctgtgtatggcctggagtcactccttcctcagcccccagggcaagagagctcaaataaaaaccagaggactga

SEQ ID NO: 382501 - DNA, 2289 bp, Homo sapiens
cctgctcctccttccaatctctgcttctcccgggtaccccctccgccctccgtggggcccgggctctgcccctcccctcagaccctgcaccctctgcggattggtcctcggcctgctggggggcggggcccgagggccctgacgtcactggccgaggggggcgggcggctggaggagggggtgacggggccccggctcagcacctcggagagctccctccccggccttgttttgctctggcatcgccgccgggggagggagcgagggggccgggcaccgggcgcaaaggcagggggatggccatggaagggttgaggggccccgtcggacagagggcccagccgtgatccagcgacgggtttggggctccgggaggggtgggggggcagcgggcggcggcagcagtggccgcacatctggatggaagcgagctttgtccagaccaccatggctctggggctgtcctccaagaaagcgtcctctcgcaacgtggctgtggagcgtaagaacctgatcaccgtgtgcaggttctctgtgaaaacgctgctggagaagtacacagcggagcccatcgatgactcatcggaggagtttgtcaattttgcagccattttagagcagatcctcagccaccgcttcaaagcctgtgccccagcaggtccagtgagctggttcagctcagacgggcagcggggcttttgggactatatccggctggcctgcagcaaagtgcccaacaactgtgtgagcagcatcgagaacatggagaacatcagcacagcccgggccaagggccgggcatggatccgggtggcactgatggagaagcgcatgtcagaatacatcaccacggctctgcgtgacacccggaccaccagacggttctatgactctggagccatcatgctgcgggatgaagccaccatcctcaccggaatgctgatcggactgagcgccatcgacttcagcttctgtctaaagggggaagtcctggacgggaagacccccgtggtcatcgattacacgccctacctaaagttcacgcagagctacgactacctgacggacgaggaggagcggcacagcgccgagagcagcacgagcgaggacaactcgcccgagcacccgtacctcccgctcgtcaccgatgaggacagctggtacagcaagtggcacaagatggagcagaagttccgcatcgtctacgcgcagaagggctacctggaggagctggtgcgtctgcgcgagtcgcagctgaaggacctggaggcggagaaccggcggcttcagctgcagctggaggaggcggcggcgcagaaccagcgcgagaaacgggagctggaaggcgtgatcctggagctgcaggagcagctgacaggtctgatccccagtgaccacgcccctctggcccagggttccaaggagctcactacacccctggtcaatcaatggccctcactgggaacgcttaatggggccgagggcgccagcaactccaagctctaccggaggtaagccccagccaggtggggcttgggcctgagagcgggtcgtcctggggaagaagggcttcctctaccggcgcaccagctctcgctctgccgcagacacagcttcatgagcacggagccgctgtcagctgaagccagtctgagctcggactcccagcgcctgggagagggcacgcgggacgaggagccctggggtcccatcgggaaggaccccacgccctccatgctgggcctctgcggctccctggcctccattcccagctgcaagtccctggcgagcttcaaatccaacgagtgcctggtgagcgacagtcccgagggcagcccagcactgagccccagctgaggaacagcatgggcagtgccagccccacctgccaggggccatggacacctgccacctttcttcaacaagagtcccccaatccaggctacccttccagagaacgctacccacccagccagggttctctcggggaagatctcgtctgctcaccttagctttctgccttggcagcacgggctgcggaagaaagcacgctgggccaggaggcaggggtgcccaagccacagggagcccctggggaagcctgctccattcttctggtgaccttggcgctccttcactcatctcccctgccccctcaggaactggtggcccagcttccacacccccacctcccagtctctagcctctccatctgtctgtgtatggcctggagtcactccttcctcagcccccagggcaagagagctcaaataaaaaccagaggactga

SEQ ID NO: 382502 - DNA, 2082 bp, Homo sapiens
cctgctcctccttccaatctctgcttctcccgggtaccccctccgccctccgtggggcccgggctctgcccctcccctcagaccctgcaccctctgcggattggtcctcggcctgctggggggcggggcccgagggccctgacgtcactggccgaggggggcgggcggctggaggagggggtgacggggccccggctcagcacctcggagagctccctccccggccttgttttgctctggcatcgccgccgggggagggagcgagggggccgggcaccgggcgcaaaggcagggggatggccatggaagggttgaggggccccgtcggacagagggcccagccgtgatccagcgacgggtttggggctccgggaggggtgggggggcagcgggcggcggcagcagtggccgcacatctggatggaagcgagctttgtccagaccaccatggctctggggctgtcctccaagaaagcgtcctctcgcaacgtggctgtggagcgtaagaacctgatcaccgtgtgcaggttctctgtgaaaacgctgctggagaagtacacagcggagcccatcgatgactcatcggaggagtttgtcaattttgcagccattttagagcagatcctcagccaccgcttcaaagcctgtgccccagcaggtccagtgagctggttcagctcagacgggcagcggggcttttgggactatatccggctggcctgcagcaaagtgcccaacaactgtgtgagcagcatcgagaacatggagaacatcagcacagcccgggccaagggccgggcatggatccgggtggcactgatggagaagcgcatgtcagaatacatcaccacggctctgcgtgacacccggaccaccagacggttctatgactctggagccatcatgctgcgggatgaagccaccatcctcaccggaatgctgatcggactgagcgccatcgacttcagcttctgtctaaagggggaagtcctggacgggaagacccccgtggtcatcgattacacgccctacctaaagttcacgcagagctacgactacctgacggacgaggaggagcggcacagcgccgagagcagcacgagcgaggacaactcgcccgagcacccgtacctcccgctcgtcaccgatgaggacagctggtacagcaagtggcacaagatggagcagaagttccgcatcgtctacgcgcagaagggctacctggaggagctggtgcgtctgcgcgagtcgcagctgaaggacctggaggcggagaaccggcggcttcagctgcagctggaggaggcggcggcgcagaaccagcgcgagaaacgggagctggaaggcgtgatcctggagctgcaggagcagctgacaggtctgatccccagtgaccacgcccctctggcccagggttccaaggagctcactacacccctggtcaatcaatggccctcactgggaacgcttaatggggccgagggcgccagcaactccaagctctaccggagacacagcttcatgagcacggagccgctgtcagctgaagccagtctgagctcggactcccagcgcctgggagagggcacgcgggacgaggagccctggggtcccatcgagacggagtttcgccaggctggtctcgaactcctgacctcaagtgattcacccaccttggcctcccaaagtgctgggattacaggaagctcagagccaaattagtggctcccttcgagcgaatgcccaggacttcaacgcatgcactttgtgttgacctcatccctggcttcaccttggtttttcccatcctagttctccctatgcctgaatatcctgtcttttcttttttataagcaaccacactgtattggatgaccctagatcttctttgagacaaggcaggctgtggccatgtagccccatcacactgtgtttgtgattgtctgtgtgtctgtctcccccaccagactgtgagctccatgagggcagggaccgtgtcttgtccgttctctgtatccccagtgcttggaacagagcgagtgctcactgtgtatttaataaatggacaaagagagaggatga

SEQ ID NO: 382503 - DNA, 2341 bp, Homo sapiens
cctgctcctccttccaatctctgcttctcccgggtaccccctccgccctccgtggggcccgggctctgcccctcccctcagaccctgcaccctctgcggattggtcctcggcctgctggggggcggggcccgagggccctgacgtcactggccgaggggggcgggcggctggaggagggggtgacggggccccggctcagcacctcggagagctccctccccggccttgttttgctctggcatcgccgccgggggagggagcgagggggccgggcaccgggcgcaaaggcagggggatggccatggaagggttgaggggccccgtcggacagagggcccagccgtgatccagcgacgggtttggggctccgggaggggtgggggggcagcgggcggcggcagcagtggccgcacatctggatggaagcgagctttgtccagaccaccatggctctggggctgtcctccaagaaagcgtcctctcgcaacgtggctgtggagcgtaagaacctgatcaccgtgtgcaggttctctgtgaaaacgctgctggagaagtacacagcggagcccatcgatgactcatcggaggagtttgtcaattttgcagccattttagagcagatcctcagccaccgcttcaaagcctgtgccccagcaggtccagtgagctggttcagctcagacgggcagcggggcttttgggactatatccggctggcctgcagcaaagtgcccaacaactgtgtgagcagcatcgagaacatggagaacatcagcacagcccgggccaagggccgggcatggatccgggtggcactgatggagaagcgcatgtcagaatacatcaccacggctctgcgtgacacccggaccaccagacggttctatgactctggagccatcatgctgcgggatgaagccaccatcctcaccggaatgctgatcggactgagcgccatcgacttcagcttctgtctaaagggggaagtcctggacgggaagacccccgtggtcatcgattacacgccctacctaaagttcacgcagagctacgactacctgacggacgaggaggagcggcacagcgccgagagcagcacgagcgaggacaactcgcccgagcacccgtacctcccgctcgtcaccgatgaggacagctggtacagcaagtggcacaagatggagcagaagttccgcatcgtctacgcgcagaagggctacctggaggagctggtgcgtctgcgcgagtcgcagctgaaggacctggaggcggagaaccggcggcttcagctgcagctggaggaggcggcggcgcagaaccagcgcgagaaacgggagctggaaggcgtgatcctggagctgcaggagcagctgacaggtctgatccccagtgaccacgcccctctggcccagggttccaaggagctcactacacccctggtcaatcaatggccctcactgggaacgcttaatggggccgagggcgccagcaactccaagctctaccggaggtaagccccagccaggtggggcttgggcctgagagcgggtcgtcctggggaagaagggcttcctctaccggcgcaccagctctcgctctgccgcagacacagcttcatgagcacggagccgctgtcagctgaagccagtctgagctcggactcccagcgcctgggagagggcacgcgggacgaggagccctggggtcccatcgggaaggaccccacgccctccatgctgggcctctgcggctccctggcctccattcccagctgcaagtccctggcgagcttcaaatccaacgagtgcctggtgagcgacagtcccgagggcagcccagcactgagccccagctgaggaacagcatgggcagtgccagccccacctgccaggggccatggacacctgccacctttcttcaacaagagtcccccaatccaggctacccttccagagaacgctacccacccagccagggttctctcggggaagatctcgtctgctcaccttagctttctgccttggcagcacgggctgcggaagaaagcacgctgggccaggaggcaggggtgcccaagccacagggagcccctggggaagcctgctccattcttctggtgaccttggcgctccttcactcatctcccctgccccctcaggaactggtggcccagcttccacacccccacctcccagtctctagcctctccatctgtctgtgtatggcctggagtcactccttcctcagcccccagggcaagagagctcaaataaaaaccagaggactgaaaaaaaaacaaataccgtagctatctaacaatgtacaacacaacaaagaggg

SEQ ID NO: 382504 - DNA, 1763 bp, Homo sapiens
caggtgcatctgaagctgtctgggtgtggcggggggcatatacctccccatcccaattggccatacccagcctgatgtttttactgaattccattcctcagtctacacgtttcaagttaacacgttttttgcgcacctactgtataccaagcactaatgattaagacttgcttcctgatatgaaggatctgggtaacccagtacttgatgaggaaggggtagctcagagggaggagtcggctcagggaacacccattctaggtgatggggccacaggtgcgagccccaggctgaagggggagagaggctccaggcctgcgtgcagatcaggaaggagaattggccttccttcaggatggggtggcagtaagccaacaatagcagctctggggggggggggggcgctccaggggcctgctgcatcctctggccctctgcctccccacagacggttctatgactctggagccatcatgctgcgggatgaagccaccatcctcaccggaatgctgatcggactgagcgccatcgacttcagcttctgtctaaagggggaagtcctggacgggaagacccccgtggtcatcgattacacgccctacctaaagttcacgcagagctacgactacctgacggacgaggaggagcggcacagcgccgagagcagcacgagcgaggacaactcgcccgagcacccgtacctcccgctcgtcaccgatgaggacagctggtacagcaagtggcacaagatggagcagaagttccgcatcgtctacgcgcagaagggctacctggaggagctggtgcgtctgcgcgagtcgcagctgaaggacctggaggcggagaaccggcggcttcagctgcagctggaggaggcggcggcgcagaaccagcgcgagaaacgggagctggaaggcgtgatcctggagctgcaggagcagctgacaggtctgatccccagtgaccacgcccctctggcccagggttccaaggagctcactacacccctggtcaatcaatggccctcactgggaacgcttaatggggccgagggcgccagcaactccaagctctaccggagacacagcttcatgagcacggagccgctgtcagctgaagccagtctgagctcggactcccagcgcctgggagagggcacgcgggacgaggagccctggggtcccatcgggaaggaccccacgccctccatgctgggcctctgcggctccctggcctccattcccagctgcaagtccctggcgagcttcaaatccaacgagtgcctggtgagcgacagtcccgagggcagcccagcactgagccccagctgaggaacagcatgggcagtgccagccccacctgccaggggccatggacacctgccacctttcttcaacaagagtcccccaatccaggctacccttccagagaacgctacccacccagccagggttctctcggggaagatctcgtctgctcaccttagctttctgccttggcagcacgggctgcggaagaaagcacgctgggccaggaggcaggggtgcccaagccacagggagcccctggggaagcctgctccattcttctggtgaccttggcgctccttcactcatctcccctgccccctcaggaactggtggcccagcttccacacccccacctcccagtctctagcctctccatctgtctgtgtatggcctggagtcactccttcctcagcccccagggcaagagagctcaaataaaaaccagaggactga

SEQ ID NO: 382505 - DNA, 2152 bp, Homo sapiens
gctctggtggctagcctgtcctgacaggggagagttaagctcccgttctccaccgtgccggctggccaggtgggctgagggtgaccgagagaccagaacctgcttgctggagcttagtgctcagagctggggagggaggttccgccgctcctctgctgtcagcgccggcagcccctcccggcttcacttcctcccgcagcccctgctactgagaagctccgggatcccagcagccgccacgccctggcctcagcctgcggggctccagtcaggccaacaccgacgcgcagctgggaggaagacaggacccttgacatctccatctgcacagaggtcctggctggaccgagcagcctcctcctcctaggatgacctcaccctccagctctccagttttcaggttggagacattagatggaggccaagaagatggctctgaggcggacagaggaaagctggattttgggagcgggctgcctcccatggagtcacagttccagggcgaggaccggaaattcgcccctcagataagagtcaacctcaactaccgaaagggaacaggtgccagtcagccggatccaaaccgatttgaccgagatcggctcttcaatgcggtctcccggggtgtccccgaggatctggctggacttccagagtacctgagcaagaccagcaagtacctcaccgactcggaatacacagagggctccacaggtaagacgtgcctgatgaaggctgtgctgaaccttaaggacggggtcaatgcctgcattctgccactgctgcagatcgacagggactctggcaatcctcagcccctggtaaatgcccagtgcacagatgactattaccgaggccacagcgctctgcacatcgccattgagaagaggagtctgcagtgtgtgaagctcctggtggagaatggggccaatgtgcatgcccgggcctgcggccgcttcttccagaagggccaagggacttgcttttatttcgcaggccgcccctcacctgaaagcggaggttggaaactccatgctgctgacgggccacatccttatcctgctaggggggatctacctcctcgtgggccagctgtggtacttctggcggcgccacgtgttcatctggatctcgttcatagacagctactttgaaatcctcttcctgttccaggccctgctcacagtggtgtcccaggtgctgtgtttcctggccatcgagtggtacctgcccctgcttgtgtctgcgctggtgctgggctggctgaacctgctttactatacacgtggcttccagcacacaggcatctacagtgtcatgatccagaaggtcatcctgcgggacctgctgcgcttccttctgatctacttagtcttccttttcggcttcgctgtagccctggtgagcctgagccaggaggcttggcgccccgaagctcctacaggccccaatgccacagagtcagtgcagcccatggagggacaggaggacgagggcaacggggcccagtacaggggtatcctggaagcctccttggagctcttcaaattcaccatcggcatgggcgagctggccttccaggagcagctgcacttccgcggcatggtgctgctgctgctgctggcctacgtgctgctcacctacatcctgctgctcaacatgctcatcgccctcatgagcgagaccgtcaacagtgtcgccactgacagctggagcatctggaagctgcagaaagccatctctgtcctggagatggagaatggctattggtggtgcaggaagaagcagcgggcaggtgtgatgctgaccgttggcactaagccagatggcagccccgatgagcgctggtgcttcagggtggaggaggtgaactgggcttcatgggagcagacgctgcctacgctgtgtgaggacccgtcaggggcaggtgtccctcgaactctcgagaaccctgtcctggcttcccctcccaaggaggatgaggatggtgcctctgaggaaaactatgtgcccgtccagctcctccagtccaactgatggcccagatgcagcaggaggccagaggacagagcagaggatctttccaaccacatctgctggctctggggtcccagtgaattctggtggcaaatatatattttcactaactcaa

SEQ ID NO: 382506 - DNA, 2778 bp, Homo sapiens
gctctggtggctagcctgtcctgacaggggagagttaagctcccgttctccaccgtgccggctggccaggtgggctgagggtgaccgagagaccagaacctgcttgctggagcttagtgctcagagctggggagggaggttccgccgctcctctgctgtcagcgccggcagcccctcccggcttcacttcctcccgcagcccctgctactgagaagctccgggatcccagcagccgccacgccctggcctcagcctgcggggctccagtcaggccaacaccgacgcgcagctgggaggaagacaggacccttgacatctccatctgcacagaggtcctggctggaccgagcagcctcctcctcctaggatgacctcaccctccagctctccagttttcaggttggagacattagatggaggccaagaagatggctctgaggcggacagaggaaagctggattttgggagcgggctgcctcccatggagtcacagttccagggcgaggaccggaaattcgcccctcagataagagtcaacctcaactaccgaaagggaacaggtgccagtcagccggatccaaaccgatttgaccgagatcggctcttcaatgcggtctcccggggtgtccccgaggatctggctggacttccagagtacctgagcaagaccagcaagtacctcaccgactcggaatacacagagggctccacaggtaagacgtgcctgatgaaggctgtgctgaaccttaaggacggggtcaatgcctgcattctgccactgctgcagatcgacagggactctggcaatcctcagcccctggtaaatgcccagtgcacagatgactattaccgaggccacagcgctctgcacatcgccattgagaagaggagtctgcagtgtgtgaagctcctggtggagaatggggccaatgtgcatgcccgggcctgcggccgcttcttccagaagggccaagggacttgcttttatttcggtgagctacccctctctttggccgcttgcaccaagcagtgggatgtggtaagctacctcctggagaacccacaccagcccgccagcctgcaggccactgactcccagggcaacacagtcctgcatgccctagtgatgatctcggacaactcagctgagaacattgcactggtgaccagcatgtatgatgggctcctccaagctggggcccgcctctgccctaccgtgcagcttgaggacatccgcaacctgcaggatctcacgcctctgaagctggccgccaaggagggcaagatcgagattttcaggcacatcctgcagcgggagttttcaggactgagccacctttcccgaaagttcaccgagtggtgctatgggcctgtccgggtgtcgctgtatgacctggcttctgtggacagctgtgaggagaactcagtgctggagatcattgcctttcattgcaagagcccgcaccgacaccgaatggtcgttttggagcccctgaacaaactgctgcaggcgaaatgggatctgctcatccccaagttcttcttaaacttcctgtgtaatctgatctacatgttcatcttcaccgctgttgcctaccatcagcctaccctgaagaagcaggccgcccctcacctgaaagcggaggttggaaactccatgctgctgacgggccacatccttatcctgctaggggggatctacctcctcgtgggccagctgtggtacttctggcggcgccacgtgttcatctggatctcgttcatagacagctactttgaaatcctcttcctgttccaggccctgctcacagtggtgtcccaggtgctgtgtttcctggccatcgagtggtacctgcccctgcttgtgtctgcgctggtgctgggctggctgaacctgctttactatacacgtggcttccagcacacaggcatctacagtgtcatgatccagaaggtcatcctgcgggacctgctgcgcttccttctgatctacttagtcttccttttcggcttcgctgtagccctggtgagcctgagccaggaggcttggcgccccgaagctcctacaggccccaatgccacagagtcagtgcagcccatggagggacaggaggacgagggcaacggggcccagtacaggggtatcctggaagcctccttggagctcttcaaattcaccatcggcatgggcgagctggccttccaggagcagctgcacttccgcggcatggtgctgctgctgctgctggcctacgtgctgctcacctacatcctgctgctcaacatgctcatcgccctcatgagcgagaccgtcaacagtgtcgccactgacagctggagcatctggaagctgcagaaagccatctctgtcctggagatggagaatggctattggtggtgcaggaagaagcagcgggcaggtgtgatgctgaccgttggcactaagccagatggcagccccgatgagcgctggtgcttcagggtggaggaggtgaactgggcttcatgggagcagacgctgcctacgctgtgtgaggacccgtcaggggcaggtgtccctcgaactctcgagaaccctgtcctggcttcccctcccaaggaggatgaggatggtgcctctgaggaaaactatgtgcccgtccagctcctccagtccaactgatggcccagatgcagcaggaggccagaggacagagcagaggatctttccaaccacatctgctggctctggggtcccagtgaattctggtggcaaatatatattttcactaactcaa

SEQ ID NO: 382507 - DNA, 2711 bp, Homo sapiens
gctctggtggctagcctgtcctgacaggggagagttaagctcccgttctccaccgtgccggctggccaggtgggctgagggtgaccgagagaccagaacctgcttgctggagcttagtgctcagagctggggagggaggttccgccgctcctctgctgtcagcgccggcagcccctcccggcttcacttcctcccgcagcccctgctactgagaagctccgggatcccagcagccgccacgccctggcctcagcctgcggggctccagtcaggccaacaccgacgcgcagctgggaggaagacaggacccttgacatctccatctgcacagaggtcctggctggaccgagcagcctcctcctcctaggatgacctcaccctccagctctccagttttcaggttggagacattagatggaggccaagaagatggctctgaggcggacagaggaaagctggattttgggagcgggctgcctcccatggagtcacagttccagggcgaggaccggaaattcgcccctcagataagagtcaacctcaactaccgaaagggaacaggtgccagtcagccggatccaaaccgatttgaccgagatcggctcttcaatgcggtctcccggggtgtccccgaggatctggctggacttccagagtacctgagcaagaccagcaagtacctcaccgactcggaatacacagagggctccacaggtaagacgtgcctgatgaaggctgtgctgaaccttaaggacggggtcaatgcctgcattctgccactgctgcagatcgacagggactctggcaatcctcagcccctggtaaatgcccagtgcacagatgactattaccgaggccacagcgctctgcacatcgccattgagaagaggagtctgcagtgtgtgaagctcctggtggagaatggggccaatgtgcatgcccgggcctgcggccgcttcttccagaagggccaagggacttgcttttatttcggtgagctacccctctctttggccgcttgcaccaagcagtgggatgtggtaagctacctcctggagaacccacaccagcccgccagcctgcaggccactgactcccagggcaacacagtcctgcatgccctagtgatgatctcggacaactcagctgagaacattgcactggtgaccagcatgtatgatgggctcctccaagctggggcccgcctctgccctaccgtgcagcttgaggacatccgcaacctgcaggatctcacgcctctgaagctggccgccaaggagggcaagatcgagattttcaggcacatcctgcagcgggagttttcaggactgagccacctttcccgaaagttcaccgagtggtgctatgggcctgtccgggtgtcgctgtatgacctggcttctgtggacagctgtgaggagaactcagtgctggagatcattgcctttcattgcaagagcccgcaccgacaccgaatggtcgttttggagcccctgaacaaactgctgcaggcgaaatgggatctgctcatccccaagttcttcttaaacttcctgtgtaatctgatctacatgttcatcttcaccgctgttgcctaccatcagcctaccctgaagaagcaggccgcccctcacctgaaagcggaggttggaaactccatgctgctgacgggccacatccttatcctgctaggggggatctacctcctcgtgggccagctgtggtacttctggcggcgccacgtgttcatctggatctcgttcatagacagctactttgaaatcctcttcctgttccaggccctgctcacagtggtgtcccaggtgctgtgtttcctggccatcgagtggtacctgcccctgcttgtgtctgcgctggtgctgggctggctgaacctgctttactatacacgtggcttccagcacacaggcatctacagtgtcatgatccagaagccctggtgagcctgagccaggaggcttggcgccccgaagctcctacaggccccaatgccacagagtcagtgcagcccatggagggacaggaggacgagggcaacggggcccagtacaggggtatcctggaagcctccttggagctcttcaaattcaccatcggcatgggcgagctggccttccaggagcagctgcacttccgcggcatggtgctgctgctgctgctggcctacgtgctgctcacctacatcctgctgctcaacatgctcatcgccctcatgagcgagaccgtcaacagtgtcgccactgacagctggagcatctggaagctgcagaaagccatctctgtcctggagatggagaatggctattggtggtgcaggaagaagcagcgggcaggtgtgatgctgaccgttggcactaagccagatggcagccccgatgagcgctggtgcttcagggtggaggaggtgaactgggcttcatgggagcagacgctgcctacgctgtgtgaggacccgtcaggggcaggtgtccctcgaactctcgagaaccctgtcctggcttcccctcccaaggaggatgaggatggtgcctctgaggaaaactatgtgcccgtccagctcctccagtccaactgatggcccagatgcagcaggaggccagaggacagagcagaggatctttccaaccacatctgctggctctggggtcccagtgaattctggtggcaaatatatattttcactaactcaa

SEQ ID NO: 382508 - DNA, 2998 bp, Homo sapiens
gctctggtggctagcctgtcctgacaggggagagttaagctcccgttctccaccgtgccggctggccaggtgggctgagggtgaccgagagaccagaacctgcttgctggagcttagtgctcagagctggggagggaggttccgccgctcctctgctgtcagcgccggcagcccctcccggcttcacttcctcccgcagcccctgctactgagaagctccgggatcccagcagccgccacgccctggcctcagcctgcggggctccagtcaggccaacaccgacgcgcagctgggaggaagacaggacccttgacatctccatctgcacagaggtcctggctggaccgagcagcctcctcctcctaggatgacctcaccctccagctctccagttttcaggttggagacattagatggaggccaagaagatggctctgaggcggacagaggaaagctggattttgggagcgggctgcctcccatggagtcacagttccagggcgaggaccggaaattcgcccctcagataagagtcaacctcaactaccgaaagggaacaggtgccagtcagccggatccaaaccgatttgaccgagatcggctcttcaatgcggtctcccggggtgtccccgaggatctggctggacttccagagtacctgagcaagaccagcaagtacctcaccgactcggaatacacagagggctccacaggtaagacgtgcctgatgaaggctgtgctgaaccttaaggacggggtcaatgcctgcattctgccactgctgcagatcgacagggactctggcaatcctcagcccctggtaaatgcccagtgcacagatgactattaccgaggccacagcgctctgcacatcgccattgagaagaggagtctgcagtgtgtgaagctcctggtggagaatggggccaatgtgcatgcccgggcctgcggccgcttcttccagaagggccaagggacttgcttttatttcggtgagctacccctctctttggccgcttgcaccaagcagtgggatgtggtaagctacctcctggagaacccacaccagcccgccagcctgcaggccactgactcccagggcaacacagtcctgcatgccctagtgatgatctcggacaactcagctgagaacattgcactggtgaccagcatgtatgatgggctcctccaagctggggcccgcctctgccctaccgtgcagcttgaggacatccgcaacctgcaggatctcacgcctctgaagctggccgccaaggagggcaagatcgagattttcaggcacatcctgcagcgggagttttcaggactgagccacctttcccgaaagttcaccgagtggtgctatgggcctgtccgggtgtcgctgtatgacctggcttctgtggacagctgtgaggagaactcagtgctggagatcattgcctttcattgcaagagcccgcaccgacaccgaatggtcgttttggagcccctgaacaaactgctgcaggcgaaatgggatctgctcatccccaagttcttcttaaacttcctgtgtaatctgatctacatgttcatcttcaccgctgttgcctaccatcagcctaccctgaagaagcaggccgcccctcacctgaaagcggaggttggaaactccatgctgctgacgggccacatccttatcctgctaggggggatctacctcctcgtgggccagctgtggtacttctggcggcgccacgtgttcatctggatctcgttcatagacagctactttgaaatcctcttcctgttccaggccctgctcacagtggtgtcccaggtgctgtgtttcctggccatcgagtggtacctgcccctgcttgtgtctgcgctggtgctgggctggctgaacctgctttactatacacgtggcttccagcacacaggcatctacagtgtcatgatccagaaggtcatcctgcgggacctgctgcgcttccttctgatctacttagtcttccttttcggcttcgctgtagccctggtgagcctgagccaggaggcttggcgccccgaagctcctacaggccccaatgccacagagtcagtgcagcccatggagggacaggaggacgagggcaacggggcccagtacaggggtatcctggaagcctccttggagctcttcaaattcaccatcggcatgggcgagctggccttccaggagcagctgcacttccgcggcatggtgctgctgctgctgctggcctacgtgctgctcacctacatcctgctgctcaacatgctcatcgccctcatgagcgagaccgtcaacagtgtcgccactgacagctggagcatctggaagctgcagaaagccatctctgtcctggagatggagaatggctattggtggtgcaggaagaagcagcgggcaggtgtgatgctgaccgttggcactaagccagatggcagccccgatgagcgctggtgcttcaggaactctcgagaaccctgtcctggcttcccctcccaaggaggatgaggatggtgcctctgaggaaaactatgtgcccgtccagctcctccagtccaactgatggcccagatgcagcaggaggccagaggacagagcagaggatctttccaaccacatctgctggctctggggtcccagtgaattctggtggcaaatatatattttcactaactcaaaaaaaaaaaaaaacatctcaaaaaaaaaaaggggcagggcgacataaaaaataacaccaaaaggggcaccaagatagaagcgagaaacccagattacacagcggcacaaaggtgggcacaatatagcgagaccgccggatattgaaaaggcgaagcggatagtcggccgcgcagcggtttacaaacgagctgtcgtcactggggcacacaccggggcagccgtggagacaccttgtgtggaagggagccatttatcagtgtgatgtgtggagacatatatgtggcgccaacatgtccctt

SEQ ID NO: 382509 - DNA, 1812 bp, Homo sapiens
atggcctttgtacttgttatcatctgcataaacgctcctactgtgcagacggtgggactatcaagccagatgaccaaagatgggtgatggaaaacccacaccagcccgccagcctgcaggccactgactcccagggcaacacagtcctgcatgccctagtgatgatctcggacaactcagctgagaacattgcactggtgaccagcatgtatgatgggctcctccaagctggggcccgcctctgccctaccgtgcagcttgaggacatccgcaacctgcaggatctcacgcctctgaagctggccgccaaggagggcaagatcgagattttcaggcacatcctgcagcgggagttttcaggactgagccacctttcccgaaagttcaccgagtggtgctatgggcctgtccgggtgtcgctgtatgacctggcttctgtggacagctgtgaggagaactcagtgctggagatcattgcctttcattgcaagagcccgcaccgacaccgaatggtcgttttggagcccctgaacaaactgctgcaggcgaaatgggatctgctcatccccaagttcttcttaaacttcctgtgtaatctgatctacatgttcatcttcaccgctgttgcctaccatcagcctaccctgaagaagcaggccgcccctcacctgaaagcggaggttggaaactccatgctgctgacgggccacatccttatcctgctaggggggatctacctcctcgtgggccagctgtggtacttctggcggcgccacgtgttcatctggatctcgttcatagacagctactttgaaatcctcttcctgttccaggccctgctcacagtggtgtcccaggtgctgtgtttcctggccatcgagtggtacctgcccctgcttgtgtctgcgctggtgctgggctggctgaacctgctttactatacacgtggcttccagcacacaggcatctacagtgtcatgatccagaaggtcatcctgcgggacctgctgcgcttccttctgatctacttagtcttccttttcggcttcgctgtagccctggtgagcctgagccaggaggcttggcgccccgaagctcctacaggccccaatgccacagagtcagtgcagcccatggagggacaggaggacgagggcaacggggcccagtacaggggtatcctggaagcctccttggagctcttcaaattcaccatcggcatgggcgagctggccttccaggagcagctgcacttccgcggcatggtgctgctgctgctgctggcctacgtgctgctcacctacatcctgctgctcaacatgctcatcgccctcatgagcgagaccgtcaacagtgtcgccactgacagctggagcatctggaagctgcagaaagccatctctgtcctggagatggagaatggctattggtggtgcaggaagaagcagcgggcaggtgtgatgctgaccgttggcactaagccagatggcagccccgatgagcgctggtgcttcagggtggaggaggtgaactgggcttcatgggagcagacgctgcctacgctgtgtgaggacccgtcaggggcaggtgtccctcgaactctcgagaaccctgtcctggcttcccctcccaaggaggatgaggatggtgcctctgaggaaaactatgtgcccgtccagctcctccagtccaactgatggcccagatgcagcaggaggccagaggacagagcagaggatctttccaaccacatctgctggctctggggtcccagtgaattctggtggcaaatatatattttcactaactcaa

SEQ ID NO: 382510 - DNA, 1232 bp, Homo sapiens
ctcctctggcctcttctgccccacagcctgctggtttcccaggctcctgggccgtgaccactgcctcacatacagataggtttcccttcaccttctctttgcatctccctctcttcactacaatgccaggaaagtcacctctgaaagtcaccttgtccctccctcatcttgccccaagcactccacaccccactgcctgctggggcctccaatgtgacattcccaacaggaacagcctcggggctgccccagcaggtcacatgtatgtcaccccaccccctcctcacccaggtggaaggccttgagagtctcagcctattccccccgctataccagctctcccacctggagctgagtgtccttgacccctcaggcggccactcatccctctgccctgccctgcctcttacttctgcaccactgcaggggggcccagcctgcactcttacccattgcagtcctgctaatgtggacaaaaaccacatgcagcccacgctacacaatgcctcccactacctggaaggccgcactgctcagaatggaggtcagggcccaaagctgtctaactcactccccacacctccatccacatgtctgcagtactccttgttctttgctttccttggttcatctctggattcgtctctgtcggaagtgctcttcctcccctctggatgtccaaatctgccaccgcccctgcaggacaggtcccctctctcctctgagctcccccagcatgtctcaggtgttctgatctctgacacacaagtctgtcacctccaggcactttaagctcctgggggtggcaggggcagggggaagcccctgatatggcaggggattgggaaatgcttgtggagtgagggaagcagggagaaggattgctggcctccaggatcgctgaggctgtccccacggcatgacgtgttttcatgactgtggccccgtttccctggtgcctgcttcctggggacacactcaagggttaagctacagtgcttgccatctgtttacaggaactctcgagaaccctgtcctggcttcccctcccaaggaggatgaggatggtgcctctgaggaaaactatgtgcccgtccagctcctccagtccaactgatggcccagatgcagcaggaggccagaggacagagcagaggatctttccaaccacatctgctggctctggggtcccagtgaattctggtggcaaatatatattttcactaactcaa

SEQ ID NO: 382511 - DNA, 484 bp, Homo sapiens
ctcacaggacagggctccaagtgggtggcccagaaccctgcagagaaaaagcctgtcctcctcagggcctctgtgtccaccagagcatctctgcatagtctcccaatttggggggccacgcccctctccggggtgggaggggaggcggtcaaagcaggcaaacctcagagctgctctgttgccctcagggtggaggaggtgaactgggcttcatgggagcagacgctgcctacgctgtgtgaggacccgtcaggggcaggtgtccctcgaactctcgagaaccctgtcctggcttcccctcccaaggaggatgaggatggtgcctctgaggaaaactatgtgcccgtccagctcctccagtccaactgatggcccagatgcagcaggaggccagaggacagagcagaggatctttccaaccacatctgctggctctggggtcccagtgaattctggtggcaaatatatattttcactaactcaa

SEQ ID NO: 382512 - DNA, 2653 bp, Homo sapiens
gctctggtggctagcctgtcctgacaggggagagttaagctcccgttctccaccgtgccggctggccaggtgggctgagggtgaccgagagaccagaacctgcttgctggagcttagtgctcagagctggggagggaggttccgccgctcctctgctgtcagcgccggcagcccctcccggcttcacttcctcccgcagcccctgctactgagaagctccgggatcccagcagccgccacgccctggcctcagcctgcggggctccagtcaggccaacaccgacgcgcagctgggaggaagacaggacccttgacatctccatctgcacagaggtcctggctggaccgagcagcctcctcctcctaggatgacctcaccctccagctctccagttttcaggttggagacattagatggaggccaagaagatggctctgaggcggacagaggaaagctggattttgggagcgggctgcctcccatggagtcacagttccagggcgaggaccggaaattcgcccctcagataagagtcaacctcaactaccgaaagggaacaggtgccagtcagccggatccaaaccgatttgaccgagatcggctcttcaatgcggtctcccggggtgtccccgaggatctggctggacttccagagtacctgagcaagaccagcaagtacctcaccgactcggaatacacagagggctccacaggtaagacgtgcctgatgaaggctgtgctgaaccttaaggacggggtcaatgcctgcattctgccactgctgcagatcgacagggactctggcaatcctcagcccctggtaaatgcccagtgcacagatgactattaccgaggccacagcgctctgcacatcgccattgagaagaggagtctgcagtgtgtgaagctcctggtggagaatggggccaatgtgcatgcccgggcctgcggccgcttcttccagaagggccaagggacttgcttttatttcggtgagctacccctctctttggccgcttgcaccaagcagtgggatgtggtaagctacctcctggagaacccacaccagcccgccagcctgcaggccactgactcccagggcaacacagtcctgcatgccctagtgatgatctcggacaactcagctgagaacattgcactggtgaccagcatgtatgatgggctcctccaagctggggcccgcctctgccctaccgtgcagcttgaggacatccgcaacctgcaggatctcacgcctctgaagctggccgccaaggagggcaagatcgagattttcaggcacatcctgcagcgggagttttcaggactgagccacctttcccgaaagttcaccgagtggtgctatgggcctgtccgggtgtcgctgtatgacctggcttctgtggacagctgtgaggagaactcagtgctggagatcattgcctttcattgcaagagcccgcaccgacaccgaatggtcgttttggagcccctgaacaaactgctgcaggcgaaatgggatctgctcatccccaagttcttcttaaacttcctgtgtaatctgatctacatgttcatcttcaccgctgttgcctaccatcagcctaccctgaagaagcaggccgcccctcacctgaaagcggaggttggaaactccatgctgctgacgggccacatccttatcctgctaggggggatctacctcctcgtgggccagctgtggtacttctggcggcgccacgtgttcatctggatctcgttcatagacagctactttgaaatcctcttcctgttccaggccctgctcacagtggtgtcccaggtgctgtgtttcctggccatcgagtggtacctgcccctgcttgtgtctgcgctggtgctgggctggctgaacctgctttactatacacgtggcttccagcacacaggcatctacagtgtcatgatccagaaggtcatcctgcgggacctgctgcgcttccttctgatctacttagtcttccttttcggcttcgctgtagccctggtgagcctgagccaggaggcttggcgccccgaagctcctacaggccccaatgccacagagtcagtgcagcccatggagggacaggaggacgagggcaacggggcccagtacaggggtatcctggaagcctccttggagctcttcaaattcaccatcggcatgggcgagctggccttccaggagcagctgcacttccgcggcatggtgctgctgctgctgctggcctacgtgctgctcacctacatcctgctgctcaacatgctcatcgccctcatgagcgagaccgtcaacagtgtcgccactgacagctggagcatctggaagctgcagggtggaggaggtgaactgggcttcatgggagcagacgctgcctacgctgtgtgaggacccgtcaggggcaggtgtccctcgaactctcgagaaccctgtcctggcttcccctcccaaggaggatgaggatggtgcctctgaggaaaactatgtgcccgtccagctcctccagtccaactgatggcccagatgcagcaggaggccagaggacagagcagaggatctttccaaccacatctgctggctctggggtcccagtgaattctggtggcaaatatatattttcactaactcaa

SEQ ID NO: 382513 - DNA, 2251 bp, Homo sapiens
gctctggtggctagcctgtcctgacaggggagagttaagctcccgttctccaccgtgccggctggccaggtgggctgagggtgaccgagagaccagaacctgcttgctggagcttagtgctcagagctggggagggaggttccgccgctcctctgctgtcagcgccggcagcccctcccggcttcacttcctcccgcagcccctgctactgagaagctccgggatcccagcagccgccacgccctggcctcagcctgcggggctccagtcaggccaacaccgacgcgcagctgggaggaagacaggacccttgacatctccatctgcacagaggtcctggctggaccgagcagcctcctcctcctaggatgacctcaccctccagctctccagttttcaggttggagacattagatggaggccaagaagatggctctgaggcggacagaggaaagctggattttgggagcgggctgcctcccatggagtcacagttccagggcgaggaccggaaattcgcccctcagataagagtcaacctcaactaccgaaagggaacaggtgccagtcagccggatccaaaccgatttgaccgagatcggctcttcaatgcggtctcccggggtgtccccgaggatctggctggacttccagagtacctgagcaagaccagcaagtacctcaccgactcggaatacacagagggctccacaggtaagacgtgcctgatgaaggctgtgctgaaccttaaggacggggtcaatgcctgcattctgccactgctgcagatcgacagggactctggcaatcctcagcccctggtaaatgcccagtgcacagatgactattaccgaggccacagcgctctgcacatcgccattgagaagaggagtctgcagtgtgtgaagctcctggtggagaatggggccaatgtgcatgcccgggcctgcggccgcttcttccagaagggccaagggacttgcttttatttcggtgagctacccctctctttggccgcttgcaccaagcagtgggatgtggtaagctacctcctggagaacccacaccagcccgccagcctgcaggccactgactcccagggcaacacagtcctgcatgccctagtgatgatctcggacaactcagctgagaacattgcactggtgaccagcatgtatgatgggctcctccaagctggggcccgcctctgccctaccgtgcagcttgaggacatccgcaacctgcaggatctcacgcctctgaagctggccgccaaggagggcaagatcgagattttcaggcacatcctgcagcgggagttttcaggactgagccacctttcccgaaagttcaccgagtggtgctatgggcctgtccgggtgtcgctgtatgacctggcttctgtggacagctgtgaggagaactcagtgctggagatcattgcctttcattgcaagagcccgcaccgacaccgaatggtcgttttggagcccctgaacaaactgctgcaggcgaaatgggatctgctcatccccaagttcttcttaaacttcctgtgtaatctgatctacatgttcatcttcaccgctgttgcctaccatcagcctaccctgaagaagcaggccgcccctcacctgaaagcggaggttggaaactccatgctgctgacgggccacatccttatcctgctaggggggatctacctcctcgtgggccagctgtggtacttctggcggcgccacgtgttcatctggatctcgttcatagacagctactttgaaatcctcttcctgttccaggccctgctcacagtggtgtcccaggtgctgtgtttcctggccatcgagtggtacctgcccctgcttgtgtctgcgctggtgctgggctggctgaacctgctttactatacacgtggcttccagcacacaggcatctacagtgtcatgatccagaagggtggaggaggtgaactgggcttcatgggagcagacgctgcctacgctgtgtgaggacccgtcaggggcaggtgtccctcgaactctcgagaaccctgtcctggcttcccctcccaaggaggatgaggatggtgcctctgaggaaaactatgtgcccgtccagctcctccagtccaactgatggcccagatgcagcaggaggccagaggacagagcagaggatctttccaaccacatctgctggctctggggtcccagtgaattctggtggcaaatatatattttcactaactcaa

SEQ ID NO: 382514 - DNA, 701 bp, Homo sapiens
gtgtcttggtacagctcgtggctgtggtcagtgtggtggagggtaggtcttctcagatggtaacatgcatgagagtcacctggggatcacattaacatgcagattctgattccctggatctgggtgggacctgaggttctgcatgtctaacaaactcccagagaacacccatgtagcaagagtacagacaaaaggattcaaagcgaagggactgcaagaaccatggaaccagcctcccacgattttgcggatgacgaacccgagccttggggagtttcagaggccatggagagatgaagtataataaacagcatagcagttgtatgttgagccaagaatcagacatgcacagaactgctgattggaaaattaaatctgatctcatagccctggtgtgggcaaaatgcctagctggagtgggtgaccgctgatttacagtggggcttcttggtagggaaaattagtccatcccatttacagctacttccaatgcagctgtgtcaggggagagagaagaaaggacatggaagagagtgtagaggtatgatcttcagtcctttcaggcaggcacataagtaaatttttatttaaaagataagaattggtcatatgcgaatctcctgttagataagattaaaaacaaatttccattttgtggagaagttgcagataaatatttttccatgggatccaaaagaatc

SEQ ID NO: 382515 - DNA, 507 bp, Homo sapiens
cagaaagtgaggatgagagtgagaactcccactaaaaagtgaaaattctcaaagggggggaatatggtacgagaccaccacttctcctgttgtccttcccagtttctccccaacctccccttttccctagtttataagacaggagaaaagggagaaagcaaaaagttggaaagaaacagaagaaagataaatagctagacgaccttggcgccaccacctggccctggtggttaaaatgataataatattaacccctgaccaaaactactggtgttatctgtaaattccagacattgtgtgagaaagcactgtaaaactttttgtactgttagctgatgtaggtagcccacagtcacattcctcacacttacttgatctattatgactctttcacgtagaccccttagagttgtaagcccttcaaagggctaggaatttctttttcggggagctcggctcttaagatgcgagtctgctgatgctcccggccgaataaaaaacctcttc

SEQ ID NO: 382516 - DNA, 400 bp, Homo sapiens
tctccctcacagccccagaaggaaccacccttgatctcagtcttccaaccaccagaatcatgagaatttctactgcgtaagcccccaagtttgtagtactttgttacagcagccacaggaaatgaatccacacacatccacacccacccacatgcacacccggacacgacaagcgtgcggcccccagcgctgactccctgggccttcaatctctcattccatgcgtgtcttgtccgtcgttccgctttccactaatatttgcagcagtccgcataaagtcttggtggcttcgctctgcatgatctcagcatgaactctggcaggcagacaaagagtctgcagtaagttaatagtgctggtaaacatcattgtagtggggtgaatgttcctttcagtttgt

SEQ ID NO: 382517 - DNA, 414 bp, Homo sapiens
tgtaaggtaacattttgggaggaggccattattgtgcctaccacccgcattagctcctcaactttcccttcccagaggagaaccagggacagaaaacaataattctgccattcctcgagtacttactgagcatgtattatgtgccaggtattgtttcaatcagctggaacagagcggtaaataaaacagacacaaattcttcaccacatgatgcttatatcttggtgttgggaaggaaagaatatacataatacataagcaaaacctttagcaagtaagatgataaagaatcctgggttgtctttggtggctcacacctgtgatcccagcactttgggaggccaaggtgggagaattgcttgagaccaggagtttgagaccagactgggcaacatagtgagatcccttctctaa

SEQ ID NO: 382518 - DNA, 294 bp, Homo sapiens
gagcctagctctgcatttaggagaacagcacagcgcaccatgatctgatataggtataggtgggtgggagtctcagtctgtagttctatatcacctattaagagactggaacctggtcccatgttttctgcaggaggttgagctcttaacaatgtgccaagccagcagctgtgccctagagtcttggcctaagacaagcaaataattgtcagatgactgaatagttctgtttccttattaaatcttaggtttagaattcctttcacaattaaaaagatttggacaacaacttta

SEQ ID NO: 382519 - DNA, 3001 bp, Homo sapiens
ctcaattggaggatcaaagttgagaaaagtaatattcgacatttttcgattcaacggagtggccaccaagacgatgtcatagaagtctgaacgagtctcagttccaatttggtagaccacttcatacatctttgttggatttcctgtgtacttggtctttgttttctcctcgatgtacattactgagccagatataagattgcttttggatgcctgcagaagccctgagcaaacaagtttattgccaccttctactgcccaaaggccagaatcagaacaggacagtgacaccgcccccacaaaggcattgatgtccgtgctttggccataattgaccctcataacaggagcaatcatttcattgaggaacttctcagaaaagccggccttttgcaaggtttcaagaagtgttcgattaagcattccaaggaagtcatctcctcctagagcatgaagtaatttttcgacactactgaaggcatagtcatgagactggtagcggtagatcctcatgaacttgtctaacacgtcctctacccacatgtgcatacggagggattgaaatccatagcgccaaactaatttaatcacgttaattatgaaccagttgctctcctcaaataccagagtctctccattatatatccccagtacacccagaggctgatgctcaccatggggcgcctgcaactggttgtgttgggcctcacctgctgctgggcagtggcgagtgccgcgaagctgggcgccgtgtacacagaaggtgggttcgtggaaggcgtcaataagaagctcggcctcctgggtgactctgtggacatcttcaagggcatccccttcgcagctcccaccaaggccctggaaaatcctcagccacatcctggctggcaagggaccctgaaggccaagaacttcaagaagagatgcctgcaggccaccatcacccaggacagcacctacggggatgaagactgcctgtacctcaacatttgggtgccccagggcaggaagcaagtctcccgggacctgcccgttatgatctggatctatggaggcgccttcctcatggggtccggccatggggccaacttcctcaacaactacctgtatgacggcgaggagatcgccacacgcggaaacgtcatcgtggtcaccttcaactaccgtgtcggcccccttgggttcctcagcactggggacgccaatctgccaggtaactatggccttcgggatcagcacatggccattgcttgggtgaagaggaatatcgcggccttcgggggggaccccaacaacatcacgctcttcggggagtctgctggaggtgccagcgtctctctgcagaccctctccccctacaacaagggcctcatccggcgagccatcagccagagcggcgtggccctgagtccctgggtcatccagaaaaacccactcttctgggccaaaaaggtggctgagaaggtgggttgccctgtgggtgatgccgccaggatggcccagtgtctgaaggttactgatccccgagccctgacgctggcctataaggtgccgctggcaggcctggagtaccccatgctgcactatgtgggcttcgtccctgtcattgatggagacttcatccccgctgacccgatcaacctgtacgccaacgccgccgacatcgactatatagcaggcaccaacaacatggacggccacatcttcgccagcatcgacatgcctgccatcaacaagggcaacaagaaagtcacggaggaggacttctacaagctggtcagtgagttcacaatcaccaaggggctcagaggcgccaagacgacctttgatgtctacaccgagtcctgggcccaggacccatcccaggagaataagaagaagactgtggtggactttgagaccgatgtcctcttcctggtgcccaccgagattgccctagcccagcacagagccaatgccaagagtgccaagacctacgcctacctgttttcccatccctctcggatgcccgtctaccccaaatgggtgggggccgaccatgcagatgacattcagtacgttttcgggaagcccttcgccacccccacgggctaccggccccaagacaggacagtctctaaggccatgatcgcctactggaccaactttgccaaaacaggggaccccaacatgggcgactcggctgtgcccacacactgggaaccctacactacggaaaacagcggctacctggagatcaccaagaagatgggcagcagctccatgaagcggagcctgagaaccaacttcctgcgctactggaccctcacctatctggcgctgcccacagtgaccgaccaggaggccacccctgtgccccccacaggggactccgaggccactcccgtgccccccacgggtgactccgagaccgcccccgtgccgcccacgggtgactccggggccccccccgtgccgcccacgggtgactccggggccccccccgtgccgcccacgggtgactccggggccccccccgtgccgcccacgggtgactccggggccccccccgtgccgcccacgggtgactccggggccccccccgtgccgcccacgggtgactccggggccccccccgtgccgcccacgggtgactccggcgccccccccgtgccgcccacgggtgacgccgggcccccccccgtgccgcccacgggtgactccggcgccccccccgtgccgcccacgggtgactccggggccccccccgtgacccccacgggtgactccgagaccgcccccgtgccgcccacgggtgactccggggccccccctgtgccccccacgggtgactctgaggctgcccctgtgccccccacagatgactccaaggaagctcagatgcctgcagtcattaggttttagcgtcccatgagccttggtatcaagaggccacaagagtgggaccccaggggctcccctcccatcttgagctcttcctgaataaagcctcatacccctg

SEQ ID NO: 382520 - DNA, 3563 bp, Homo sapiens
  misc_feature (3016)..(3016): n is a, c, g, or t
  misc_feature (3018)..(3018): n is a, c, g, or t
  misc_feature (3028)..(3028): n is a, c, g, or t
ctcaattggaggatcaaagttgagaaaagtaatattcgacatttttcgattcaacggagtggccaccaagacgatgtcatagaagtctgaacgagtctcagttccaatttggtagaccacttcatacatctttgttggatttcctgtgtacttggtctttgttttctcctcgatgtacattactgagccagatataagattgcttttggatgcctgcagaagccctgagcaaacaagtttattgccaccttctactgcccaaaggccagaatcagaacaggacagtgacaccgcccccacaaaggcattgatgtccgtgctttggccataattgaccctcataacaggagcaatcatttcattgaggaacttctcagaaaagccggccttttgcaaggtttcaagaagtgttcgattaagcattccaaggaagtcatctcctcctagagcatgaagtaatttttcgacactactgaaggcatagtcatgagactggtagcggtagatcctcatgaacttgtctaacacgtcctctacccacatgtgcatacggagggattgaaatccatagcgccaaactaatttaatcacgttaattatgaaccagttgctctcctcaaataccagagtctctccattatatatccccagtacacccagaggctgatgctcaccatggggcgcctgcaactggttgtgttgggcctcacctgctgctgggcagtggcgagtgccgcgaagctgggcgccgtgtacacagaaggtgggttcgtggaaggcgtcaataagaagctcggcctcctgggtgactctgtggacatcttcaagggcatccccttcgcagctcccaccaaggccctggaaaatcctcagccacatcctggctggcaagggaccctgaaggccaagaacttcaagaagagatgcctgcaggccaccatcacccaggacagcacctacggggatgaagactgcctgtacctcaacatttgggtgccccagggcaggaagcaagtctcccgggacctgcccgttatgatctggatctatggaggcgccttcctcatggggtccggccatggggccaacttcctcaacaactacctgtatgacggcgaggagatcgccacacgcggaaacgtcatcgtggtcaccttcaactaccgtgtcggcccccttgggttcctcagcactggggacgccaatctgccaggtaactatggccttcgggatcagcacatggccattgcttgggtgaagaggaatatcgcggccttcgggggggaccccaacaacatcacgctcttcggggagtctgctggaggtgccagcgtctctctgcagaccctctccccctacaacaagggcctcatccggcgagccatcagccagagcggcgtggccctgagtccctgggtcatccagaaaaacccactcttctgggccaaaaaggtggctgagaaggtgggttgccctgtgggtgatgccgccaggatggcccagtgtctgaaggttactgatccccgagccctgacgctggcctataaggtgccgctggcaggcctggagtaccccatgctgcactatgtgggcttcgtccctgtcattgatggagacttcatccccgctgacccgatcaacctgtacgccaacgccgccgacatcgactatatagcaggcaccaacaacatggacggccacatcttcgccagcatcgacatgcctgccatcaacaagggcaacaagaaagtcacggaggaggacttctacaagctggtcagtgagttcacaatcaccaaggggctcagaggcgccaagacgacctttgatgtctacaccgagtcctgggcccaggacccatcccaggagaataagaagaagactgtggtggactttgagaccgatgtcctcttcctggtgcccaccgagattgccctagcccagcacagagccaatgccaagagtgccaagacctacgcctacctgttttcccatccctctcggatgcccgtctaccccaaatgggtgggggccgaccatgcagatgacattcagtacgttttcgggaagcccttcgccacccccacgggctaccggccccaagacaggacagtctctaaggccatgatcgcctactggaccaactttgccaaaacaggggaccccaacatgggcgactcggctgtgcccacacactgggaaccctacactacggaaaacagcggctacctggagatcaccaagaagatgggcagcagctccatgaagcggagcctgagaaccaacttcctgcgctactggaccctcacctatctggcgctgcccacagtgaccgaccaggaggccacccctgtgccccccacaggggactccgaggccactcccgtgccccccacgggtgactccgagaccgcccccgtgccgcccacgggtgactccggggccccccccgtgccgcccacgggtgactccggggccccccccgtgccgcccacgggtgactccggggccccccccgtgccgcccacgggtgactccggggccccccccgtgccgcccacgggtgactccggggccccccccgtgccgcccacgggtgactccggggccccccccgtgccgcccacgggtgactccggcgccccccccgtgccgcccacgggtgacgccgggcccccccccgtgccgcccacgggtgactccggcgccccccccgtgccgcccacgggtgactccggggccccccccgtgacccccacgggtgactccgagaccgcccccgtgccgcccacgggtgactccggggccccccctgtgccccccacgggtgactctgaggctgcccctgtgccccccacagatgactccaaggaagctcagatgcctgcagtcattaggttttagcgtcccatgagccttggtatcaagaggccacaagagtgggaccccaggggctcccctcccatcttgagctcttcctgaataaagcctcatacccctgaaaaaaaaaaaaaananaaaaaaaaanaaaaaaaaaaaaaaaaaaaaaaaaaaaaaaggggggggggcaaaaatttctcctccagagggcgccccacagtctctgcggcgcactccccactgtttttgtgtagaaaaggagggtgcccactactcgtggggcctgactattatactcctcagagcgacagggtgcgagctcatatcacaacaggcggcgcagacgcaggcgaagcacaacggcgactcgctccgcagccaacccctttgggcgctacacaacgcacccacccctcatcaccttccggcgggggcgcagcgagaccacacacctcctgggcccccccaccctcacccccgctaccccgcccgcgataccatttcagacacccgccgtaccgatgcggcaccacactctacccacgctccttctcgaccgggcggctatatcaacccgtggctctccccacacccaccacagccccgcctactgacctgtcacaccccccgcgccccaccaacgacacatcttcgcccgcccccccctgccagcatccctcccc

SEQ ID NO: 382521 - DNA, 3473 bp, Homo sapiens
  misc_feature (3050)..(3051): n is a, c, g, or t
  misc_feature (3059)..(3059): n is a, c, g, or t
  misc_feature (3066)..(3066): n is a, c, g, or t
  misc_feature (3070)..(3070): n is a, c, g, or t
  misc_feature (3072)..(3072): n is a, c, g, or t
  misc_feature (3074)..(3074): n is a, c, g, or t
ctcaattggaggatcaaagttgagaaaagtaatattcgacatttttcgattcaacggagtggccaccaagacgatgtcatagaagtctgaacgagtctcagttccaatttggtagaccacttcatacatctttgttggatttcctgtgtacttggtctttgttttctcctcgatgtacattactgagccagatataagattgcttttggatgcctgcagaagccctgagcaaacaagtttattgccaccttctactgcccaaaggccagaatcagaacaggacagtgacaccgcccccacaaaggcattgatgtccgtgctttggccataattgaccctcataacaggagcaatcatttcattgaggaacttctcagaaaagccggccttttgcaaggtttcaagaagtgttcgattaagcattccaaggaagtcatctcctcctagagcatgaagtaatttttcgacactactgaaggcatagtcatgagactggtagcggtagatcctcatgaacttgtctaacacgtcctctacccacatgtgcatacggagggattgaaatccatagcgccaaactaatttaatcacgttaattatgaaccagttgctctcctcaaataccagagtctctccattatatatccccagtacacccagaggctgatgctcaccatggggcgcctgcaactggttgtgttgggcctcacctgctgctgggcagtggcgagtgccgcgaagctgggcgccgtgtacacagaaggtgggttcgtggaaggcgtcaataagaagctcggcctcctgggtgactctgtggacatcttcaagggcatccccttcgcagctcccaccaaggccctggaaaatcctcagccacatcctggctggcaagggaccctgaaggccaagaacttcaagaagagatgcctgcaggccaccatcacccaggacagcacctacggggatgaagactgcctgtacctcaacatttgggtgccccagggcaggaagcaagtctcccgggacctgcccgttatgatctggatctatggaggcgccttcctcatggggtccggccatggggccaacttcctcaacaactacctgtatgacggcgaggagatcgccacacgcggaaacgtcatcgtggtcaccttcaactaccgtgtcggcccccttgggttcctcagcactggggacgccaatctgccaggtaactatggccttcgggatcagcacatggccattgcttgggtgaagaggaatatcgcggccttcgggggggaccccaacaacatcacgctcttcggggagtctgctggaggtgccagcgtctctctgcagaccctctccccctacaacaagggcctcatccggcgagccatcagccagagcggcgtggccctgagtccctgggtcatccagaaaaacccactcttctgggccaaaaaggtggctgagaaggtgggttgccctgtgggtgatgccgccaggatggcccagtgtctgaaggttactgatccccgagccctgacgctggcctataaggtgccgctggcaggcctggagtaccccatgctgcactatgtgggcttcgtccctgtcattgatggagacttcatccccgctgacccgatcaacctgtacgccaacgccgccgacatcgactatatagcaggcaccaacaacatggacggccacatcttcgccagcatcgacatgcctgccatcaacaagggcaacaagaaagtcacggaggaggacttctacaagctggtcagtgagttcacaatcaccaaggggctcagaggcgccaagacgacctttgatgtctacaccgagtcctgggcccaggacccatcccaggagaataagaagaagactgtggtggactttgagaccgatgtcctcttcctggtgcccaccgagattgccctagcccagcacagagccaatgccaagagtgccaagacctacgcctacctgttttcccatccctctcggatgcccgtctaccccaaatgggtgggggccgaccatgcagatgacattcagtacgttttcgggaagcccttcgccacccccacgggctaccggccccaagacaggacagtctctaaggccatgatcgcctactggaccaactttgccaaaacaggggaccccaacatgggcgactcggctgtgcccacacactgggaaccctacactacggaaaacagcggctacctggagatcaccaagaagatgggcagcagctccatgaagcggagcctgagaaccaacttcctgcgctactggaccctcacctatctggcgctgcccacagtgaccgaccaggaggccacccctgtgccccccacaggggactccgaggccactcccgtgccccccacgggtgactccgagaccgcccccgtgccgcccacgggtgactccggggccccccccgtgccgcccacgggtgactccggggccccccccgtgccgcccacgggtgactccggggccccccccgtgccgcccacgggtgactccggggccccccccgtgccgcccacgggtgactccggggccccccccgtgccgcccacgggtgactccggggccccccccgtgccgcccacgggtgactccggcgccccccccgtgccgcccacgggtgacgccgggcccccccccgtgccgcccacgggtgactccggcgccccccccgtgccgcccacgggtgactccggggccccccccgtgacccccacgggtgactccgagaccgcccccgtgccgcccacgggtgactccggggccccccctgtgccccccacgggtgactctgaggctgcccctgtgccccccacagatgactccaaggaagctcagatgcctgcagtcattaggttttagcgtcccatgagccttggtatcaagaggccacaagagtgggaccccaggggctcccctcccatcttgagctcttcctgaataaagcctcatacccctgaaaaaaaaaaaaaaaaaaaaaaaaaaaaaaaaaaaaaaaaaaaaaaaannaaaaaaanaaaaaanaaanananaaaaaggggcgggcgcgcgcgcgcgcgcgcgcccagaagaaaatcgtcaaaacaaacccgcggggggggcgcgcggcggccccccagagaaaggaggagagaaagcaggggaacaagagggggaacacaagaaaagcgcgggagaaaaaacaaaagcgggggggaaatccaccacacaaaagaaaacgcgccggggggaaaacaccagagagtcatgcagaaaaccacgcgaaagggaaacgagagacacaaagcggaggcgccatacacaaagggagagacacaccaagggaagaggcgaaaaaacaaataagcgcacacgggcgctgggtggacgacagcaagcggaaagcaacagagacaacagaacaacagagaacacgcgcaaaccgaacaagc

SEQ ID NO: 382522 - DNA, 1867 bp, Homo sapiens
ctcaattggaggatcaaagttgagaaaagtaatattcgacatttttcgattcaacggagtggccaccaagacgatgtcatagaagtctgaacgagtctcagttccaatttggtagaccacttcatacatctttgttggatttcctgtgtacttggtctttgttttctcctcgatgtacattactgagccagatataagattgcttttggatgcctgcagaagccctgagcaaacaagtttattgccaccttctactgcccaaaggccagaatcagaacaggacagtgacaccgcccccacaaaggcattgatgtccgtgctttggccataattgaccctcataacaggagcaatcatttcattgaggaacttctcagaaaagccggccttttgcaaggtttcaagaagtgttcgattaagcattccaaggaagtcatctcctcctagagcatgaagtaatttttcgacactactgaaggcatagtcatgagactggtagcggtagatcctcatgaacttgtctaacacgtcctctacccacatgtgcatacggagggattgaaatccatagcgccaaactaatttaatcacgttaattatgaaccagttgctctcctcaaataccagagtctctccattatatatccccagtacacccagaggctgatgctcaccatggggcgcctgcaactggttgtgttgggcctcacctgctgctgggcagtggcgagtgccgcgaagaccccatgctgcactatgtgggcttcgtccctgtcattgatggagacttcatccccgctgacccgatcaacctgtacgccaacgccgccgacatcgactatatagcaggcaccaacaacatggacggccacatcttcgccagcatcgacatgcctgccatcaacaagggcaacaagaaagtcacggaggaggacttctacaagctggtcagtgagttcacaatcaccaaggggctcagaggcgccaagacgacctttgatgtctacaccgagtcctgggcccaggacccatcccaggagaataagaagaagactgtggtggactttgagaccgatgtcctcttcctggtgcccaccgagattgccctagcccagcacagagccaatgccaagagtgccaagacctacgcctacctgttttcccatccctctcggatgcccgtctaccccaaatgggtgggggccgaccatagagatgagatccagtacatctttggggagccctttgccaccccactccgggctaccggccccaagacaggacagtctctaaggccatgaccgcctactggaccaactttgccaaaacaggggaccccaacatgggcgactcggctgtgcccacacactgggaaccctacactacggaaaacagcggctacctggagatcaccaagaagatgggcagcagctccatgaagcggagcctgagaaccaacttcctgcgctactggaccctcacctatctggcgctgcccacagtgaccgaccaggaggccagttccatgccctccacaggggactctgaggccactcccatctcccccgacaggcaactccgagtctgcccccgtccctgcaacgggtgactctcaggatgcccctgtgcccctcacaagtgactctgaggctcccccgtaccctacgggtgactctgaggcccgtgcccaccttgggtgacactgaggctgcccctgtgtcccccacagatgactccgaggaagctcagatgctgcagtcattagtttctagtgtcccatcagccttggtctcaagaggccgagagggtgcaaccccaggggctcccctcccatcttgagctcttcctgaataaaacctcattcccc

SEQ ID NO: 382523 - DNA, 604 bp, Homo sapiens
ggaccccaacatgggcgactcggctgtgcccacacactgggaaccctacactacggaaaacagcggctacctggagatcaccaagaagatgggcagcagctccatgaagcggagcctgagaaccaacttcctgcgctactggaccctcacctatctggcgctgcccacagtgaccgaccaggaggccagttccatgccctccacaggggactctgaggccactcccatctcccccgacaggcaactccgagtctgcccccgtccctgcaacgggtgactctcaggatgcccctgtgcccctcacaagtgactctgaggctgcccccgtgcccccctcaggtgactctgaggctcccccgtaccctacgggtgactctgaggcccgtgcccaccttgggtgacactgaggctgccccatccccgctacgggtgactctgaggctgcccctgtgtcccccacagatgactccgaggaagctcagatgctgcagtcattagtttctagtgtcccatcagccttggtctcaagaggccgagagggtgcaaccccaggggctcccctcccatcttgagctcttcctgaataaaacctcattcccctgtc

SEQ ID NO: 382524 - DNA, 2419 bp, Homo sapiens
accttctgtatcagttaagtgtcaagatggaaggaacagcagtctcaagataatgcaaagagtttattcatcacccagaggctgatgctcaccatggggcgcctgcaactggttgtgttgggcctcacctgctgctgggcagtggcgagtgccgcgaagctgggcgccgtgtacacagaaggtgggttcgtggaaggcgtcaataagaagctcggcctcctgggtgactctgtggacatcttcaagggcatccccttcgcagctcccaccaaggccctggaaaatcctcagccacatcctggctggcaagggaccctgaaggccaagaacttcaagaagagatgcctgcaggccaccatcacccaggacagcacctacggggatgaagactgcctgtacctcaacatttgggtgccccagggcaggaagcaagtctcccgggacctgcccgttatgatctggatctatggaggcgccttcctcatggggtccggccatggggccaacttcctcaacaactacctgtatgacggcgaggagatcgccacacgcggaaacgtcatcgtggtcaccttcaactaccgtgtcggcccccttgggttcctcagcactggggacgccaatctgccaggtaactatggccttcgggatcagcacatggccattgcttgggtgaagaggaatatcgcggccttcgggggggaccccaacaacatcacgctcttcggggagtctgctggaggtgccagcgtctctctgcagaccctctccccctacaacaagggcctcatccggcgagccatcagccagagcggcgtggccctgagtccctgggtcatccagaaaaacccactcttctgggccaaaaaggtggctgagaaggtgggttgccctgtgggtgatgccgccaggatggcccagtgtctgaaggttactgatccccgagccctgacgctggcctataaggtgccgctggcaggcctggagtaccccatgctgcactatgtgggcttcgtccctgtcattgatggagacttcatccccgctgacccgatcaacctgtacgccaacgccgccgacatcgactatatagcaggcaccaacaacatggacggccacatcttcgccagcatcgacatgcctgccatcaacaagggcaacaagaaagtcacggaggaggacttctacaagctggtcagtgagttcacaatcaccaaggggctcagaggcgccaagacgacctttgatgtctacaccgagtcctgggcccaggacccatcccaggagaataagaagaagactgtggtggactttgagaccgatgtcctcttcctggtgcccaccgagattgccctagcccagcacagagccaatgccaagagtgccaagacctacgcctacctgttttcccatccctctcggatgcccgtctaccccaaatgggtgggggccgaccatgcagatgacattcagtacgttttcgggaagcccttcgccacccccacgggctaccggccccaagacaggacagtctctaaggccatgatcgcctactggaccaactttgccaaaacaggggaccccaacatgggcgactcggctgtgcccacacactgggaaccctacactacggaaaacagcggctacctggagatcaccaagaagatgggcagcagctccatgaagcggagcctgagaaccaacttcctgcgctactggaccctcacctatctggcgctgcccacagtgaccgaccaggaggccacccctgtgccccccacaggggactccgaggccactcccgtgccccccacgggtgactccgagaccgcccccgtgccgcccacgggtgactccggggccccccccgtgccgcccacgggtgactccggggccccccccgtgccgcccacgggtgactccggggccccccccgtgccgcccacgggtgactccggggccccccccgtgccgcccacgggtgactccggggccccccccgtgccgcccacgggtgactccggggccccccccgtgccgcccacgggtgactccggcgccccccccgtgccgcccacgggtgacgccgggcccccccccgtgccgcccacgggtgactccggcgccccccccgtgccgcccacgggtgactccggggccccccccgtgacccccacgggtgactccgagaccgcccccgtgccgcccacgggtgactccggggccccccctgtgccccccacgggtgactctgaggctgcccctgtgccccccacagatgactccaaggaagctcagatgcctgcagtcattaggttttagcgtcccatgagccttggtatcaagaggccacaagagtgggaccccaggggctcccctcccatcttgagctcttcctgaataaagcctcatacccctg

SEQ ID NO: 382525 - DNA, 3847 bp, Homo sapiens
  misc_feature (3030)..(3031): n is a, c, g, or t
  misc_feature (3039)..(3039): n is a, c, g, or t
  misc_feature (3046)..(3046): n is a, c, g, or t
  misc_feature (3050)..(3050): n is a, c, g, or t
  misc_feature (3052)..(3052): n is a, c, g, or t
  misc_feature (3054)..(3054): n is a, c, g, or t
  misc_feature (3075)..(3075): n is a, c, g, or t
  misc_feature (3077)..(3077): n is a, c, g, or t
  misc_feature (3087)..(3087): n is a, c, g, or t
ctcaattggaggatcaaagttgagaaaagtaatattcgacatttttcgattcaacggagtggccaccaagacgatgtcatagaagtctgaacgagtctcagttccaatttggtagaccacttcatacatctttgttggatttcctgtgtacttggtctttgttttctcctcgatgtacattactgagccagatataagattgcttttggatgcctgcagaagccctgagcaaacaagtttattgccaccttctactgcccaaaggccagaatcagaacaggacagtgacaccgcccccacaaaggcattgatgtccgtgctttggccataattgaccctcataacaggagcaatcatttcattgaggaacttctcagaaaagccggccttttgcaaggtttcaagaagtgttcgattaagcattccaaggaagtcatctcctcctagagcatgaagtaatttttcgacactactgaaggcatagtcatgagactggtagcggtagatcctcatgaacttgtctaacacgtcctctacccacatgtgcatacggagggattgaaatccatagcgccaaactaatttaatcacgttaattatgaaccagttgctctcctcaaataccagagtctctccattatatatccccagtacacccagaggctgatgctcaccatggggcgcctgcaactggttgtgttgggcctcacctgctgctgggcagtggcgagtgccgcgaagctgggcgccgtgtacacagaaggtgggttcgtggaaggcgtcaataagaagctcggcctcctgggtgactctgtggacatcttcaagggcatccccttcgcagctcccaccaaggccctggaaaatcctcagccacatcctggctggcaagggaccctgaaggccaagaacttcaagaagagatgcctgcaggccaccatcacccaggacagcacctacggggatgaagactgcctgtacctcaacatttgggtgccccagggcaggaagcaagtctcccgggacctgcccgttatgatctggatctatggaggcgccttcctcatggggtccggccatggggccaacttcctcaacaactacctgtatgacggcgaggagatcgccacacgcggaaacgtcatcgtggtcaccttcaactaccgtgtcggcccccttgggttcctcagcactggggacgccaatctgccaggtaactatggccttcgggatcagcacatggccattgcttgggtgaagaggaatatcgcggccttcgggggggaccccaacaacatcacgctcttcggggagtctgctggaggtgccagcgtctctctgcagaccctctccccctacaacaagggcctcatccggcgagccatcagccagagcggcgtggccctgagtccctgggtcatccagaaaaacccactcttctgggccaaaaaggtggctgagaaggtgggttgccctgtgggtgatgccgccaggatggcccagtgtctgaaggttactgatccccgagccctgacgctggcctataaggtgccgctggcaggcctggagtaccccatgctgcactatgtgggcttcgtccctgtcattgatggagacttcatccccgctgacccgatcaacctgtacgccaacgccgccgacatcgactatatagcaggcaccaacaacatggacggccacatcttcgccagcatcgacatgcctgccatcaacaagggcaacaagaaagtcacggaggaggacttctacaagctggtcagtgagttcacaatcaccaaggggctcagaggcgccaagacgacctttgatgtctacaccgagtcctgggcccaggacccatcccaggagaataagaagaagactgtggtggactttgagaccgatgtcctcttcctggtgcccaccgagattgccctagcccagcacagagccaatgccaagagtgccaagacctacgcctacctgttttcccatccctctcggatgcccgtctaccccaaatgggtgggggccgaccatgcagatgacattcagtacgttttcgggaagcccttcgccacccccacgggctaccggccccaagacaggacagtctctaaggccatgatcgcctactggaccaactttgccaaaacaggggaccccaacatgggcgactcggctgtgcccacacactgggaaccctacactacggaaaacagcggctacctggagatcaccaagaagatgggcagcagctccatgaagcggagcctgagaaccaacttcctgcgctactggaccctcacctatctggcgctgcccacagtgaccgaccaggaggccacccctgtgccccccacaggggactccgaggccactcccgtgccccccacgggtgactccgagaccgcccccgtgccgcccacgggtgactccggggccccccccgtgccgcccacgggtgactccggggccccccccgtgccgcccacgggtgactccggggccccccccgtgccgcccacgggtgactccggggccccccccgtgccgcccacgggtgactccggggccccccccgtgccgcccacgggtgactccggggccccccccgtgccgcccacgggtgactccggcgccccccccgtgccgcccacgggtgacgccgggcccccccccgtgccgcccacgggtgactccggcgccccccccgtgccgcccacgggtgactccggggccccccccgtgacccccacgggtgactccgagaccgcccccgtgccgcccacgggtgactccggggccccccctgtgccccccacgggtgactctgaggctgcccctgtgccccccacagatgactccaaggaagctcagatgcctgcagtcattaggttttagcgtcccatgagccttggtatcaagaggccacaagagtgggaccccaggggctcccctcccatcttgagctcttcctgaataaagcctcatacccctgaaaaaaaaaaaaaaaaaaaaaaaaaaaannaaaaaaanaaaaaanaaanananaaaaagaaaaaaaaaaaaaananaaaaaaaaanaaaaaaaaaaaaaaaaaaggggggggggccccagaaatattccccccgaggggccgccgccaacatgtccgccgccgcgcaccccagcgatatttatgtgtgatagaagaggggcgccccacaatatagaggcggagcgcgtgaatattataaagccgaagacgccgatgggcgcgcgtagtaaaaaaaacaagacgagacaaggggagaaaaaggcggcgaaaacagggagacacttgggaagaagcagcgccccaactcatctcgcgggggggcggcgaacaccatatcgggggagaacaacccacccacaccagagactaattaacaaggcccacaaaggggacaaaactaataaacaactataaagaggggtgataaccaggggcggaaacacaccacagcggcccacacagagcggcgggacgcggacaagcaaaaaacagcttcggggccaccacgcggggacaataatcgcacacctcgagagcaacacaccacttatccaaccccggggggagcccagtcgtggcaaacaaccccaccgccgcccgcccacaacgccaacacagaacaacgaacagaccgcaggcgcccagcgggagacgcagagcaaagcagacgaacgaggggagaacgaagcacacgaaagcaacgcacaaccgcacacccaccaaagccgagacgggaagaaggcaaggcagaagggagggagcggcgaaggaggcgaaagaaagaaaaagcggaagacaaagcaaca

SEQ ID NO: 382526 - DNA, 3237 bp, Homo sapiens
  misc_feature (2690)..(2690): n is a, c, g, or t
  misc_feature (2692)..(2692): n is a, c, g, or t
  misc_feature (2702)..(2702): n is a, c, g, or t
ctcaattggaggatcaaagttgagaaaagtaatattcgacatttttcgattcaacggagtggccaccaagacgatgtcatagaagtctgaacgagtctcagttccaatttggtagaccacttcatacatctttgttggatttcctgtgtacttggtctttgttttctcctcgatgtacattactgagccagatataagattgcttttggatgcctgcagaagccctgagcaaacaagtttattgccaccttctactgcccaaaggccagaatcagaacaggacagtgacaccgcccccacaaaggcattgatgtccgtgctttggccataattgaccctcataacaggagcaatcatttcattgaggaacttctcagaaaagccggccttttgcaaggtttcaagaagtgttcgattaagcattccaaggaagtcatctcctcctagagcatgaagtaatttttcgacactactgaaggcatagtcatgagactggtagcggtagatcctcatgaacttgtctaacacgtcctctacccacatgtgcatacggagggattgaaatccatagcgccaaactaatttaatcacgttaattatgaaccagttgctctcctcaaataccagagtctctccattatatatccccagtacacccagaggctgatgctcaccatggggcgcctgcaactggttgtgttgggcctcacctgctgctgggcagtggcgagtgccgcgaagctgggcgccgtgtacacagaaggtgggttcgtggaaggcgtcaataagaagctcggcctcctgggtgactctgtggacatcttcaagggcatccccttcgcagctcccaccaaggccctggaaaatcctcagccacatcctggctggcaagggaccctgaaggccaagaacttcaagaagagatgcctgcaggccaccatcacccaggacagcacctacggggatgaagactgcctgtacctcaacatttgggtgccccagggcaggaagcaagtctcccgggacctgcccgttatgatctggatctatggaggcgccttcctcatggggtccggccatggggccaacttcctcaacaactacctgtatgacggcgaggagatcgccacacgcggaaacgtcatcgtggtcaccttcaactaccgtgtcggcccccttgggttcctcagcactggggacgccaatctgccaggtaactatggccttcgggatcagcacatggccattgcttgggtgaagaggaatatcgcggccttcgggggggaccccaacaacatcacgctcttcggggagtctgctggaggtgccagcgtctctctgcagaccctctccccctacaacaagggcctcatccggcgagccatcagccagagcggcgtggccctgagtccctgggtcatccagaaaaacccactcttctgggccaaaaaggtggctgagaaggtgggttgccctgtgggtgatgccgccaggatggcccagtgtctgaaggttactgatccccgagccctgacgctggcctataaggtgccgctggcaggcctggagtaccccatgctgcactatgtgggcttcgtccctgtcattgatggagacttcatccccgctgacccgatcaacctgtacgccaacgccgccgacatcgactatatagcaggcaccaacaacatggacggccacatcttcgccagcatcgacatgcctgccatcaacaagggcaacaagaaagtcacggaggaggacttctacaagctggtcagtgagttcacaatcaccaaggggctcagaggcgccaagacgacctttgatgtctacaccgagtcctgggcccaggacccatcccaggagaataagaagaagactgtggtggactttgagaccgatgtcctcttcctggtgcccaccgagattgccctagcccagcacagagccaatgccaagagtgccaagacctacgcctacctgttttcccatccctctcggatgcccgtctaccccaaatgggtgggggccgaccatgcagatgacattcagtacgttttcgggaagcccttcgccacccccacgggctaccggccccaagacaggacagtctctaaggccatgatcgcctactggaccaactttgccaaaacaggggaccccaacatgggcgactcggctgtgcccacacactgggaaccctacactacggaaaacagcggctacctggagatcaccaagaagatgggcagcagctccatgaagcggagcctgagaaccaacttcctgcgctactggaccctcacctatctggcgctgcccacagtgaccgaccaggaggccacccctgtgccccccacaggggactccgaggccactcccgtgccccccacgggtgactccgagaccgcccccgtgccgcccacgggtgactccggggccccccccccccgtgccgcccacgggtgactccggggccccccctgtgccccccacgggtgactctgaggctgcccctgtgccccccacagatgactccaaggaagctcagatgcctgcagtcattaggttttagcgtcccatgagccttggtatcaagaggccacaagagtgggaccccaggggctcccctcccatcttgagctcttcctgaataaagcctcatacccctgaaaaaaaaaaaaaananaaaaaaaaanaaaaaaaaaaaaaaaaaaaaaaaaaaaaaaggggggggggcaaaaatttctcctccagagggcgccccacagtctctgcggcgcactccccactgtttttgtgtagaaaaggagggtgcccactactcgtggggcctgactattatactcctcagagcgacagggtgcgagctcatatcacaacaggcggcgcagacgcaggcgaagcacaacggcgactcgctccgcagccaacccctttgggcgctacacaacgcacccacccctcatcaccttccggcgggggcgcagcgagaccacacacctcctgggcccccccaccctcacccccgctaccccgcccgcgataccatttcagacacccgccgtaccgatgcggcaccacactctacccacgctccttctcgaccgggcggctatatcaacccgtggctctccccacacccaccacagccccgcctactgacctgtcacaccccccgcgccccaccaacgacacatcttcgcccgcccccccctgccagcatccctcccc

SEQ ID NO: 382527 - DNA, 3184 bp, Homo sapiens
  misc_feature (2761)..(2762): n is a, c, g, or t
  misc_feature (2770)..(2770): n is a, c, g, or t
  misc_feature (2777)..(2777): n is a, c, g, or t
  misc_feature (2781)..(2781): n is a, c, g, or t
  misc_feature (2783)..(2783): n is a, c, g, or t
  misc_feature (2785)..(2785): n is a, c, g, or t
ctcaattggaggatcaaagttgagaaaagtaatattcgacatttttcgattcaacggagtggccaccaagacgatgtcatagaagtctgaacgagtctcagttccaatttggtagaccacttcatacatctttgttggatttcctgtgtacttggtctttgttttctcctcgatgtacattactgagccagatataagattgcttttggatgcctgcagaagccctgagcaaacaagtttattgccaccttctactgcccaaaggccagaatcagaacaggacagtgacaccgcccccacaaaggcattgatgtccgtgctttggccataattgaccctcataacaggagcaatcatttcattgaggaacttctcagaaaagccggccttttgcaaggtttcaagaagtgttcgattaagcattccaaggaagtcatctcctcctagagcatgaagtaatttttcgacactactgaaggcatagtcatgagactggtagcggtagatcctcatgaacttgtctaacacgtcctctacccacatgtgcatacggagggattgaaatccatagcgccaaactaatttaatcacgttaattatgaaccagttgctctcctcaaataccagagtctctccattatatatccccagtacacccagaggctgatgctcaccatggggcgcctgcaactggttgtgttgggcctcacctgctgctgggcagtggcgagtgccgcgaagctgggcgccgtgtacacagaaggtgggttcgtggaaggcgtcaataagaagctcggcctcctgggtgactctgtggacatcttcaagggcatccccttcgcagctcccaccaaggccctggaaaatcctcagccacatcctggctggcaagggaccctgaaggccaagaacttcaagaagagatgcctgcaggccaccatcacccaggacagcacctacggggatgaagactgcctgtacctcaacatttgggtgccccagggcaggaagcaagtctcccgggacctgcccgttatgatctggatctatggaggcgccttcctcatggggtccggccatggggccaacttcctcaacaactacctgtatgacggcgaggagatcgccacacgcggaaacgtcatcgtggtcaccttcaactaccgtgtcggcccccttgggttcctcagcactggggacgccaatctgccaggtaactatggccttcgggatcagcacatggccattgcttgggtgaagaggaatatcgcggccttcgggggggaccccaacaacatcacgctcttcggggagtctgctggaggtgccagcgtctctctgcagaccctctccccctacaacaagggcctcatccggcgagccatcagccagagcggcgtggccctgagtccctgggtcatccagaaaaacccactcttctgggccaaaaaggtggctgagaaggtgggttgccctgtgggtgatgccgccaggatggcccagtgtctgaaggttactgatccccgagccctgacgctggcctataaggtgccgctggcaggcctggagtaccccatgctgcactatgtgggcttcgtccctgtcattgatggagacttcatccccgctgacccgatcaacctgtacgccaacgccgccgacatcgactatatagcaggcaccaacaacatggacggccacatcttcgccagcatcgacatgcctgccatcaacaagggcaacaagaaagtcacggaggaggacttctacaagctggtcagtgagttcacaatcaccaaggggctcagaggcgccaagacgacctttgatgtctacaccgagtcctgggcccaggacccatcccaggagaataagaagaagactgtggtggactttgagaccgatgtcctcttcctggtgcccaccgagattgccctagcccagcacagagccaatgccaagagtgccaagacctacgcctacctgttttcccatccctctcggatgcccgtctaccccaaatgggtgggggccgaccatgcagatgacattcagtacgttttcgggaagcccttcgccacccccacgggctaccggccccaagacaggacagtctctaaggccatgatcgcctactggaccaactttgccaaaacaggggaccccaacatgggcgactcggctgtgcccacacactgggaaccctacactacggaaaacagcggctacctggagatcaccaagaagatgggcagcagctccatgaagcggagcctgagaaccaacttcctgcgctactggaccctcacctatctggcgctgcccacagtgaccgaccaggaggccacccctgtgccccccacaggggactccgaggccactcccgtgccccccacgggtgactccgagaccgcccccgtgccgcccacgggtgactccggggccccccccgtgccgcccacgggtgactccggggccccccccgtgcccccgtgccgcccacgggtgactccggggccccccctgtgccccccacgggtgactctgaggctgcccctgtgccccccacagatgactccaaggaagctcagatgcctgcagtcattaggttttagcgtcccatgagccttggtatcaagaggccacaagagtgggaccccaggggctcccctcccatcttgagctcttcctgaataaagcctcatacccctgaaaaaaaaaaaaaaaaaaaaaaaaaaaaaaaaaaaaaaaaaaaaaaaannaaaaaaanaaaaaanaaanananaaaaaggggcgggcgcgcgcgcgcgcgcgcgcccagaagaaaatcgtcaaaacaaacccgcggggggggcgcgcggcggccccccagagaaaggaggagagaaagcaggggaacaagagggggaacacaagaaaagcgcgggagaaaaaacaaaagcgggggggaaatccaccacacaaaagaaaacgcgccggggggaaaacaccagagagtcatgcagaaaaccacgcgaaagggaaacgagagacacaaagcggaggcgccatacacaaagggagagacacaccaagggaagaggcgaaaaaacaaataagcgcacacgggcgctgggtggacgacagcaagcggaaagcaacagagacaacagaacaacagagaacacgcgcaaaccgaacaagc

SEQ ID NO: 382528 - DNA, 389 bp, Homo sapiens
agaataaaactgacataaaacataacaaaaagaaaaaagcataggccaggcatggtggcttatgcctgtaattctagcactttgagaggccaaggcaggtagaattgcttgagtttgagttcgagaccagcctgggcaacatagttgaccttatctctacttaaataaaaataatcagccaggcatggtggcatgtgactgtagttccagctactttgggaagctgaggtgccattgcactccagcctggtcagcaagagcaaaaaaaaaaaaaaaaaaaatgtgcacatcaaagatcatagccccggcacatcgaagctgcaatgagctatgattgcatcacttgcactccagcctgggtgacagaatgagaccccgttgcaaaaaaa

SEQ ID NO: 382529 - DNA, 1199 bp, Homo sapiens
ctgggactatgggtgcgcaccaccaccatgcctggctctttttttttctggagacagagttttgctcttgttgaccaggctggagtgcagtggcgctatctcggctcaccacaacctctgtctcccaggttcaagtggttctcctgtaattctagcactttgagaggctgaggtgggcggatcacttgaggtcaggagttcaagaccagcctggccaatatggcaaagccttctctctatactaaaaatacaaaaaaaggcggaggttgcagtgagctaagattgcgccatggcactccagcctgagcaacagcacaagactctgtcttaaaaaaaaaaatgtatttatctggaagacaaatgtcaaatcttaatagtggttatccctggattagagcattttggtgtgttgctttcctggtagaatattgttttaatgaaaatggatcaaaggaggacatagatgggtgaaaaccatgaggaattgactttgacattcttaattgcatcagcagaaatagttaaaaagtacttctaaaaccacttgcatgaactaggtgtttaaggggaaccgctcacgcttattctcagatacattaataaaaggacacttgaagtctatgaagaagatagctgttccagccttaccgcacattttcttcctgagtgaaaataggaacttatgtattggtggccatcttgacatgaaactacaagatccttcccaacagtatcatcctacactgaaacctggaaccaaatccattcccattcagcaaatgttgatcaagtggcatgtaggggatacagagatgattgcatacaaagatgaaaaagaaaacgtttctgccagggccaggcgcggtgactcacacctacaattccagcactttgggaggccaaggcaggtagaattgcttgagtttgagttcgagaccagcctgggcaacatagttgaccttatctctacttaaataaaaataatcagccaggcatggtggcatgtgactgtagttccagctactttgggaagctgaggtgccattgcactccagcctggtcagcaagagcaaaaaaaaaaaaaaaaaaaatgtgcacatcaaagatcatagccccggcacatcgaagctgcaatgagctatgattgcatcacttgcactccagcctgggtgacagaatgagaccccgttgcaaaaaaa

SEQ ID NO: 382530 - DNA, 981 bp, Homo sapiens
tgagagataggagactatcattgcaatcctggtgggagtagatgctggcttcatccagatggtactggtagtggtagaagtaatggtcggatactggatctgtttccaaggcaaaactaacaggaattggtgacagtttagatgaggggtgagagagttaaggttaactgtgaggtttttggtctaagcaactggaaggctgggaaagattttaggaagagtagattaggagagggattgaggagaggaggtcatcctgacctgagcctcagatatcttaaatttgagatgccttaagggtgtctcattgagaaggcgatagggtataagaatctagagtccagaagagacgtctaggctgcatatatagtttggggcattatcagcatacatttaagagtacaaattggatgagatcccttgtgtgtgactgcagagagtgaaagattgagcctgaagcactatggttcctaaacactgaagccagaaggatcgaggatgttaatgggtcgggctgactcccaggcagacatccgtggccattcagggactgtggccacctcggttgacaccacagatggctccccattgctggagctgtgtggtgtgttttagcttcataggaaaaaggggttctcttatgagacagatgggggttgggggattattctctttttcctgacatatgcagttaactcggccaggacaggacagtggaatgcacataattgaaatatcctccggagcctgcctgaatgcagaagtctctttttgcccagtattttcagccagcatccagactcctaaaaagcagccagccgtgtggctaactgaactttcaccccttttttgttcttttatatattatttcttagaagaattaattagtagagaggataaaaatcctgcgttggtagtgaagaaaggaaactcaatgcataccctgaacaatcctcagaataggtcaacagccccaggaaa

SEQ ID NO: 382531 - DNA, 267 bp, Homo sapiens
tatctgctagggcacctactacgttggcttgccatcatttgtaatccatctgtgtaaacacaggaactgtgtctatctaggctgtaagtccccagggctcagcacagggctggcatcccagtaagaggctatcagtgccaatggaagaaggtgccccatgctgtattactgttgttttctgggatagaggagtctttcctctaggatggagagcagagcagtgaagaagcaagcagtcccttacatcatctggctgactgtctaatt

SEQ ID NO: 382532 - DNA, 281 bp, Homo sapiens
ccaaattgggtaagagaaagagaaacatttattcctgatatgaccatcatatatatgcatgtatatatacatgcatatatatacatataggcctatcagatgagaaaaatccaccagcgacccagaacttacaaaacagaaaacatttttaagaattcatggataggccgggcgcggtggctcacgcctgtaatcccagcactttgggaggccgaggcgggcggatcacgaggtcaggagatcgagaccatcctggctaacacggtgaaaccccgtctcta

SEQ ID NO: 382533 - DNA, 354 bp, Homo sapiens
tctcagtcttggtgctgctggcctgaaggacagtgtgcagtttatgagaggctagctttgaaaatggcaccttcctgtagcttcttaggtcttataaatggtgtgggagctccctccctggagcagccctgtcccttcgtctcccatcaacttcctgtgttagtttcagggcttgggatggtcaaggggctctcctgtggctaggattgcatgatctgatggtggggatgtgggctgctggaagtctgtcactcaccctttcctcatgttaggaagtcactcccagctcttagccagtcctgaccagggatgctgcctcttttcctccttccccacttttggtgtttcctgtct

SEQ ID NO: 382534 - DNA, 499 bp, Homo sapiens
cattttcagagtgcgtgtgttgggtggggttgagggagaaggatgaaggatgacccccaaccccaacaggagaattcaaaaatcagagagcgatgaaggtgaacgcgctcccctcccccgctgtcgctgggaagccccactctgcccaggtctggttcctggagcatcagcgccccctttccctcgccggcaggatcgtttcctcccgacactggcctctcgccttgggcgcagggtttggggctcagctgtcaattccaaggaattcgtagggttcgacccacgcggcgggagggaacggagggagaatcaaaaggcatcctcccccacgacgcggaggcggtggtacgattcctcaaacgcccaagcttgagctttttttgtatgcgagatagaagccagggcaacctcgcccagataaccccgaaaacaaaggcacgaccagataagtgacttcaagggagtaaaggtcgttctatcggagaacgttccaaaccta

SEQ ID NO: 382535 - DNA, 466 bp, Homo sapiens
ggaaaacaaacaaacaaaaaaaggcttagagctggaattacaaaatcaattgtctacaaaggccaagaacgtgatgaaaacaaaagaaacgagctgagtggggactgacggaggtgaactgtttttaaaaaggcccttgctctattctaaaggggggcagcacctagacaagtctagctgaaatcaggacataatgatgctatgcagaaatcagaacacaatgttaccagatgttccaatccttcaagaaaaactgaaatttggattttgtcaattctgatttttaaaaacaaacagatttttaaaattttgaaatattgtgtgaggttaagaaggtgcattttgctggcggtggtggctcacatgtgtaatcgtaccactttgagaggcagaggcaggaggattacttgagcccatgagttcaataccagcctgggcaatatagtgagacctcgtctctacaaaa

SEQ ID NO: 382536 - DNA, 591 bp, Homo sapiens
gaagtggcctggggcccagaataagtttgagtggcagttaggtcacaaggactgcagtccttgggcaagccctggtgctgcagtggtctctaaggctgtggactttgggtgcatgtgacccagcatgacaccagccgtagcagccaagggagtgtgccacacccctcccccaactccaggcagtgtggctcagaaagagactccttctgcttgaggaaaggagagggaagagtacagatgactttgtttttcaacttgagtaccagctcagtcataggaaaataaagcgccaagtagaatcctgaagccaccgatcccaggcctttcttcctggacagtgcggctagacccaacccaggccagaagggaatctgctgtcctggttggttggacacaagttctggctggttttaccacctgctgactaaagtggcctcaagccttgaataaacgtcagtggcagtcaggtagtactgactgtggaccttgggcaatccccagtactgtgctgtcatagagtccatgggtttagactagcattactgtgatgccagctgtgatggacacaggagtccctgtgtcacgtctccc

SEQ ID NO: 382537 - DNA, 404 bp, Homo sapiens
ggctcactgcaacctccacctcctgggagggtcctttgccatgtggtagtcagaccctctcaaaatcctttaaccaactcccattctaagctataataaactatttgtagttcttcaaatatgcattttaaactaaagatcttggtagctagggcctagttgccttccaaaaatatgacagttaacactcccaccaatagcaacatgaatgtgcttgttccccaaccgcttgccaatgctgcgtgttaccattctaacataaatagagtatatttaggatgttttgtatgccgaaccaacgttgacatactaacttttatgtggttgtacaaaaaccagtatgcagttgagaactgatgaagagattaaaaagtcgtgcttgtctttactataattattttgtt

SEQ ID NO: 382538 - DNA, 366 bp, Homo sapiens
tttatagtccatgattaattatgatgataatgatagcaaatcttcatttgcacttactgcaaagcactattccaagcagtgtatgtgtatataaaaatggcttaatcctcacaatgaaatagatactgttattatccttccttttacaaatgaggatgccaaggcacagggaggttaggtttcttgcccaagattacacagtttgcagctaataatttatagatgcgggtttacaaattcaggaaaaaagagagttcacagttaacatttgtgtcaaatcgcatgagatatgaagcatagacaaagtgaaattaagcaggatggtctaggatttctttcaaagtcatatttaagggcttcattaaa

SEQ ID NO: 382539 - DNA, 418 bp, Homo sapiens
tgctattgatatgaaaactacagcaattcagcgtttttttcagcattttctccctttatttatatagttggagactcaaaggccaatagaagttaaattacttccatggggttcacagtcctaggcagcattgaataactgcccttcaatgggcatggctatgtgccagtcactgaactccacactctattatagagtgtctctggaggggttatctgatgagctcagatagcatcagatatgcaggaaattcgtagtggctttatttctctatacatgctttgacttttctgatagtccctctacaccttggatagctgtgacaatgtacacgtgcccattgttcttttaatattttccagttctagtcatctcttttcagtttaatcatttagtatattcaaaaaacaacttctga

SEQ ID NO: 382540 - DNA, 522 bp, Homo sapiens
gcacaagggtttatctgggacctctattctattctattgatccatatgtctgtccttatgtcagtaccacaccgtttagattactgtaacttgggatcacttaacctatttaaaacacgttttttctttttcttatttgaagtatttttcagcaaatatcagatggtattattttaccccttcataattcagtataactctaaaaattatggcccactacaaaaccacaatattattatcactcataatgtttctttggcataatctcatacctggtcttaatcaaatgtatggattttctcaaaaatgtgttttctggcttacttgaattaaaatctaaacaaggtccacattttaatatgtttgttttttaggtcactcgtaatttagaatagttcttcctctgctcccttttccttcagccattcacttatagaaattagtttagttgttctatagaatgcctcccattctggatttctctaattctttattatgtcttttaacactaaatggaaatta

SEQ ID NO: 382541 - DNA, 532 bp, Homo sapiens
aaacctcttcagagtactgatgaccataaagataattatagtgcagatctctccatctagatgaggctccatacctaaaagaacagaagatggctgcaaaatatctggggaggggaaaaaaaaaaaaaaaaacagagaaagcccgaaaagtaaaatgaacccattgtatgagtgcttgacaccaaatcactgtcatttactaagtaatgaataaaatacatacacacacataaaaatatatgcaccaaggaattgctaggtccaacacaagtaaatctctgtaaatttgacttttagcaagtagcacactatacaatctaataatgacagggtgttgttttttggatgttcttcttctgtaaatttactagagagggaaggaatgaaaagagggctcttgtctcccatgactttatacatgcagtagtacagtagagttgcaggatcaatcattgaggactattagaggcagaaggctctgggtgtgttgtcccagttctgccctgccatgtgatgtcaccttgtttttctc

SEQ ID NO: 382542 - DNA, 673 bp, Homo sapiens
ataaaatgaagctgcttccaatattattgactcagaaatgtaaaatatagcacagtttatcttgtctgtggtcctgtactaagttaaacttgcagctgtgaacaaattaatatttatttttattaggaattctttaagatgaattttcagttttagtaaaagaaagacaccagtgatatttttatggatgaaagctctctggttccttcagcagctctaggaacatccttagccattatatcctctctctttgacaatatcaaaattgtccaggtaaatgtaatattgccagtggtgtcaagacattggtctgttcatgtccttattcttcgcttggtttgtggaatcaaaatggttgcttattttcctctcttctgtagataatccataggcaatgttttcaatttgggaaactttttttttcaacttggtttaagtttgaaggctctaaggaagaggaatattagaacaaattatgtattctctatgttctactccacttgtttgtaatatactcctgttctgagagttatggtaaacctatataacacgactgttccaagtgccaagtgagaattgtagtgactcacagaacacgtctcatgactatttatcaaaagaaatgtgctgattaaagaaaaaaagtaaaatatcttattttcaaaaaaaaaaa

SEQ ID NO: 382543 - DNA, 532 bp, Homo sapiens
  misc_feature (15)..(15): n is a, c, g, or t
  misc_feature (22)..(22): n is a, c, g, or t
ttaggtggtaccccncgggtantttgatcgctgccgtcgaggcgaggtcgaagcggccgtcgaggcggctgctcttgcctcccctcgcttcccctctccatcagcagcccaagggtgtggctccccttaccaacccaggttggaggaggagacgcgcaaggggaggacgcggacacaacctcgtgctcttccgcaaggacgtggacgatgccactctgtcccgcctggaactagagcgcaagattgagtctctgatggatgagattgagttcctcaagaagctgcacgaggaggtaagtgggcccggtatcaggggcggtttctgaggttgtggggtggtctcgctggagctggcgggtggagcggaggcatcgccctggggatcaggacgatgctgggtagacgcagcccctccaccctagtctacaggtggttagactcccacccttgcgccacctggcggcgggcagcggggctgtacctccgaaacctggcctctggtctcgcgcccgcgggggcgcagggctgtacg

SEQ ID NO: 382544 - DNA, 1582 bp, Homo sapiens
agctctgcgaacggtgactgcccatccttggccgcaatgagccaccacccgtcgggcctccgggccggcttcagctccacctcataccgccgtaccttcgggccacgcgcagaacgagaagcaggagctgcaggagctcaacgaccgcttcgccaacttcatcgagaaggtacgctttctggagcagcagaacgcggccctgcgcggggagctgagccaagcccggggccaggagccggcgcgcgccgaccagctgtgccagcaggagctgcgcgagctgcggcgagagctggagctgttgggccgcgagcgtgaccgggtgcaggtggagcgcgacgggctggcggaggacctggcggcgctcaagcagaggttggaggaggagacgcgcaaggggaggacgcggacacaacctcgtgctcttccgcaaggacgtggacgatgccactctgtcccgcctggaactagagcgcaagattgagtctctgatggatgagattgagttcctcaagaagctgcacgaggaggagctgcgagacctgcaggtgagtgtggagagccagcaggtgcagcaggtggaggtggaagccacggtgaagcccgagctgacggcagcgctgagggacatccgcgcgcagtacgagagcatcgccgcgaagaacctgcaggaggcggaggagtggtacaagtccaagtacgcggacctgtccgacgctgccaaccggaaccacgaggccctgcgccaggccaagcaggagatgaacgagtcccgacgccagatccagagtctaacgtgcgaggtggacgggctgcgcggcacgaacgaggcgctgctcaggcagttgagagagctggaggagcagttcgccctggaggcggggggctaccaggcggggctgcgcggctcgaggaggagctgcgacagctaaaagaggagatggcgcggcacctgagggagtaccaggagctcctcaacgtcaagatggccctggacatcgagatcgccacctaccgcaagctgctggagggcgaggagagccggatctccgtgcccgtccattcttttgcctccttaaatataaagacgactgtgcctgaggtggagcctccccaggacagccacagccggaagacggttctgatcaagaccattgagacccggaatggggaggtggtgacagagtcccagaaggagcagcgcagtgagctggacaagtcttctgcccacagttactgaaccccttggtccggagccttgactctgccctaggcctgctcaaagcccaaaccctaagaccactcctgaattgtctcctctccctctgcatgtgtctaaaaggtggtaccaggcatccctttcctggcttatggccaagccctacccggccagcagtcgctgggcctctccctgccctgacacttgatgtgacctatgtgcttcccttttcatgtcccgataagaagccaatgatcccccctcaggacaaatctactccagccacgatgagaagtgggtgagccagggtctgagtttcacatttgaaccaaataaaatgctgtcaagagaaaactctccagtgca

SEQ ID NO: 382545 - DNA, 914 bp, Homo sapiens
aaagcctgggttacccccacttctcagtacgcggacctgtccgacgctgccaaccggaaccacgaggccctgcgccaggccaagcaggagatgaacgagtcccgacgccagatccagagtctaacgtgcgaggtggacgggctgcgcggcacgaacgaggcgctgctcaggcagttgagagagctggaggagcagttcgccctggaggcggggggctaccaggcggggctgcgcggctcgaggaggagctgcgacagctaaaagaggagatggcgcggcacctgagggagtaccaggagctcctcaacgtcaagatggccctggacatcgagatcgccacctaccgcaagctgctggagggcgaggagagccggatctccgtgcccgtccattcttttgcctccttaaatataaagacgactgtgcctgaggtggagcctccccaggacagccacagccggaagacggttctgatcaagaccattgagacccggaatggggaggtggtgacagagtcccagaaggagcagcgcagtgagctggacaagtcttctgcccacagttactgaaccccttggtccggagccttgactctgccctaggcctgctcaaagcccaaaccctaagaccactcctgaattgtctcctctccctctgcatgtgtctaaaaggtggtaccaggcatccctttcctggcttatggccaagccctacccggccagcagtcgctgggcctctccctgccctgacacttgatgtgacctatgtgcttcccttttcatgtcccgataagaagccaatgatcccccctcaggacaaatctactccagccacgatgagaagtgggtgagccagggtctgagtttcacatttgaaccaaataaaatgctgtcaagagaaaactctccagtgca

SEQ ID NO: 382546 - DNA, 1790 bp, Homo sapiens
agctctgcgaacggtgactgcccatccttggccgcaatgagccaccacccgtcgggcctccgggccggcttcagctccacctcataccgccgtaccttcggtccaccgccctcactatcccccggggccttctcctactcgtccagctcccgcttctccagcagccgcctgctgggctccgcgtccccgagctcctcggtgcgcctgggcagcttccgtagcccccgagcgggagcgggcgccctcctgcgcctgccctcggagcgcctcgacttctccatggccgaggccctcaaccaggagttcctggccacgcgcagaacgagaagcaggagctgcaggagctcaacgaccgcttcgccaacttcatcgagaaggtacgctttctggagcagcagaacgcggccctgcgcggggagctgagccaagcccggggccaggagccggcgcgcgccgaccagctgtgccagcaggagctgcgcgagctgcggcgagagctggagctgttgggccgcgagcgtgaccgggtgcaggtggagcgcgacgggctggcggaggacctggcggcgctcaagcagaggttggaggaggagacgcgcaaggggaggacgcggacacaacctcgtgctcttccgcaaggacgtggacgatgccactctgtcccgcctggaactagagcgcaagattgagtctctgatggatgagattgagttcctcaagaagctgcacgaggaggagctgcgagacctgcaggtgagtgtggagagccagcaggtgcagcaggtggaggtggaagccacggtgaagcccgagctgacggcagcgctgagggacatccgcgcgcagtacgagagcatcgccgcgaagaacctgcaggaggcggaggagtggtacaagtccaagtacgcggacctgtccgacgctgccaaccggaaccacgaggccctgcgccaggccaagcaggagatgaacgagtcccgacgccagatccagagtctaacgtgcgaggtggacgggctgcgcggcacgaacgaggcgctgctcaggcagttgagagagctggaggagcagttcgccctggaggcggggggctaccaggcggggctgcgcggctcgaggaggagctgcgacagctaaaagaggagatggcgcggcacctgagggagtaccaggagctcctcaacgtcaagatggccctggacatcgagatcgccacctaccgcaagctgctggagggcgaggagagccggatctccgtgcccgtccattcttttgcctccttaaatataaagacgactgtgcctgaggtggagcctccccaggacagccacagccggaagacggttctgatcaagaccattgagacccggaatggggaggtggtgacagagtcccagaaggagcagcgcagtgagctggacaagtcttctgcccacagttactgaaccccttggtccggagccttgactctgccctaggcctgctcaaagcccaaaccctaagaccactcctgaattgtctcctctccctctgcatgtgtctaaaaggtggtaccaggcatccctttcctggcttatggccaagccctacccggccagcagtcgctgggcctctccctgccctgacacttgatgtgacctatgtgcttcccttttcatgtcccgataagaagccaatgatcccccctcaggacaaatctactccagccacgatgagaagtgggtgagccagggtctgagtttcacatttgaaccaaataaaatgctgtcaagagaaaactctccagtgca

SEQ ID NO: 382547 - DNA, 1650 bp, Homo sapiens
  misc_feature (15)..(15): n is a, c, g, or t
  misc_feature (22)..(22): n is a, c, g, or t
ttaggtggtaccccncgggtantttgatcgctgccgtcgaggcgaggtcgaagcggccgtcgaggcggctgctcttgcctcccctcgcttcccctctccatcagcagcccaagggtgtggctccccttaccaacccaggtgtgtgcgggcagcatccctgcccacgggctccaagtgccccccgctacccctttgctctgagtgtttggggaggtgggagaagtgggtatctgtgcctcccctgagtaatgaggaaacccccttttcagctcccagtccgttagagacaatgcggggcaattccattagacagcctcagccctccatttagagtcctgggcagcagaacagcctctaaccggatcctggggggcgtgcggtctggggtgcgagctgggcggcgaccccgcagttcagcctctgcacgctcttcccgtcaggttggaggaggagacgcgcaaggggaggacgcggacacaacctcgtgctcttccgcaaggacgtggacgatgccactctgtcccgcctggaactagagcgcaagattgagtctctgatggatgagattgagttcctcaagaagctgcacgaggaggagctgcgagacctgcaggtgagtgtggagagccagcaggtgcagcaggtggaggtggaagccacggtgaagcccgagctgacggcagcgctgagggacatccgcgcgcagtacgagagcatcgccgcgaagaacctgcaggaggcggaggagtggtacaagtccaagtacgcggacctgtccgacgctgccaaccggaaccacgaggccctgcgccaggccaagcaggagatgaacgagtcccgacgccagatccagagtctaacgtgcgaggtggacgggctgcgcggcacgaacgaggcgctgctcaggcagttgagagagctggaggagcagttcgccctggaggcggggggctaccaggcggggctgcgcggctcgaggaggagctgcgacagctaaaagaggagatggcgcggcacctgagggagtaccaggagctcctcaacgtcaagatggccctggacatcgagatcgccacctaccgcaagctgctggagggcgaggagagccggatctccgtgcccgtccattcttttgcctccttaaatataaagacgactgtgcctgaggtggagcctccccaggacagccacagccggaagacggttctgatcaagaccattgagacccggaatggggaggtggtgacagagtcccagaaggagcagcgcagtgagctggacaagtcttctgcccacagttactgaaccccttggtccggagccttgactctgccctaggcctgctcaaagcccaaaccctaagaccactcctgaattgtctcctctccctctgcatgtgtctaaaaggtggtaccaggcatccctttcctggcttatggccaagccctacccggccagcagtcgctgggcctctccctgccctgacacttgatgtgacctatgtgcttcccttttcatgtcccgataagaagccaatgatcccccctcaggacaaatctactccagccacgatgagaagtgggtgagccagggtctgagtttcacatttgaaccaaataaaatgctgtcaagagaaaactctccagtgca

SEQ ID NO: 382548 - DNA, 562 bp, Homo sapiens
ggtggttcttccctcatgaatagatcaatgctattatcgtggaagtgggcttgttattgcaggagtaggttccttacaaaaggatgagttcagcctccttttgcctctttctctccctcattctctttttgcccttctttcatgggatgatgcagcaagaaggcccttgccagatgccagcaacttgatattgaacttctcatcctccagaatggtttgtttttcctctctgtcatacctcaagaggaacacaaagagtgatggcctgtcactctgatgcctctctctactcaaatggcagaaaccaaccaggtgatggccacagtggcagaacctaggaagccaagaagaaaccagagaatggagacacatggcagcaatggcaagtcatcagacccaggatttcccaaagaacactggtccaggaagatgctctgtgaaaaagtgttccctggtcggagaaatttgtgaaacactttgcataatacttaaaagaatgtatggcacatcaaaggtaatatgcaataaaagaattcatttttttaaaaccaagaatatgcac

SEQ ID NO: 382549 - DNA, 735 bp, Homo sapiens
ggtggttcttccctcatgaatagatcaatgctattatcgtggaagtgggcttgttattgcaggagtaggttccttacaaaaggatgagttcagcctccttttgcctctttctctccctcattctctttttgcccttctttcatgggatgatgcagcaagaaggcccttgccagatgccagcaacttgatattgaacttctcatcctccagaatggtttgtttttcctctctgtcatacctcaagaggaacacaaagagtgatggcctgtcactctgatgcctctctctactcaaatggcagaaaccaaccagttaggttctgtcaatagaagatactaaagaaagaaagccaggagaagaaaagggacttctttcttcaaggtctaagctgttctaatagcattattctgggaatggcatcttccactcctcctagtacaaagaacctgcttcctcataccccgtcaaggaactgcagcatccaggtgatggccacagtggcagaacctaggaagccaagaagaaaccagagaatggagacacatggcagcaatggcaagtcatcagacccaggatttcccaaagaacactggtccaggaagatgctctgtgaaaaagtgttccctggtcggagaaatttgtgaaacactttgcataatacttaaaagaatgtatggcacatcaaaggtaatatgcaataaaagaattcatttttttaaaaccaagaatatgcac

SEQ ID NO: 382550 - DNA, 464 bp, Homo sapiens
ggtggttcttccctcatgaatagatcaatgctattatcgtggaagtgggcttgttattgcaggagtaggttccttacaaaaggatgagttcagcctccttttgcctctttctctccctcattctctttttgcccttctttcatgggatgatgcagcaagaaggcccttgccagatgccagcaacttgatattgaacttctcatcctccagaatggtgatggccacagtggcagaacctaggaagccaagaagaaaccagagaatggagacacatggcagcaatggcaagtcatcagacccaggatttcccaaagaacactggtccaggaagatgctctgtgaaaaagtgttccctggtcggagaaatttgtgaaacactttgcataatacttaaaagaatgtatggcacatcaaaggtaatatgcaataaaagaattcatttttttaaaaccaagaatatgcac

SEQ ID NO: 382551 - DNA, 464 bp, Homo sapiens
ggtatccatgttggaatctctcatttgattcttattcaaatttaggttctgtcaatagaagatactaaagaaagaaagccaggagaagaaaagggacttctttcttcaaggtctaagctgttctaatagcattattctgggaatggcatcttccactcctcctagtacaaagaacctgcttcctcataccccgtcaaggaactgcagcatccaggtgatggccacagtggcagaacctaggaagccaagaagaaaccagagaatggagacacatggcagcaatggcaagtcatcagacccaggatttcccaaagaacactggtccaggaagatgctctgtgaaaaagtgttccctggtcggagaaatttgtgaaacactttgcataatacttaaaagaatgtatggcacatcaaaggtaatatgcaataaaagaattcatttttttaaaaccaagaatatgcac

SEQ ID NO: 382552 - DNA, 368 bp, Homo sapiens
tgagatgaacccggtacctcagatggaaatgctgaaatcacccgtcttctgcgtcgctcaggctgggagctgtagaccggagctgttcctattcggccatcttgtctcctccccaggagtgatggccacagtggcagaacctaggaagccaagaagaaaccagagaatggagacacatggcagcaatggcaagtcatcagacccaggatttcccaaagaacactggtccaggaagatgctctgtgaaaaagtgttccctggtcggagaaatttgtgaaacactttgcataatacttaaaagaatgtatggcacatcaaaggtaatatgcaataaaagaattcatttttttaaaaccaagaatatgcac

SEQ ID NO: 382553 - DNA, 845 bp, Homo sapiens
ggtggttcttccctcatgaatagatcaatgctattatcgtggaagtgggcttgttattgcaggagtaggttccttacaaaaggatgagttcagcctccttttgcctctttctctccctcattctctttttgcccttctttcatgggatgatgcagcaagaaggcccttgccagatgccagcaacttgatattgaacttctcatcctccagaatggtttgtttttcctctctgtcatacctcaagaggaacacaaagagtgatggcctgtcactctgatgcctctctctactcaaatggcagaaaccaaccagttaggttctgtcaatagaagatactaaagaaagaaagccaggagaagaaaagggacttctttcttcaaggtctaagctgttctaatagcattattctgggaatggcatcttccactcctcctagtacaaagaacctgcttcctcataccccgtcaaggaactgcagcatccagaatacattcatacctaacacctcaatagatgacatgttatccatggaatcgagttcaaagccctctgtaacgtggctatatcccatctactctgagctgatgttcagcaggtgatggccacagtggcagaacctaggaagccaagaagaaaccagagaatggagacacatggcagcaatggcaagtcatcagacccaggatttcccaaagaacactggtccaggaagatgctctgtgaaaaagtgttccctggtcggagaaatttgtgaaacactttgcataatacttaaaagaatgtatggcacatcaaaggtaatatgcaataaaagaattcatttttttaaaaccaagaatatgcac

SEQ ID NO: 382554 - DNA, 893 bp, Homo sapiens
ggtggttcttccctcatgaatagatcaatgctattatcgtggaagtgggcttgttattgcaggagtaggttccttacaaaaggatgagttcagcctccttttgcctctttctctccctcattctctttttgcccttctttcatgggatgatgcagcaagaaggcccttgccagatgccagcaacttgatattgaacttctcatcctccagaatggtttgtttttcctctctgtcatacctcaagaggaacacaaagagtgatggcctgtcactctgatgcctctctctactcaaatggcagaaaccaaccaggtacatcccagccttcttgcacatagaaacactacacagcacttcagctgtatgtttgggggccattttaaacagcaaaatcatcaacaggaagcagaaaattgtaaaaattgtggcactaaatagaccatgtaaaggacacatgtttgcaataagaaagctgaaacaagaagggggagtgtcaccttatttgatccagctagaaactcaggtgctggtattccagcaacactcaggcggctgctccaggaggctgcagaggggtcctttttagccgtcaacaaaactggctatggtcacgcccattgggaaactcattgctgccttcaaggtgatggccacagtggcagaacctaggaagccaagaagaaaccagagaatggagacacatggcagcaatggcaagtcatcagacccaggatttcccaaagaacactggtccaggaagatgctctgtgaaaaagtgttccctggtcggagaaatttgtgaaacactttgcataatacttaaaagaatgtatggcacatcaaaggtaatatgcaataaaagaattcatttttttaaaaccaagaatatgcac

SEQ ID NO: 382555 - DNA, 376 bp, Homo sapiens
ggagttttgccatgttgcccaggtcggtctcaaactcctggactcaagcaatccacctgtctcagcctcccaaagggctagggtacaggcatgcgacaccgcacttggctaggaataataatattttaaaacaacaacaacaacaatgtaaagttttcattctctggaaatccaattataaattccaagcatgggaaaaaaatgactcataacaaggagaaaagtcacttagtaaaaacagatccagacatgacagaagtaataaaataagccaacaaaaacattaaacagctattacagatatgctgtaaatgtatatgaagatagaggaaagcatgaacctgatcaagagtgacataaaaagacccaatttgaa

SEQ ID NO: 382556 - DNA, 270 bp, Homo sapiens
cgaaactgcatctcaacaaaacaaaacaaaacaaaacaaaaacacacacacccgacactctgcagttcaacctccccaggcagctgcgttcaagtgcagtaacggaggggcctgaggagtgcgtataaggagagattcttctaataagagaccgtgaggagactccttgaggaggcagcatttgacatggagtttaggacagaagagatttggacagactgagctaggcaggaagaggaaatggcatgggcaaagcatggcaggtgagaa

SEQ ID NO: 382557 - DNA, 509 bp, Homo sapiens
ggctcggtacctcaactactgtatctaagtgaggtttcttccaaggagtaatttctcttatttgactcttttgagatccttttctcacataattgtcaaatttcaattggagagaaactgtgttttctacctcattacggggtcagtgctgaggagagtaggaactcaggaaatgcttcttggttgactttagtctgctgtattgggtgacaaattgaccacagaccaaataacacgttggaatcctcttattctttctagagatctgggctgagaattaagggtttatgcttcttcttaaaacccgtttcaatctttcatgcagttatgattctcatacaaacaaatggaaatggggaattagtctttcaaattcagtcctttggctggcacagtggctcatgcctgtaatcctttgggaggttgaggtaggaagattgcttgaggccaggagttcgagactagcctgggccgaacatacataccaagaccttgtctctaccaaaaaa

SEQ ID NO: 382558 - DNA, 138 bp, Homo sapiens
aggtgaaatgagttcaggtagatccagagagacttctctggggaggtgacattatttattatccctgggaaaaggagggagcttgataaataattttaaagatacactagccaattgagtgaatgtttattgagcacc

SEQ ID NO: 382559 - DNA, 756 bp, Homo sapiens
ttttatacgtgtagagggtatgcgctggtcttgaactcctgacctcgtgatccacccacctcggcctcccaaagtgctgggattacaggcgtgcgcaccgtgccgggccagtgtttttaactgtccacacttactaaattttccagtacttcttcctatggttcatgatagtaaacacagaaacatataaggaacattattagagttaccagatgttagctgttgcatatgtgcacattcctagattcaagggtgtttttgccttaaatttaagtgggtcattggttgtcttgggaagatcatggaaaattcgggattttttagaattctgaaccaaaatatgttttgagtgtttcttagtaaatgtgtgatcttccaccttccacattcagactgcggactacacttcataaatgcctttttatttccagttatggattcaactaaatgactgccttgggagcacataattactttgctacctttttccccctttgctgttgtggctcgagtttggttctcacctgagaagatgcattgagcatatgttgttacccagccctggcttaatggtgtcctgtggggtaggggtgggaggacgaggggcacggggccagagcatgtgaatggatcatggttggacagctgtgacctgccagcactgcgggtaagcaaaactacaaaccgttctttcctctgtgacattgaataaaccttaataaaattcataattagcacatactagaaaaaatgtga

SEQ ID NO: 382560 - DNA, 652 bp, Homo sapiens
ttttatacgtgtagagggtatgcgctggtcttgaactcctgacctcgtgatccacccacctcggcctcccaaagtgctgggattacaggcgtgcgcaccgtgccgggccagtgtttttaactgtccacacttactaaattttccagtacttcttcctatggttcatgatagtaaacacagaaacatataaggaacattattagagttaccagatgttagctgttgcatatgtgcacattcctagattcaagggtgtttttgccttaaatttaagtgggtcattggttgtcttgggaagatcatggaaaattcgggattttttagaattctgaaccaaaatatgttttgagtgtttcttagtaaatgtgtgatcttccaccttccacattcagactgcggactacacttcataaatgcctttttatttccagttatggattcaactaaatgactgccttgggagcacataattactttgctacctttttccccctttgctgttgtggctcgagtttggttctcacctgagaagatgcattgagcatatgttgttacccagccctggcttaatggtgtcctgtggggtaggggtggtaagacatatgcttaattgcttttttttttatattacaaaggcttttttttgaatctt

SEQ ID NO: 382561 - DNA, 702 bp, Homo sapiens
ttttatacgtgtagagggtatgcgctggtcttgaactcctgacctcgtgatccacccacctcggcctcccaaagtgctgggattacaggcgtgcgcaccgtgccgggccagtgtttttaactgtccacacttactaaattttccagtacttcttcctatggttcatgatagtaaacacagaaacatataaggaacattattagagttaccagatgttagctgttgcatatgtgcacattcctagattcaagggtgtttttgccttaaatttaagtgggtcattggttgtcttgggaagatcatggaaaattcgggattttttagaattctgaacccagactgcggactacacttcataaatgcctttttatttccagttatggattcaactaaatgactgccttgggagcacataattactttgctacctttttccccctttgctgttgtggctcgagtttggttctcacctgagaagatgcattgagcatatgttgttacccagccctggcttaatggtgtcctgtggggtaggggtgggaggacgaggggcacggggccagagcatgtgaatggatcatggttggacagctgtgacctgccagcactgcgggtaagcaaaactacaaaccgttctttcctctgtgacattgaataaaccttaataaaattcataattagcacatactagaaaaaatgtga

SEQ ID NO: 382562 - DNA, 472 bp, Homo sapiens
atcttcacagctagttctgcagaagagaaaggagcattttggtcttgaggtaactcccagtcggtctccagcttcctccagatggaactctgccctgctgtagcctctgtgaagaccagctgcctctggctttagcattttcctgcagctaacaggcatcagcccggagaacaattgtcttggaggagagagggagagtctgggctgaaaactgccatgcagggatgggagccatttttaaagccctcctgaatgttcagtatgtctggggctcggctgccaagggagttgacctccttgaggacagcagagtccagccctctgtgcagggagttaagcttctggtgtgcctattttcgtagggaagaagaaaagagagggcacaaaacgaatctctatccctgtcgaaatcctaacaaaggccgggcacgatggcttgtgcctgtaatcccagcactttgggaagctgagg

SEQ ID NO: 382563 - DNA, 352 bp, Homo sapiens
ctgtgagtttgtcatagatggcccttatattttgtggtgtattccttcatgcctggttgatggtttttaacatgaaagaatcttaaagttttttcaaaaccttttctgtgtctatggttaacgttttctttcttttttttttttttttttgagacagagtctcactctgtcgcccaggctgaactgcagtggcgtgatctcggctcactgcaagctccacctcctggactcacgccattctcctgcctcaacctcccgagtagctgggactacaggagcccgccaccatgcccagctaatttttttgtatttttagtagagacggggtttcaccatgttaaccaggatggtc

SEQ ID NO: 382564 - DNA, 233 bp, Homo sapiens
acttaatgccttttaaatgattggatgaggccattcatgttattgagagtaatctcctttacctaaagtcaactgattacagatattaaccacatttactaaataccatcatagcaacaccaagataagtgtttgactaaataagtggatattatagcctagccgagttcacaaataaaactaatcaccacaggtaaggaagccacaactgttatacagcatgggttagtttt

SEQ ID NO: 382565 - DNA, 744 bp, Homo sapiens
ggtggcaggggatagggtctccctctgtctcccaggctggagtgcaatggtgggatcttggctcactgcagctttgaactcctgggctcaagcgatcctctcacttcaacctcctgagtagctgggactacagggcttcttcgctggaatgaggaagaggaggaagccaaggaagacagagactgtggcatcagtacggtagcctttcctagtaaagagacaagcatagctgaggagaagggtcaggaattttcaggagtaacatgatgtctcggagcagtctgtccgaacacagtgcctctttttaggacttatctagaggtaacattaagcttagttcttgccagttgctgccacgctatccactttggatttaatgggcaatggcgaatgtctggaggcagggcctggctagagtagatgtcttaatgtgaatttgtgagcccgttaattggggcaagtcctagatggagtgatcaggagtggagttggttagataaaggagaatagaagaggatgagacctctttcctatgaaggccacacctccatgtgcctcccttctcaagtgagaagttgatttcttctttacagttggtactttatagatgtttcctcctttaactttcataaccacctatgaggtaaccaagcttccaagagcttatgtaatgagactacatgcagcactggattccaaccccagaccgggactccaaagagtgtttttccttcctgatttcac

SEQ ID NO: 382566 - DNA, 512 bp, Homo sapiens
ctgagagtatagaccagtttatactaggaagtgggattctcttctgcatatggccattccctacatgcagtcttaaccccagtgaggcagaattcacagtcctcctctgaatgcactcttcagtttccttcacttgaatgttttctccattcccattaggactagccaaagtcacatctctttttgagtcatgccagccccatgtcttgtccatgtcattcatttgcagatagtcatattcccctttggggcagaaaccatattttagttatctcaatgcttagggaaaaccttgtatgtagtggatactcagaatattttcttgtgtgaattaagtatgctttgcatttgtatctaactctgagtaactctgagtcctccaccctccagaagctcacagctttagattatcacctttcttcttgaaatcattgtgaactcctagagattggtctgtgccttatttttcctgtatcctttcagtaccccatatagttttctcagtcaggagg

SEQ ID NO: 382567 - DNA, 408 bp, Homo sapiens
tcctaccagtatatatacctaacagctatcaacacagagcttgcttggctcatattaaaccttcattaaatgaatgaatgtggattatgcaattgttgtagtaaattactctttgaaacaaggtggtgggagatttgttataaggttctagaaagttcaccttggcagggggaactaagggataagatatctaacttccctttataatatctcttttctcaggctgtgtactctgtaggcaatctcaatttcttacataattttgtgagtttataaaataaattattttttgcttaagccatcttgggatagttttctgtcacttgtagtaaaagttattgagtaacaatgctccttgcttgtattttgttccacttactccaggtatcttccttgtggtgttttccc

SEQ ID NO: 382568 - DNA, 862 bp, Homo sapiens
accctgcttctcccagctggagtaggtgggggaggccagacatggaggcccttcctccagtcagatccagccttttggggaacctgttgcaggttacgaggctctcagtgctgttggttcagaaccgagatcacctctataatttcctgctcctcaagatcaacctcttcaaccactgggtgtcagggctggcccaggaggcccgggggtcctgtaactggcaggcccacctacccctgggagctgcagcctgccccctgggccaggctctccgggctgggctggctctgatacaggtccccgtatggctggtgctacagggacccaggctgatgtgggctggcatgtggggcagcaccaagggcctgggcctggccttgctcagtgcctgggagcagctgggcctgtctgtggccatctggacagatctgtttttgtcatgtctgcacggcctgatgttggtggccttgctcttggtggtagtgacctggagggtgtgtcagaagtcccactgcttccgactgggcaggcagctcagtaaggccttgcaagtgaactgcgtggtaaggaagctcctggtacagctgagacgtctgtattggtgggtggagactatgactgccctcacctcctggcacctggcctatctcatcacttggaccacctgcctggcctcccacctgctgcaggctgcctttgagcacacgacccagctggccgaggcccaggaggttgaaccccaggaggtctcagggtcttccttgctgccctcactgtctgcgtcctcggactcagagtctggaacagttttgccagagcaagaaactcccagagaataaatgtatccccatctgcctctcct

SEQ ID NO: 382569 - DNA, 985 bp, Homo sapiens
accctgcttctcccagctggagtaggtgggggaggccagacatggaggcccttcctccagtcagatccagccttttggggaacctgttgcaggttacgaggctctcagtgctgagacagggtctcgctctgtcgcccagcctggagcgcagtggtgccggctcagctcgttgcagcctccaactcccggtctcaagcaatcctcccccctcagcctccaagtagccgggactatagttggttcagaaccgagatcacctctataatttcctgctcctcaagatcaacctcttcaaccactgggtgtcagggctggcccaggaggcccgggggtcctgtaactggcaggcccacctacccctgggagctgcagcctgccccctgggccaggctctccgggctgggctggctctgatacaggtccccgtatggctggtgctacagggacccaggctgatgtgggctggcatgtggggcagcaccaagggcctgggcctggccttgctcagtgcctgggagcagctgggcctgtctgtggccatctggacagatctgtttttgtcatgtctgcacggcctgatgttggtggccttgctcttggtggtagtgacctggagggtgtgtcagaagtcccactgcttccgactgggcaggcagctcagtaaggccttgcaagtgaactgcgtggtaaggaagctcctggtacagctgagacgtctgtattggtgggtggagactatgactgccctcacctcctggcacctggcctatctcatcacttggaccacctgcctggcctcccacctgctgcaggctgcctttgagcacacgacccagctggccgaggcccaggaggttgaaccccaggaggtctcagggtcttccttgctgccctcactgtctgcgtcctcggactcagagtctggaacagttttgccagagcaagaaactcccagagaataaatgtatccccatctgcctctcct

SEQ ID NO: 382570 - DNA, 556 bp, Homo sapiens
tataaagaacccagtagaagagatcaatacattgttaagtagaagagcaattattactttgtgaaattttagttataaatagatgtgtgtagtaaatgacaatgtgtggggttttttttgttgttgtttgttttgatttggttttggattttactgtggcttgtgatcaaaaagtttgaaaaacagtgtagttggttccatatccatgtagagcttcctcatttgtttttaattgttacatagtatttcattgtatacagtatcatagttatacatatgtccaataggcaattaattggtttccagtttcttgctgattaaagctactttgatgaagattcttataaatatgttattttatatatataaaggcatatctgtggaataaatatctagaaatagaattgctaggtcaaagagtgtgtaattttgataaatacagtcaatcctcattattcctggattctgtatttgttaatttgcctacttgctaacatttatttgtaatccatgaatcagcatttcagcactctcatagtcacttgtggacatgcat

SEQ ID NO: 382571 - DNA, 868 bp, Homo sapiens
caggaacaggtgcttccatgattagggggaagggacagggagaatcatgcaatagttcgtgaagcttccacattactgtgcatttttcactgggcaggtgacagaaccaggatatttgcaagcagccctaaaggttaccacagtgggcaagcaataatatctgcatatccaaattaactgctctttgaaataattagaactcgttttactctagaaaatatattttggaaaagaacacacattggaataatgacgaaaaaaattgctttctgtattgcaaaatgtatacgttactttaacagatttatatcaagcacctatatactttatggcagaaattatgctaaatcctaagaatgaaacaataatgaaggcaaagctattccctgccaaaaggaacttagcgtttaacgaacaaagcaaacagatgaacaggtaattactgtacagagtgacccatattgttattgttcagggaattagagagggcacctaatatggtcttggggatgtttcagtaagtttcctggaagaaataacatataagctaagacttaaaagatatgtagaaattagctagaaggaaaggcaatggtgtgtgcatgtatgtgtgtattagtgtgtgtttgtgtttgtgtactgggcaaatagactattccatgtagagggaatattgagtactttatcaagactatagttagagtataaggaaagagttgacagtgaggcagcaccaaactttaccttcataaatagcaatttggttttatacttgtattagcatttttcccccttgagaatcaatgtccttgaatgtatttgccatttgctctaataataaaatacactttctataaccaaaaactta

SEQ ID NO: 382572 - DNA, 883 bp, Homo sapiens
caggaacaggtgcttccatgattagggggaagggacagggagaatcatgcaatagttcgtgaagcttccacattactgtgcatttttcactgggcaggtgacagaaccaggatatttgcaagcagccctaaaggttaccacagtgggcaagcaataatatctgcatatccaaattaactgctctttgaaataattagaactcgttttactctagaaaatatattttggaaaagaacacacattggaataatgacgaaaaaaattgctttctgtattgcaaaatgtatacgttactttaacagatttatatcaagcacctatatactttatggcagaaattatgctaaatcctaagaatgaaacaataatgaaggcaaagctattccctgccaaaaggaacttagcgtttaacgaacaaagcaaacagatgaacaggtaattactgtacagagtgacccatattgttattgttcagggaattagagagggcacctaatatggtcttggggatgtttcagtaagtttcctggaagaaataacatataagctaagacttaaaagatatgtagaaattagctagaaggaaaggcaatggtgtgtgcatgtatgtgtgtattagtgtgtgtttgtgtttgtgtactgggcaaatagactattccatgtagagggaatattgagtactttatcaagactatagttagagtataaggaaagagttgacagtgaggcagcaccaaactttaccttcataaatagcaatttggttttatacttgtattagcatttttcccccttgagactcttcccctataacatcaatgtccttgaatgtatttgccatttgctctaataataaaatacactttctataaccaaaaactta

SEQ ID NO: 382573 - DNA, 895 bp, Homo sapiens
ctctgcccattgggaaacacctctctatgactctataaatgtccaaggtggccccaagggaggacttctgcagcacagctcccttcccaggacgtgaaaatctgccttctcaccatgaggcttctagtcctttccagcctgctctgtatcctgcttctctgcttctccatcttctccacagaagggaagaggcgtcctgccaaggcctggtcaggcaggagaaccaggctctgctgccaccgagtccctagccccaactcaacaaacctgaaaggacatcatgtgaggctctgtaaaccatgcaagcttgagccagagccccgcctttgggtggtgcctggggcactcccacaggtgtagcactcccaaagcaagactccagacagcggagaacctcatgcctggcacctgaggtacccagcagcctcctgtctcccctttcagccttcacagcagtgagctgcaatgttggagggcttcatctcgggctgcaaggaccctgggaaagttccagaactccacgtccttgtctcaattgtgccatcaactttcagagctatcatgagccaacctcaccccacagggcctcagtcgccaccatgtgggcctctccagtgcaaaccaccgagcattccaccatgaccggtcacagctacaaatccagagaccatcaatcctgctagagtgcagggtggcaagcacccaagggtggctgaccaagactgcagagtctcctccatcttcaggtccattcagcctcctggcatttaactaccagcatccagtggtccccaaggaatcccttcctagcctcctgacatgagtctgctggaaagagcatccaaacaaacaagtaataaataaataaataaactcaatgcagacacatccttgt

SEQ ID NO: 382574 - DNA, 2038 bp, Homo sapiens
ctctgcccattgggaaacacctctctatgactctataaatgtccaaggtggccccaagggaggacttctgcagcacagctcccttcccaggacgtgaaaatctgccttctcaccatgaggcttctagtcctttccagcctgctctgtatcctgcttctctgcttctccatcttctccacagaagggaagaggcgtcctgccaaggcctggtcaggcaggagaaccaggctctgctgccaccgagtccctagccccaactcaacaaacctgaaaggacatcatgtgaggctctgtaaaccatgcaagcttgagccagagccccgcctttgggtggtgcctggggcactcccacaggtgtagcactcccaaagcaagactccagacagcggagaacctcatgcctggcacctgaggtacccagcagcctcctgtctcccctttcagccttcacagcagtgagctgcaatgttggagggcttcatctcgggctgcaaggaccctgggaaagttccagaactccacgtccttgtctcaattgtgccatcaactttcagagctatcatgagccaacctcagccttccgagtagctgggattacaggtgtgcgccaccacacccggctaatttttgctttttttttttttgagacagaatctcgctctgttgctcaggctggagtggagtgcagtggcacgatctcagctcactgcagcctctgcctcccgggttcaggagattctcctgactcaacctcctgagtagctgggattacaggtgcctgccactatgcctagctaatttttgtatttttagtggagacggggttttgccgtgttggccggggtggtctcgaactcctgacctcaagtgatccacccgcatcggccccccaaagtgctgggattataggcgtgaaccaccgcgcctgtcccattgttgtgtaattttaataattagttttttaagtacttgattttatgggcacatttttgtgggatgattggagttaatcaaataaagcttgtcatgtgtgtagtttggtaagataacttctttaaattcatgttttctctgccttgaggtagtgagggaaagatcttaatcagtattttggtaattaactgattgaattcaagcaaatgagacatcatgaacttcagtggttattgatatttcagggtatatacctgaaatgcctagaggatacagatttctcatttcattctttggtctttcatttctctatatacagaaatgaaatgacacttctgggaggcagtagaagcaggaagtcaatgaattgagtagagggtcccattccctcaggctgtcattgatcagtgacaatttataaaaacaaactgcaaagtctgtggcaagtggctgcctgcttcctagaaggagcccatgaaggttaaactctgtggtcggtatttgcaagcgccgggcgtggtggctcacgcctgtaatcctagcaccttgggaggccaaggcaggcggatcacccgaggtcaggagtttgaggatttgcaagcaaaaggtcctctcctgagtctttcccagatacccagcagtgcagaggctagctgtggaaggttgcagtgggacaggaatgtattgtatgccttgccttacttgtcaccattgagatttccagagaaatgggcataacgtctcttaacaacaacagcagaaagcaaaatacattaacttaaggttgacaacaaaagattatcaagtaccatgttttccaaccaaccagttattcgtggtaataataaaataaaggtgggaaaatgttataatttttaaggaaactgtgtactttaaaaatcttctttatgaatatccaatgttactgtaatcctgctccattaaatgcagcattgttgtcaggtgctgcctcttgcttgggaacagcattgggcttttaaatgtctgcagaatctctgcgttcgaagggaattgagaatgaacttcctggtactgtaatgaaaataaggtctgctcaacacagtaaacgtttcctctcttcttt

SEQ ID NO: 382575 - DNA, 562 bp, Homo sapiens
actgcggcagtgctggctgtttctgcagtgtgtctagagagatcctgcggagggatcgaacctcatgcctggcacctgaggtacccagcagcctcctgtctcccctttcagccttcacagcagtgagctgcaatgttggagggcttcatctcgggctgcaaggaccctgggaaagttccagaactccacgtccttgtctcaattgtgccatcaactttcagagctatcatgagccaacctcaccccacagggcctcagtcgccaccatgtgggcctctccagtgcaaaccaccgagcattccaccatgaccggtcacagctacaaatccagagaccatcaatcctgctagagtgcagggtggcaagcacccaagggtggctgaccaagactgcagagtctcctccatcttcaggtccattcagcctcctggcatttaactaccagcatccagtggtccccaaggaatcccttcctagcctcctgacatgagtctgctggaaagagcatccaaacaaacaagtaataaataaataaataaactcaatgcagacacatccttgt

SEQ ID NO: 382576 - DNA, 337 bp, Homo sapiens
ttctttgagacagggtctcgctctgtcgcccaggctggagcacagtggcgtcatctcagctcactgcaacctccacctctcaggttcaagccattctcctgcctcagcctcccaagtagctaggatcacaggcgcctaccaccacgcctggctaatttttgtagttttagtagagacagggtttcaccatgttggccaggctggtctcgaacccctgacctcaggtaatccacccacctcagcctcccaaagtgctgagattacaggcgtgacgacagtgctcggctgtctataaattcttactttaaaaataaaatctaggctgggcatggtggct

SEQ ID NO: 382577 - DNA, 369 bp, Homo sapiens
ctgaggttgagaaaccctgccctacaccatcccaagcccaccagtctgcagagcttggctctggccttgttctgtccaggctacagtactgcaggtgtgatttcttcaacatcacattctcttaagagtcttcaaccactatgcctgaatccttggaatcctattgttcgtttccattgtcttgggcctgctaaaaggtgcatactttggaaggagaccagagttactttataggtgttggagaacttaaattctaggttagcatccttagaaaatctttcatagagccatgaggcttatatttagaagcaagcaacagcctggcagattggcatgatttttaccaactgctcaaaggcatccgtggct

SEQ ID NO: 382578 - DNA, 226 bp, Homo sapiens
gtctcccacatctggcccgtggtacacatcctctcacttgtcttccaaaccacattcatcgttccggttagttacaaacatgggctttctgaccctccccctgttggattctcctgctgcttcctcctgctccatgtggttcagaaacattggtcttctttcagttgcaggaatggaccatctccctccctcttgggaccttgcacttgttctagaatgttcttct

SEQ ID NO: 382579 - DNA, 409 bp, Homo sapiens
gcaaatttaaaaactttattatgtacatatatttttgcttataaaaaatatggaatgcttcatgaatttgcttgtcatccttatgtaggggccatgcaatctctgtattgttccaattttagtatatgtactgctgaagtaagcattgatttgcaagtattttctcccactctatggactgcctttttactcttttggtagtgtttcttgatatactctcaacaattttgtccacatgatttgttgaaatcaaggaaagcgtgggctgaaaaatccaaacaagtagggtgttagggctggcacttaaggcccagcttctaacatatggcccaggacacctgggagctggggttttatggggggaggagagttgttctgaggccaaggcaggtagtattagtgatattct

SEQ ID NO: 382580 - DNA, 1120 bp, Homo sapiens
tgctcaagagacggtaacaaccgacgggccgcgtggcctaatggataaggcgtctgacttcggatcagaagattgcaggttcgagtcctgccgcggtcgtagggaggttatgactaacttttagtttattcctccctcaggaacgaagtattgggacaatgtgaacgtagtcgccgccgattcccaccgcacttcaaagatgtgggaacgccaagatccgcggaagtaaccacgcccagcaagtccctgcgagattgcccgcctacgtgtctcagcggaggcacatttctaaaatgtaccaggtctctcgcaccccgacgcaggtggaggaaagtggagagggaggggcatcctgtacagaaatctcaatttatactcaattgatggttggcaagagttggggctcgcagccaaagcgaggctccctccctcgcccatccggtgctgcctcctcgtccagagcaattctgaggggtaaaaatgttgccttccgttgaacctgaatttgcccgcagatgctagcctccggcccacagcgcggctggagcttgtccccttccccagctgtttccagtctccgcatccgtcttgtgttgctccaggtgcttcaacagctctcagcgctcggtggttggtgaactgtggtaaagtgcacgcagaataaggtctacgtgattaagcaccgcctgggggttggggtctggaggcccagctgcacagatgaaagggaggctcagagacgtttgggaccaaccgagatcacacagctgattaggaataaaattcaggtcaagctgaaagtcggccgccaccgtccagcgtggatcccaggacaccgtgaacggactacagaagttgactttcgcgtttttaaggagtggggtgcagggaaacaatcctccgccggccctgcgggctgatgccgaccctcacctgctcccgccacgtggagaggtagagagaagccccgggccaagcagcattgagccctggtcccttctatttaaatatgaaatattttgcatacacttttctagatgtacttaatatacacaatgttttaatgtttgtgatttttttgttttgccaaaaaaatacaatcaatcagaaattcaaaagt

SEQ ID NO: 382581 - DNA, 841 bp, Homo sapiens
tgctcaagagacggtaacaaccgacgggccgcgtggcctaatggataaggcgtctgacttcggatcagaagattgcaggttcgagtcctgccgcggtcgtagggaggttatgactaacttttagtttattcctccctcaggaacgaagtattgggacaatgtgaacgtagtcgccgccgattcccaccgcacttcaaagatgtgggaacgccaagatccgcggaagtaaccacgcccagcaagtccctgcgagattgcccgcctacgtgtctcagcggaggcacatttctaaaatgtaccaggtctctcgcaccccgacgcaggtgcttcaacagctctcagcgctcggtggttggtgaactgtggtaaagtgcacgcagaataaggtctacgtgattaagcaccgcctgggggttggggtctggaggcccagctgcacagatgaaagggaggctcagagacgtttgggaccaaccgagatcacacagctgattaggaataaaattcaggtcaagctgaaagtcggccgccaccgtccagcgtggatcccaggacaccgtgaacggactacagaagttgactttcgcgtttttaaggagtggggtgcagggaaacaatcctccgccggccctgcgggctgatgccgaccctcacctgctcccgccacgtggagaggtagagagaagccccgggccaagcagcattgagccctggtcccttctatttaaatatgaaatattttgcatacacttttctagatgtacttaatatacacaatgttttaatgtttgtgatttttttgttttgccaaaaaaatacaatcaatcagaaattcaaaagt

SEQ ID NO: 382582 - DNA, 889 bp, Homo sapiens
cttttcttaagggaaaaatcacgctgtgttcttttaaaatccctcaggttttatgttttattgctaccagagtctgcctccctgaggttcttgtatagactagttatttccctctgtaaagaagctgttctattcgttctcgcctggtttggaacaaactgaacacttccaaaggaggcagtccttgcagccttgtctccttccactcccctcctccccacagtcctggctggagcagcgagtctgtcgatcccaggccagagacaaggcagacaaaggttcatttgtaaagaagctccttccagcacctcctctcttctccttttgcccaaactcacccagtgagtgtgagcatttaagaagcatcctctgccaagaccaaaaggaaagaagaaaaagggccaaaagccaaaatgaaactgatggtacttgttttcaccattgggctaactttgctgctaggagttcaagccatgcctgcaaatcgcctctcttgctacagaaagatactaaaagatcacaactgtcacaaccttccggaaggagtagctgacctgacacagattgatgtcaatgtccaggatcatttctgggatgggaagggatgtgagatgatctgttactgcaacttcagcgaattgctctgctgcccaaaagacgttttctttggaccaaagatctctttcgtgattccttgcaacaatcaatgagaatcttcatgtattctggagaacaccattcctgatttcccacaaactgcactacatcagtataactgcatttctagtttctatatagtgcaatagagcatagattctataaattcttacttgtctaagacaagtaaatctgtgttaaacaagtagtaataaaagttaattcaatctaa

SEQ ID NO: 382583 - DNA, 676 bp, Homo sapiens
  misc_feature (13)..(13): n is a, c, g, or t
ggcccccaaaganttgttctgcttgatcctcgatatgactagcggccacgctgccgaagtacaagagcaacacagttccaagacagtcgcagcccggctgaggctgtcggtgacggccatgaccggcttcactcgtgccgaattcggcacgagcctctgccaagaccaaaaggaaacaagaaaaagggccaaaagccaaaatgaaactgatggtacttgttttcaccattgggctaactttgctgctaggagttcaagccatgcctgcaaatcgcctctcttgctacagaaagatactaaaagatcacaactgtcacaaccttccggaaggagtagctgacctgacacagattgatgtcaatgtccaggatcatttctgggatgggaagggatgtgagatgatctgttactgcaacttcagcgaattgctctgctgcccaaaagacgttttctttggaccaaagatctctttcgtgattccttgcaacaatcaatgagaatcttcatgtattctggagaacaccattcctgatttcccacaaactgcactacatcagtataactgcatttctagtttctatatagtgcaatagagcatagattctataaattcttacttgtctaagacaagtaaatctgtgttaaacaagtagtaataaaagttaattcaatctaa

SEQ ID NO: 382584 - DNA, 328 bp, Homo sapiens
gatccccgggctgcaggaattcggcacgaggggatgggaagggatgtgagatgatctgttactgcaacttcagcgaattgctctgctgcccaaaagacgttttctttggaccaaagatctctttcgtgattccttgcaacaatcaatgagaatcttcatgtattctggagaacaccattcctgatttcccacaaactgcactacatcagtataactgcatttctagtttctatatagtgcaatagagcatagattctataaattcttacttgtctaagacaagtaaatctgtgttaaacaagtagtaataaaagttaattcaatctaa

SEQ ID NO: 382585 - DNA, 474 bp, Homo sapiens
tcttcgtaaatgacagcatgatatcaatggcaaatgcggggaaagtagacaaatcgattaccttctcggtctttgttgcttctgtggcaagtcctcccactcatctctttacattttagtcacctaaaaagaataatcataactgaaatcctggaaatcactgtctatttttaacctagaatagactaactaatatcttagccttaaggtgaatttaattgatgctctattttctttcagagacgttttctttggaccaaagatctctttcgtgattccttgcaacaatcaatgagaatcttcatgtattctggagaacaccattcctgatttcccacaaactgcactacatcagtataactgcatttctagtttctatatagtgcaatagagcatagattctataaattcttacttgtctaagacaagtaaatctgtgttaaacaagtagtaataaaagttaattcaatctaa

SEQ ID NO: 382586 - DNA, 1175 bp, Homo sapiens
aggcgtagtgagggggaagttgcagacctatgtaactttggaaatgagtagagtctgtcaaactaaaggtaaaagacaccgtatataaacactgtactccagctgataaaattgtttaccatgagaaaacaccattcagctgctttaagtttctgactgtccaggtaagaactgtttcaagccaaatatgaacagaagatggacggaggaaacacagtaaaagagagacgactctgtggctcacagagagcaggctaagagcacagttttgtcttggtttccagtttgtgctccactacttatcagctgtgtgatcttggccaagtgcttaatttttttgaaccccagttcccccatctggaaactacctcatgggaggtggcatcagttcaccctcttacacaacagctacttggtgattctgctgtctcttcaagggccttactgacgattcctcagtagaacctgttttcctgagtctcacttcagcaacataaagctaagtttggtcctggctggagcagcgagtctgtcgatcccaggccagagacaaggcagacaaaggttcatttgtaaagaagctccttccagcacctcctctcttctccttttgcccaaactcacccagtgagtgtgagcatttaagaagcatcctctgccaagaccaaaaggaaagaagaaaaagggccaaaagccaaaatgaaactgatggtacttgttttcaccattgggctaactttgctgctaggagttcaagccatgcctgcaaatcgcctctcttgctacagaaagatactaaaagatcacaactgtcacaaccttccggaaggagtagctgacctgacacagattgatgtcaatgtccaggatcatttctgggatgggaagggatgtgagatgatctgttactgcaacttcagcgaattgctctgctgcccaaaagacgttttctttggaccaaagatctctttcgtgattccttgcaacaatcaatgagaatcttcatgtattctggagaacaccattcctgatttcccacaaactgcactacatcagtataactgcatttctagtttctatatagtgcaatagagcatagattctataaattcttacttgtctaagacaagtaaatctgtgttaaacaagtagtaataaaagttaattcaatctaa

SEQ ID NO: 382587 - DNA, 1535 bp, Homo sapiens
cttttcttaagggaaaaatcacgctgtgttcttttaaaatccctcaggttttatgttttattgctaccagagtctgcctccctgaggttcttgtatagactagttatttccctctgtaaagaagctgttctattcgttctcgcctggtttggaacaaactgaacacttccaaaggaggcagtccttgcagccttgtctccttccactcccctcctccccacagtcctggctggagcagcgagtctgtcgatcccaggccagagacaaggcagacaaaggttcatttgtaaagaagctccttccagcacctcctctcttctccttttgcccaaactcacccagtgagtgtgagcatttaagaagcatcctctgccaagaccaaaaggaaagaagaaaaagggccaaaagccaaaatgaaactgatggtacttgttttcaccattgggctaactttgctgctaggagttcaagccatgcctgcaaatcgcctctcttgctacagaaagatactaaaagatcacaactgtcacaaccttccggaaggagtagctgacctgacacagattgatgtcaatgtccaggatcatttctgggatgggaagggatgtgagatgatctgttactgcaacttcagcgaattgctctgctgcccaaaagacgttttctttggaccaaagatctctttcgtgattccttgcaacaatcaatgagaatcttcatgtattctggagaacaccattcctgatttcccacaaactgcactacatcagtataactgcatttctagtttctatatagtgcaatagagcatagattctataaattcttacttgtctaagacaagtaaatctgtgttaaacaagtagtaataaaagttaattcaatctaaaaaaaaaaaaaaaaaaaaaaaaaaaaaaaaaaaaaaaaaaaaaaaaaaaaaaaaaaaaaaaaaaaaaaaaaaaaaaaaaaaaaaaaaaaaaaaaaaaaaaaaaaacctgggggggggcccgggacccaatttgcccttatggggggccgattaacattcaatggcccggcgtttaaaaccgtcggaatgggaaaaccctgggggtaccccacttaaatgccttggaagaaaatccccttttgccaagtggccgaataaccaaaagagcccgaccgaatggcctttccaaccgttggccaaccctgaaggccaatgggaaattggaaggcgtaaaattttggtaaaattcgggttaaaattttgggaaaacagctcattttttaaacaattggcccaaatggggaaaacaccttattaattaaaaggaatgacccgaaatggggttgatggttgtccaatttgaaaccaagagcccctttttaagaaccgtggctccaacgtcaagggccaaaacccgtatttagggcgagtgcccaatacggaaacttcacctaaataaagtttttgggtccaaggccctaaaggcttaaatcgaaccttaagggacccccgtttaaaactgaccgggaaacccgaaacccggcaa

SEQ ID NO: 382588 - DNA, 1484 bp, Homo sapiens
cttttcttaagggaaaaatcacgctgtgttcttttaaaatccctcaggttttatgttttattgctaccagagtctgcctccctgaggttcttgtatagactagttatttccctctgtaaagaagctgttctattcgttctcgcctggtttggaacaaactgaacacttccaaaggaggcagtccttgcagccttgtctccttccactcccctcctccccacagtcctggctggagcagcgagtctgtcgatcccaggccagagacaaggcagacaaaggttcatttgtaaagaagctccttccagcacctcctctcttctccttttgcccaaactcacccagtgagtgtgagcatttaagaagcatcctctgccaagaccaaaaggaaagaagaaaaagggccaaaagccaaaatgaaactgatggtacttgttttcaccattgggctaactttgctgctaggagttcaagccatgcctgcaaatcgcctctcttgctacagaaagatactaaaagatcacaactgtcacaaccttccggaaggagtagctgacctgacacagattgatgtcaatgtccaggatcatttctgggatgggaagggatgtgagatgatctgttactgcaacttcagcgaattgctctgctgcccaaaatgagaatcttcatgtattctggagaacaccattcctgatttcccacaaactgcactacatcagtataactgcatttctagtttctatatagtgcaatagagcatagattctataaattcttacttgtctaagacaagtaaatctgtgttaaacaagtagtaataaaagttaattcaatctaaaaaaaaaaaaaaaaaaaaaaaaaaaaaaaaaaaaaaaaaaaaaaaaaaaaaaaaaaaaaaaaaaaaaaaaaaaaaaaaaaaaaaaaaaaaaaaaaaaaaaaaaaacctgggggggggcccgggacccaatttgcccttatggggggccgattaacattcaatggcccggcgtttaaaaccgtcggaatgggaaaaccctgggggtaccccacttaaatgccttggaagaaaatccccttttgccaagtggccgaataaccaaaagagcccgaccgaatggcctttccaaccgttggccaaccctgaaggccaatgggaaattggaaggcgtaaaattttggtaaaattcgggttaaaattttgggaaaacagctcattttttaaacaattggcccaaatggggaaaacaccttattaattaaaaggaatgacccgaaatggggttgatggttgtccaatttgaaaccaagagcccctttttaagaaccgtggctccaacgtcaagggccaaaacccgtatttagggcgagtgcccaatacggaaacttcacctaaataaagtttttgggtccaaggccctaaaggcttaaatcgaaccttaagggacccccgtttaaaactgaccgggaaacccgaaacccggcaa

SEQ ID NO: 382589 - DNA, 894 bp, Homo sapiens
cttttcttaagggaaaaatcacgctgtgttcttttaaaatccctcaggttttatgttttattgctaccagagtctgcctccctgaggttcttgtatagactagttatttccctctgtaaagaagctgttctattcgttctcgcctggtttggaacaaactgaacacttccaaaggaggcagtccttgcagccttgtctccttccactcccctcctccccacagtcctggctggagcagcgagtctgtcgatcccaggccagagacaaggcagacaaaggttcatttgtaaagaagctccttccagcacctcctctcttctccttttgcccaaactcacccagtgagtgtgagcatttaagaagcatcctctgccaagaccaaaaggaaagaagaaaaagggccaaaagccaaaatgaaactgatggtacttgttttcaccattgggctaactttgctgctaggagttcaagccatgcctgcaaatcgcctctcttgctacagaaagatactaaaagatcacaactgtcacaaccttccggaaggagtagctgacctgacacagattgatgtcaatgtccaggatcatttctgggatgggaagggatgtgagatgatctgttactgcaacttcagcgaattgctctgctgcccaaaagtaaggaaatggtatcacaaagtgtattgcctggaaatgtatgcagaacaacttttagctacatcttcataataggtttgctgaaattaataacccttttagtaaaatcctgttccaatcccagctcttttctagaataatcactattgtgtaaagaactaaatgttttcatttaaatgaaagttcaaatggaatttagctgagtttaataaaagtaaattaaatccagaaaataata

SEQ ID NO: 382590 - DNA, 235 bp, Homo sapiens
ggactgatattttggcaactgtccatatctgactttgtagaaaacaccattcagctgctttaagtttctgactgtccaggtaagaactgtttcaagccaaatatgaacagaagatggacggaggaaacacagtaaaagagagacgactctgtggctcacagagagcaggtgtgattcatgcacattcaaattatgggctacaattttttaaaaaggtactgttgttttaggttct

SEQ ID NO: 382591 - DNA, 549 bp, Homo sapiens
  misc_feature (55)..(55): n is a, c, g, or t
gatccccgggctgcaggaattcggcacgagggcacgagccataaggaaagaaganaaagggccaaaagccaaaatgaaactgatggtacttgttttcaccattgggctaactttgctgctaggagttcaagccatgcctgcaaatcgcctctcttgctacagaaagatactaaaagatcacaactgtcacaaccttccggaaggagtagctgacctgacacagattgatgtcaatgtccaggatcatttctgggatgggaagggatgtgagatgatctgttactgcaacttcagcgaattgctctgctgcccaaaagacgttttctttggaccaaagatctctttcgtgattccttgcaacaatcaatgagaatcttcatgtattctggagaacaccattcctgatttcccacaaactgcactacatcagtataactgcatttctagtttctatatagtgcaatagagcatagattctataaattcttacttgtctaagacaagtaaatctgtgttaaacaagtagtaataaaagttaattcaatctaa

SEQ ID NO: 382592 - DNA, 918 bp, Homo sapiens
cttttcttaagggaaaaatcacgctgtgttcttttaaaatccctcaggttttatgttttattgctaccagagtctgcctccctgaggttcttgtatagactagttatttccctctgtaaagaagctgttctattcgttctcgcctggtttggaacaaactgaacacttccaaaggaggcagtccttgcagccttgtctccttccactcccctcctccccacagtcctggctggagcagcgagtctgtcgatcccaggccagagacaaggcagacaaaggttcatttgtaaagaagctccttccagcacctcctctcttctccttttgcccaaactcacccagtgagtgtgagcatttaagaagcatcctctgccaagaccaaaaggaaagaagaaaaagggccaaaagccaaaatgaaactgatggtacttgttttcaccattgggctaactttgctgctaggagttcaagccatgcctgcaaatcgcctctcttgctacagaaagatactaaaagatcacaactgtcacaaccttccggaaggagtagctgacctgacacagattgatgtcaatgtccaggatcatttctgggatgggaagggatgtgagatgatctgttactgcaacttcagcgaattgctctgctgcccaaaagacgttttctttggaccaaagatctctttcgtgattccttgcaacaatcaatgagaatcttcatgtattctggagaacaccattcctgatttcccacaaactgcactacatcagtataactgcatttctagtttctatatagtgcaatagagcatagattctataaattcttacttgtctaagacaagtaaatctgtgttaaacaagtagtaataaaagttaattcaatctaatttttctctgtggaaaaaattggcattgg

SEQ ID NO: 382593 - DNA, 552 bp, Homo sapiens
agaaagtgatggaatggaagggaaccttcctgcaaatcctcctgtaaggtggagaagccccttggatcacacttccacgcagacctgagcaggacacactgtggtttcctaagcccccgccccgtcagttgagcccgatggccttcctgctgatctgtaagcaggctgagcaacgcttgttccgcctggtggagagttcgttcttcttgggcccggggagctgcatgtcagggtgttgctgcttcgctcaagggtcacttatcacggaggcctctgtggtcaccctacagagcactgaccctctccactgctacctctgtctccccgactcaccctcatcctccatacaacagattgcatctgaaataatatgcattcgttattgcctgtctcctctcgtcagtgggtcagttctttgaaaatgagagccttgttttctcactgctgtgtgtcggctcctagaatgatgcctgttcataacaggcacctgatacatacttgttgggtagctaaattaatcagtgcttatagttcctgagagttatgccatga

SEQ ID NO: 382594 - DNA, 441 bp, Homo sapiens
aagtgctgggatcgcctcggcctctcaaagtgctgggattacaggtgtgggccaccgagcccggccaggatactgggagtttaaattcctgctgtgagcccaggttgacacagctggtcaaggatgggttagaatccaggtagtctgactccagagctactaccgcatactgcctcctcagattaaataattttcctaggacatgctaactgataagtaagagtctaaatcaaacccaggcagttgggttccaaaattccagcgtttaaccaccacattgactggttataagtaggtaaactgttcatcacaacctatatatttattttcatttctgttagaaatgaaagtagtgtggtaggttacatatttatcacatagtttaggcttgcctaaattctaagtattttcttttttaaattaaaaacaagggtctatcgg

SEQ ID NO: 382595 - DNA, 403 bp, Homo sapiens
aagccgtgcttccctgtgggggccagtggggctgaagggctgggctggcagtggggacggacatctagctgctcttgtgggtgccagggagcccaccctgctcccgtctgtcctctccctattgctgctttgctgcacaagctggagagtttcgggggacctggaacgtcacttgtgtgtggtaggtgagggaggaccacggatgcatcagacccagggtcgagcaatttctgacgtgtcttatttgatcccagcgacttccctgcacagaggttctcaccatcacattgtgggtgatgacgtgggcccaggggatcccctggcccctaaagggcaggcaggagcactgtgctgttccccagtagccttcagaccccacaccctgggttttttctgcaatgct

SEQ ID NO: 382596 - DNA, 192 bp, Homo sapiens
cctataccacaaatcaactagtgaaaaggagacctagctaattacatatgatggaataagcttctgagatatcaccacatcccatattcttggccataagttccccatgagttgaagagagggcctagttagggattcctagactgtacgttttgtgcctggagggctctacgccgacctctgagggggaag

SEQ ID NO: 382597 - DNA, 417 bp, Homo sapiens
atcccttgcgcttcgaccgagtgaggcaatgcgtcaccctgcttcagctcatgcacagtgcactgcacccactgtcctgtgcccactgtctggcactccctagtgagatgaacctggtaccttagatggaaatgcagaaatcacccgtcttctgcgtcactcacgctgggagctgtagaccagagctgttcctattcggccatcttggctgccctccgcttcccttgtttttaacagggagaattaagcctcttcattgtctttattctttttttttttttcaattgccctaacagtttccgagagcagtgttccgtgactcctcagttaagccaccagttcttccgagcccaacacagggtctttggtgtgaaaatttctgttttttccttattgctttaaaaaaaaaaaaaaaaa

SEQ ID NO: 382598 - DNA, 1453 bp, Homo sapiens
gctgagccttggccccggggctgttagaaggcagaggctctggggagaagtccccaaaccggatttacccgttcgtcgcacctgtccctaggagggcaggctggggtgtggaggcggtgccctgctgacccgcggggagagaagcccgggtctcccaggctgcaaaacgctcggcactgcggaagccgcgccaggctctcccagctcgatacgcagcggccggcgcgcctgctccgccgcggggccgagcggcagaggggcccggggctgcgtggaaggcccgggggcttcagcccgtgccggggaagccgacgctcagccaaccagaaagttagaggcggccgaggtctcgcggaggggaggcgcctggcggccacgggagaagtcgaagggctcaggcggggctccatccgcgacactgggagcccgggcgggcgcgcacgtgtgtatacgagtgcgtgggcccatccggcggcccggactacaagttccagggtgcccagcggcgctcccgggttttctggccgcgcctcccgctggctccgagcaggtcgccgctggctggcagtcgccacccggtcccagagtaaataagggagagacactcccgagcgccgtaaatagagtccaagtgggcggagagccgtcccgcgccgcccgctcatgtctctacagagccgactgtccggccgcctggcacagctgcgcgcggcggggcagctgctcgtccccccgcgcccccggcccggacacttggcgggtgccacgaggacccgcagcagcacgtgcggtcccccggcgttcctgggcgtgttcggccgccgtgcgcggacctcggcgggagttggggcgtggggggcggcggcggtggggcggacagccggggtgcgcacttgggcccccctggccatggcggcgaaggtggacctgagcacctccaccgactggaaggaggcgaaatcctttctgaagggcctgagtgacaagcagcgggaggaacattacttctgcaaggactttgtcaggctgaagaagatcccgacatggaaggagatggcgaaaggggtggctgtgaaggtggaggagcccaggtataaaaaggacaagcagctcaatgagaaaatctccctgctccgcagcgacatcaccaagctggaggtggacgccatcgtcaacgccgtggacggctgcattcatcgggccgccggccccctgcttaccgacgagtgccggaccctgcagagctgtaagactggcaaggccaagatcaccggcggctatcggctcccggccaagtgtgagtccccgacgcgcccccagctgtggggcgcagacagggcgcccgtgtgtcactgggacatcaggggtgcggcccccacaggagtgctggggaactcctcagggggcccttcttaaccttaagggccaagacccggcccccaccccgcacacc

SEQ ID NO: 382599 - DNA, 438 bp, Homo sapiens
gtttctcctgcgcaagggcgcctggcggtggcgagatgggggtgatggcacacagccgtgagcctccgtgaagggcgcagggccaggcaggtgaaagcctgcaccagggcaggcagtcacaggatcctggggccaggcgtggcagctcggcccaggctgagcagcccctggcgcaggtggaccggctgatcatctgcgtgttcctcgagaaggacgaggacatctaccggagccggctcccccactacttccccgtggcctgaggctcccgcagcccaccctgaccgggactgacccgccttcgggaccccgctcccagctctgagaggtcgccaaagcctgcagcctggcctgggcctggccaccccttctttccctccgcgccccgcccccgaggagcctaataaagatctcgttgtggcaaactcctactgtctg

SEQ ID NO: 382600 - DNA, 1282 bp, Homo sapiens
taagtaagctgggtgttaatcggcgaggggctgcagtcgcaccggtcccagagtaaataagggagagacactcccgagcgccgtaaatagagtccaagtgggcggagagccgtcccgcgccgcccgctcatgtctctacagagccgactgtccggccgcctggcacagctgcgcgcggcggggcagctgctcgtccccccgcgcccccggcccggacacttggcgggtgccacgaggacccgcagcagcacgtgcggtcccccggcgttcctgggcgtgttcggccgccgtgcgcggacctcggcgggagttggggcgtggggggcggcggcggtggggcggacagccggggtgcgcacttgggcccccctggccatggcggcgaaggtggacctgagcacctccaccgactggaaggaggcgaaatcctttctgaagggcctgagtgacaagcagcgggaggaacattacttctgcaaggactttgtcaggctgaagaagatcccgacatggaaggagatggcgaaaggggtggctgtgaaggtggaggagcccaggtataaaaaggacaagcagctcaatgagaaaatctccctgctccgcagcgacatcaccaagctggaggtggacgccatcgtcaacgccgccaacagctccctgctcggaggcggtggcgtggacggctgcattcatcgggccgccggccccctgcttaccgacgagtgccggaccctgcagagctgtaagactggcaaggccaagatcaccggcggctatcggctcccggccaagtacgtcatccacacagtggggcccatcgcctacggggagcccagcgccagtcaggctgccgagctccgcagctgctacctgagcagtctggacctgctgctggagcaccggctccgctcggtggcgttcccctgcatctccaccggcgtgtttggctacccctgtgaggcggccgccgagatcgtgctggccacgctgcgagagtggctggagcagcacaaggacaaggtggaccggctgatcatctgcgtgttcctcgagaaggacgaggacatctaccggagccggctcccccactacttccccgtggcctgaggctcccgcagcccaccctgaccgggactgacccgccttcgggaccccgctcccagctctgagaggtcgccaaagcctgcagcctggcctgggcctggccaccccttctttccctccgcgccccgcccccgaggagcctaataaagatctcgttgtggcaaactcctactgtctg

SEQ ID NO: 382601 - DNA, 1247 bp, Homo sapiens
taagtaagctgggtgttaatcggcgaggggctgcagtcgcaccggtcccagagtaaataagggagagacactcccgagcgccgtaaatagagtccaagtgggcggagagccgtcccgcgccgcccgctcatgtctctacagagccgactgtccggccgcctggcacagctgcgcgcggcggggcagctgctcgtccccccgcgcccccggcccggacacttggcgggtgccacgaggacccgcagcagcacgtgcggtcccccggcgttcctgggcgtgttcggccgccgtgcgcggacctcggcgggagttggggcgtggggggcggcggcggtggggcggacagccggggtgcgcacttgggcccccctggccatggcggcgaaggtggacctgagcacctccaccgactggaaggaggcgaaatcctttctgaagggcctgagtgacaagcagcgggaggaacattacttctgcaaggactttgtcaggctgaagaagatcccgacatggaaggagatggcgaaaggggtggctgtgaaggtggaggagcccaggtataaaaaggacaagcagctcaatgagaaaatctccctgctccgcagcgacatcaccaagctggaggtggacgccatcgtcaacgccgccaacagctccctgctcggaggcggtggcgtggacggctgcattcatcgggccgccggccccctgcttaccgacgagtgccggaccctgcagagctgtaagactggcaaggccaagatcaccggcggctatcggctcccggccaagtacgtcatccacacagtggggcccatcgcctacggggagcccagcgccagtcaggctgccgagctccgcagctgctacctgagcagtctggacctgctgctggagcaccggctccgctcggtggcgttcccctgcatctccaccggcgtgtttggctacccctgtgaggcggccgccgagatcgtgctggccacgctgcgagagtggctggagcagcacaaggacaaggtggaccggctgatcatctgcgtgttcctcgagaaggacgaggacatctaccggagccggctcccccactacttccccgtggacccgccttcgggaccccgctcccagctctgagaggtcgccaaagcctgcagcctggcctgggcctggccaccccttctttccctccgcgccccgcccccgaggagcctaataaagatctcgttgtggcaaactcctactgtctg

SEQ ID NO: 382602 - DNA, 974 bp, Homo sapiens
tacagccctaacttatggcgaggcggtggggcggacagccggggtgcgcacttgggcccccctggccatggcggcgaaggtggacctgagcacctccaccgactggaaggaggcgaaatcctttctgaagggcctgagtgacaagcagcgggaggaacattacttctgcaaggactttgtcaggctgaagaagatcccgacatggaaggagatggcgaaaggggtggctgtgaaggtggaggagcccaggtataaaaaggacaagcagctcaatgagaaaatctccctgctccgcagcgacatcaccaagctggaggtggacgccatcgtcaacgccgccaacagctccctgctcggaggcggtggcgtggacggctgcattcatcgggccgccggccccctgcttaccgacgagtgccggaccctgcagagctgtaagactggcaaggccaagatcaccggcggctatcggctcccggccaagtacgtcatccacacagtggggcccatcgcctacggggagcccagcgccagtcaggctgccgagctccgcagctgctacctgagcagtctggacctgctgctggagcaccggctccgctcggtggcgttcccctgcatctccaccggcgtgtttggctacccctgtgaggcggccgccgagatcgtgctggccacgctgcgagagtggctggagcagcacaaggacaaggtggaccggctgatcatctgcgtgttcctcgagaaggacgaggacatctaccggagccggctcccccactacttccccgtggcctgaggctcccgcagcccaccctgaccgggactgacccgccttcgggaccccgctcccagctctgagaggtcgccaaagcctgcagcctggcctgggcctggccaccccttctttccctccgcgccccgcccccgaggagcctaataaagatctcgttgtggcaaactcctactgtctg

SEQ ID NO: 382603 - DNA, 1488 bp, Homo sapiens
taagtaagctgggtgttaatcggcgaggggctgcagtcgcaccggtcccagagtaaataagggagagacactcccgagcgccgtaaatagagtccaagtgggcggagagccgtcccgcgccgcccgctcatgtctctacagagccgactgtccggccgcctggcacagctgcgcgcggcggggcagctgctcgtccccccgcgcccccggcccggacacttggcgggtgccacgaggacccgcagcagcacgtgcggtcccccggcgttcctgggcgtgttcggccgccgtgcgcggacctcggcgggagttggggcgtggggggcggcggcggtggggcggacagccggggtgcgcacttgggcccccctggccatggcggcgaaggtggacctgagcacctccaccgactggaaggaggcgaaatcctttctgaagggcctgagtgacaagcagcgggaggaacattacttctgcaaggactttgtcaggctgaagaagatcccgacatggaaggagatggcgaaaggggtggctgtgaaggtggaggagcccaggtataaaaaggacaagcagctcaatgagaaaatctccctgctccgcagcgacatcaccaagctggaggtggacgccatcgtcaacgccgccaacagctccctgctcggaggcggtggcgtggacggctgcattcatcgggccgccggccccctgcttaccgacgagtgccggaccctgcagagctgtaagactggcaaggccaagatcaccggcggctatcggctcccggccaagtacgtcatccacacagtggggcccatcgcctacggggagcccagcgccagtcaggctgccgagctccgcagctgctacctgagcagtctggacctgctgctggagcaccggctccgctcggtggtgagggacggcccgcgggggagggcgggaggcggggcgcagtgacaatgttccaaccccctctcacccctccccgcccaggcgttcccctgcatctccaccggcgtgtttggtgagtctggaagaaaggcaaggaccaggagtgggcggtggacccagacgccgggaggggccggggcggacaggggagtgggcggggccagagcctaggactcactcccgccccacccgcctcaggctacccctgtgaggcggccgccgagatcgtgctggccacgctgcgagagtggctggagcagcacaaggacaaggtggaccggctgatcatctgcgtgttcctcgagaaggacgaggacatctaccggagccggctcccccactacttccccgtggcctgaggctcccgcagcccaccctgaccgggactgacccgccttcgggaccccgctcccagctctgagaggtcgccaaagcctgcagcctggcctgggcctggccaccccttctttccctccgcgccccgcccccgaggagcctaataaagatctcgttgtggcaaactcctactgtctg

SEQ ID NO: 382604 - DNA, 1605 bp, Homo sapiens
tctgttgtgcttgtttgttctctcttctcttttatttgttttttttctttttcttttctttcgcttcgtggtgctctatgtgcctttttttctgtcgtctcgcctgttcctcgctttgttctcttttctcctcttattttctctgttcttctctttcttttttctttgtctctccgtctcgtgttttttctttttcttttttttttctttttttttcttttctttttttttttttttcgttctttatcttttcctcgctttttcttctctactctcttcttttgctttccttttgtcctgcgccgttccttgtggcgctttccctcttttctctcctccttgtgctcttttgttcttcttatttcctgttctctcgccgcttccctcctttcttgttctttccggccgcccccctctttgtgttgggtgttttgtttggtggtttttgttttttttgtgtgtgttgtgtgtttgtttttgttgttcttgttttggtgtggtggggtgttcgggtgtgttgggtgtttttttttttaaagttaaatctttctatttatttcaagaaagaacaaggcaagtggacttggacattttctatgaaaatagacaaacagaaaataggaccaagtagttaatcacattcatctcaacattgaagtttcaaggcacctacaagaaggaggccaaagggcggttcgcagtgcactttggtttgtgttgttgtcgtggtggtgggtgtttgcgtgtctcggttttctggaaacccttgcctggtggtgaggttgggagcgaagcaggtgggcacgaggccaggctggtctgggccctgagaagccgggccgggtcagccatctggtcgcatggcagcaggcggtagcggggacggtcaggcccgtcactcaggcccctgagacggcttccaagaaaaagaaaggagatagtgctgcacctgggcggctgattctggagccaacagctccctgctcggaggcggtggcgtggacggctgcattcatcgggccgccggccccctgcttaccgacgagtgccggaccctgcagagctgtaagactggcaaggccaagatcaccggcggctatcggctcccggccaagtacgtcatccacacagtggggcccatcgcctacggggagcccagcgccagtcaggctgccgagctccgcagctgctacctgagcagtctggacctgctgctggagcaccggctccgctcggtggcgttcccctgcatctccaccggcgtgtttggctacccctgtgaggcggccgccgagatcgtgctggccacgctgcgagagtggctggagcagcacaaggacaaggtggaccggctgatcatctgcgtgttcctcgagaaggacgaggacatctaccggagccggctcccccactacttccccgtggcctgaggctcccgcagcccaccctgaccgggactgacccgccttcgggaccccgctcccagctctgagaggtcgccaaagcctgcagcctggcctgggcctggccaccccttctttccctccgcgccccgcccccgaggagcctaataaagatctcgttgtggcaaactcctactgtctg

SEQ ID NO: 382605 - DNA, 2540 bp, Homo sapiens
gctgagccttggccccggggctgttagaaggcagaggctctggggagaagtccccaaaccggatttacccgttcgtcgcacctgtccctaggagggcaggctggggtgtggaggcggtgccctgctgacccgcggggagagaagcccgggtctcccaggctgcaaaacgctcggcactgcggaagccgcgccaggctctcccagctcgatacgcagcggccggcgcgcctgctccgccgcggggccgagcggcagaggggcccggggctgcgtggaaggcccgggggcttcagcccgtgccggggaagccgacgctcagccaaccagaaagttagaggcggccgaggtctcgcggaggggaggcgcctggcggccacgggagaagtcgaagggctcaggcggggctccatccgcgacactgggagcccgggcgggcgcgcacgtgtgtatacgagtgcgtgggcccatccggcggcccggactacaagttccagggtgcccagcggcgctcccgggttttctggccgcgcctcccgctggctccgagcaggtcgccgctggctggcagtcgccacccggtcccagagtaaataagggagagacactcccgagcgccgtaaatagagtccaagtgggcggagagccgtcccgcgccgcccgctcatgtctctacagagccgactgtccggccgcctggcacagctgcgcgcggcggggcagctgctcgtccccccgcgcccccggcccggacacttggcgggtgccacgaggacccgcagcagcacgtgcggtcccccggcgttcctgggcgtgttcggccgccgtgcgcggacctcggcgggagttggggcgtggggggcggcggcggtggggcggacagccggggtgcgcacttgggcccccctggccatggcggcgaaggtggacctgagcacctccaccgactggaaggaggcgaaatcctttctgaagggcctgagtgacaagcagcgggaggaacattacttctgcaaggactttgtcaggctgaagaagatcccgacatggaaggagatggcgaaaggggtggctgtgaaggtggaggagcccaggtataaaaaggacaagcagctcaatgagaaaatctccctgctccgcagcgacatcaccaagctggaggtggacgccatcgtcaacgccggagcctgaaaaccttccatcgggtcgccagcgagtggccagtggcgggagagctgcgtgggagctttgagagccggctgcttctccctggcggttcctttgtgatggccttgaacagagcatgaggtgtccacagatgttgtacaggtagtatccttccagttcaggggggaaaaaaaaaaaacccaacccagccctgcctgcaatattatttttagtccttccctccccaactggcataacttggtataaattatgtcttcaacaatgtcgaattccccctcctgccttctattcttttaaaaaaaattgtcactgttgtgttctacaaaatcgtcagccctccccaaactttgctttctgcggaggaaagtcacccatggaatttctcttccttgctctcttggattgcagcaggctgggcaaagccacatggccacgccagggcagctggggctgaggcggggcagcccgggtgggcgggcatcatgtgtaggagtagtctatgtcggggatgccgccgtcccggtagccccgcgtggtgccgtagccaatggtgtgtgtggccttgcagaggctgctgccgttggaggggaagatagtgtggaccacgtactcctctttggcgcggtacgggttgatgggcagcatctgcagcccagggccgcggatttccaggatggagttatccttcttggtccctgactccatatagtcatcctttttcctgctgccccggttgtaggccctctcccgggtcagcagctcgccagcctggtgcacgtaccagcagatggcccccaggaccaggaagaggaagaccagagccactgccccgccgatgatgcccgccaggggcaggctcgccatggggccagcgttctgctcctggttgagtgtggtggtagggccatagctgtcggctgtctctgccttggcacacacaggtgtctcatcagctacgtaggcattgctggtctccatggtgaccatgcagatgatgtaggtggacttgggctccagggctgtcagcaggtactctgtcttgtccccctgcaccaaggtctccgtgatggagcccacggctgggctgtggcccaggcgcagccaactgagccggaaagaggaggcggggagcgtggccttccacgtgatgcggatggagtctgccgtcagggccttcacgtggatggccagggtcttggcgccatcacccgtggccatggggtagtcaatgttggagtcggggaggcgcagccctggccttttggccttgagggtaaacagggaaccctggggcgtggtggcagaggcgtggttgctggccgtggtcttggcagccgcattggccacgccgccct

SEQ ID NO: 382606 - DNA, 1022 bp, Homo sapiens
tctgttgtgcttgtttgttctctcttctcttttatttgttttttttctttttcttttctttcgcttcgtggtgctctatgtgcctttttttctgtcgtctcgcctgttcctcgctttgttctcttttctcctcttattttctctgttcttctctttcttttttctttgtctctccgtctcgtgttttttctttttcttttttttttctttttttttcttttctttttttttttttttcgttctttatcttttcctcgctttttcttctctactctcttcttttgctttccttttgtcctgcgccgttccttgtggcgctttccctcttttctctcctccttgtgctcttttgttcttcttatttcctgttctctcgccgcttccctcctttcttgttctttccggccgcccccctctttgtgttgggtgttttgtttggtggtttttgttttttttgtgtgtgttgtgtgtttgtttttgttgttcttgttttggtgtggtggggtgttcgggtgtgttgggtgtttttttttttaaagttaaatctttctatttatttcaagaaagaacaaggcaagtggacttggacattttctatgaaaatagacaaacagaaaataggaccaagtagttaatcacattcatctcaacattgaagtttcaaggcacctacaagaaggaggccaaagggcggttcgcagtgcactttggtttgtgttgttgtcgtggtggtgggtgtttgcgtgtctcggttttctggaaacccttgcctggtggtgaggttgggagcgaagcaggtgggcacgaggccaggctggtctgggccctgagaagccgggccgggtcagccatctggtcgcatggcagcaggcggtagcggggacggtcaggcccgtcactcaggcccctgagacggcttccaagaaaaagaaaggagatagtgctgcacctgggcggctgattctggaggtgaggaaggctggggggcgtgggaagtgggggtactggcacaggggcccctt

SEQ ID NO: 382607 - DNA, 479 bp, Homo sapiens
tcccccactacttccccgtgggtacgtgccccgcgccgccccacggcccgcccctgccccggtccaccctgggggcgggctctcactgtcctctgccttccagcctgaggctcccgcagcccaccctgaccgggactggtaagcagggcctcgccccgtgcggcggccccggccctagactaacccgcccactaacccccgctcacccccaagcagggcgggaaaccacggggcagcctgggaggtcggggacgcccatagacacctctgactctgctctgccctcagacccgccttcgggaccccgctcccagctctgagaggtcgccaaagcctgcagcctggcctgggcctggccaccccttctttccctccgcgccccgcccccgaggagcctaataaagatctcgttgtggcaaactcctactgtctgagctctgactggggggaaggaaggcggcccaggtgttggatggagc

SEQ ID NO: 382608 - DNA, 1525 bp, Homo sapiens
ttgttttttttttttaatcgactacatgattgttcaaagaatgcagtgaaagatgccatgtttctgcaaatctgcaagggaaatggtatggaataagccaggggagagatttcaggaccatatctccagggcaaaagatcttttcttccctctctcctttgtgaggagcctgaaaaccttccatcgggtcgccagcgagtggccagtggcgggagagctgcgtgggagctttgagagccggctgcttctccctggcggttcctttgtgatggccttgaacagagcatgaggtgtccacagatgttgtacaggtagtatccttccagttcaggggggaaaaaaaaaaaacccaacccagccctgcctgcaatattatttttagtccttccctccccaactggcataacttggtataaattatgtcttcaacaatgtcgaattccccctcctgccttctattcttttaaaaaaaattgtcactgttgtgttctacaaaatcgtcagccctccccaaactttgctttctgcggaggaaagtcacccatggaatttctcttccttgctctcttggattgcagcaggctgggcaaagccacatggccacgccagggcagctggggctgaggcggggcagcccgggtgggcgggcatcatgtgtaggagtagtctatgtcggggatgccgccgtcccggtagccccgcgtggtgccgtagccaatggtgtgtgtggccttgcagaggctgctgccgttggaggggaagatagtgtggaccacgtactcctctttggcgcggtacgggttgatgggcagcatctgcagcccagggccgcggatttccaggatggagttatccttcttggtccctgactccatatagtcatcctttttcctgctgccccggttgtaggccctctcccgggtcagcagctcgccagcctggtgcacgtaccagcagatggcccccaggaccaggaagaggaagaccagagccactgccccgccgatgatgcccgccaggggcaggctcgccatggggccagcgttctgctcctggttgagtgtggtggtagggccatagctgtcggctgtctctgccttggcacacacaggtgtctcatcagctacgtaggcattgctggtctccatggtgaccatgcagatgatgtaggtggacttgggctccagggctgtcagcaggtactctgtcttgtccccctgcaccaaggtctccgtgatggagcccacggctgggctgtggcccaggcgcagccaactgagccggaaagaggaggcggggagcgtggccttccacgtgatgcggatggagtctgccgtcagggccttcacgtggatggccagggtcttggcgccatcacccgtggccatggggtagtcaatgttggagtcggggaggcgcagccctggccttttggccttgagggtaaacagggaaccctggggcgtggtggcagaggcgtggttgctggccgtggtcttggcagccgcattggccacgccgccct

SEQ ID NO: 382609 - DNA, 1816 bp, Homo sapiens
gctgagccttggccccggggctgttagaaggcagaggctctggggagaagtccccaaaccggatttacccgttcgtcgcacctgtccctaggagggcaggctggggtgtggaggcggtgccctgctgacccgcggggagagaagcccgggtctcccaggctgcaaaacgctcggcactgcggaagccgcgccaggctctcccagctcgatacgcagcggccggcgcgcctgctccgccgcggggccgagcggcagaggggcccggggctgcgtggaaggcccgggggcttcagcccgtgccggggaagccgacgctcagccaaccagaaagttagaggcggccgaggtctcgcggaggggaggcgcctggcggccacgggagaagtcgaagggctcaggcggggctccatccgcgacactgggagcccgggcgggcgcgcacgtgtgtatacgagtgcgtgggcccatccggcggcccggactacaagttccagggtgcccagcggcgctcccgggttttctggccgcgcctcccgctggctccgagcaggtcgccgctggctggcagtcgccacccggtcccagagtaaataagggagagacactcccgagcgccgtaaatagagtccaagtgggcggagagccgtcccgcgccgcccgctcatgtctctacagagccgactgtccggccgcctggcacagctgcgcgcggcggggcagctgctcgtccccccgcgcccccggcccggacacttggcgggtgccacgaggacccgcagcagcacgtgcggtcccccggcgttcctgggcgtgttcggccgccgtgcgcggacctcggcgggagttggggcgtggggggcggcggcggtggggcggacagccggggtgcgcacttgggcccccctggccatggcggcgaaggtggacctgagcacctccaccgactggaaggaggcgaaatcctttctgaagggcctgagtgacaagcagcgggaggaacattacttctgcaaggactttgtcaggctgaagaagatcccgacatggaaggagatggcgaaaggggtggctgtgaaggtggaggagcccaggtataaaaaggacaagcagctcaatgagaaaatctccctgctccgcagcgacatcaccaagctggaggtggacgccatcgtcaacgccgccaacagctccctgctcggaggcggtggcgtggacggctgcattcatcgggccgccggccccctgcttaccgacgagtgccggaccctgcagagctgtaagactggcaaggccaagatcaccggcggctatcggctcccggccaagtacgtcatccacacagtggggcccatcgcctacggggagcccagcgccagtcaggctgccgagctccgcagctgctacctgagcagtctggacctgctgctggagcaccggctccgctcggtggcgttcccctgcatctccaccggcgtgtttggctacccctgtgaggcggccgccgagatcgtgctggccacgctgcgagagtggctggagcagcacaaggacaaggtggaccggctgatcatctgcgtgttcctcgagaaggacgaggacatctaccggagccggctcccccactacttccccgtggcctgaggctcccgcagcccaccctgaccgggactgacccgccttcgggaccccgctcccagctctgagaggtcgccaaagcctgcagcctggcctgggcctggccaccccttctttccctccgcgccccgcccccgaggagcctaataaagatctcgttgtggcaaactcctactgtctg

SEQ ID NO: 382610 - DNA, 1246 bp, Homo sapiens
taagtaagctgggtgttaatcggcgaggggctgcagtcgcaccggtcccagagtaaataagggagagacactcccgagcgccgtaaatagagtccaagtgggcggagagccgtcccgcgccgcccgctcatgtctctacagagccgactgtccggccgcctggcacagctgcgcgcggcggggcagctgctcgtccccccgcgcccccggcccggacacttggcgggtgccacgaggacccgcagcagcacgtgcggtcccccggcgttcctgggcgtgttcggccgccgtgcgcggacctcggcgggagttggggcgtggggggcggcggcggtggggcggacagccggggtgcgcacttgggcccccctggccatggcggcgaaggtggacctgagcacctccaccgactggaaggaggcgaaatcctttctgaagggcctgagtgacaagcagcgggaggaacattacttctgcaaggactttgtcaggctgaagaagatcccgacatggaaggagatggcgaaaggggtggctgtgaaggtggaggagcccaggtataaaaaggacaagcagctcaatgagaaaatctccctgctccgcagcgacatcaccaagctggaggtggacgccatcgtcaacgccgccaacagctccctgctcggaggcggtggcgtggacggctgcattcatcgggccgccggccccctgcttaccgacgagtgccggaccctgcagagctgtaagactggcaaggccaagatcaccggcggctatcggctcccggccaagtacgtcatccacacagtggggcccatcgcctacggggagcccagcgccagtcaggctgccgagctccgcagctgctacctgagcagtctggacctgctgctggagcaccggctccgctcggtggcgttcccctgcatctccaccggcgtgtttggctacccctgtgaggcggccgccgagatcgtgctggccacgctgcgagagtggctggagcagcacaaggacaaggacgaggacatctaccggagccggctcccccactacttccccgtggcctgaggctcccgcagcccaccctgaccgggactgacccgccttcgggaccccgctcccagctctgagaggtcgccaaagcctgcagcctggcctgggcctggccaccccttctttccctccgcgccccgcccccgaggagcctaataaagatctcgttgtggcaaactcctactgtctg

SEQ ID NO: 382611 - DNA, 1407 bp, Homo sapiens
taagtaagctgggtgttaatcggcgaggggctgcagtcgcaccggtcccagagtaaataagggagagacactcccgagcgccgtaaatagagtccaagtgggcggagagccgtcccgcgccgcccgctcatgtctctacagagccgactgtccggccgcctggcacagctgcgcgcggcggggcagctgctcgtccccccgcgcccccggcccggacacttggcgggtgccacgaggacccgcagcagcacgtgcggtcccccggcgttcctgggcgtgttcggccgccgtgcgcggacctcggcgggagttggggcgtggggggcggcggcggtggggcggacagccggggtgcgcacttgggcccccctggccatggcggcgaaggtggacctgagcacctccaccgactggaaggaggcgaaatcctttctgaagggcctgagtgacaagcagcgggaggaacattacttctgcaaggactttgtcaggctgaagaagatcccgacatggaaggagatggcgaaaggggtggctgtgaaggtggaggagcccaggtataaaaaggacaagcagctcaatgagaaaatctccctgctccgcagcgacatcaccaagctggaggtggacgccatcgtcaacgccgccaacagctccctgctcggaggcggtggcgtggacggctgcattcatcgggccgccggccccctgcttaccgacgagtgccggaccctgcagagctgtaagactggcaaggccaagatcaccggcggctatcggctcccggccaagtacgtcatccacacagtggggcccatcgcctacggggagcccagcgccagtcaggctgccgagctccgcagctgctacctgagcagtctggacctgctgctggagcaccggctccgctcggtggcgttcccctgcatctccaccggcgtgtttggtgagtctggaagaaaggcaaggaccaggagtgggcggtggacccagacgccgggaggggccggggcggacaggggagtgggcggggccagagcctaggactcactcccgccccacccgcctcaggctacccctgtgaggcggccgccgagatcgtgctggccacgctgcgagagtggctggagcagcacaaggacaaggtggaccggctgatcatctgcgtgttcctcgagaaggacgaggacatctaccggagccggctcccccactacttccccgtggcctgaggctcccgcagcccaccctgaccgggactgacccgccttcgggaccccgctcccagctctgagaggtcgccaaagcctgcagcctggcctgggcctggccaccccttctttccctccgcgccccgcccccgaggagcctaataaagatctcgttgtggcaaactcctactgtctg

SEQ ID NO: 382612 - DNA, 898 bp, Homo sapiens
gatgtggggagggggcgcggggctctgtgcgcgtgcggattcgggctcgagggggcccacaggggtgggggccttcgcggaggaggctcagcgcttggggggaaaggtgtttcctgcccccttctgcccaggccggcagggggaagcgagggagctgaggaccgcgtagacccccgccggtctgaccccgtcgccccccgtagacgtcatccacacagtggggcccatcgcctacggggagcccagcgccagtcaggctgccgagctccgcagctgctacctgagcagtctggacctgctgctggagcaccggctccgctcggtggtgagggacggcccgcgggggagggcgggaggcggggcgcagtgacaatgttccaaccccctctcacccctccccgcccaggcgttcccctgcatctccaccggcgtgtttggtgagtctggaagaaaggcaaggaccaggagtgggcggtggacccagacgccgggaggggccggggcggacaggggagtgggcggggccagagcctaggactcactcccgccccacccgcctcaggctacccctgtgaggcggccgccgagatcgtgctggccacgctgcgagagtggctggagcagcacaaggacaaggtggaccggctgatcatctgcgtgttcctcgagaaggacgaggacatctaccggagccggctcccccactacttccccgtggcctgaggctcccgcagcccaccctgaccgggactgacccgccttcgggaccccgctcccagctctgagaggtcgccaaagcctgcagcctggcctgggcctggccaccccttctttccctccgcgccccgcccccgaggagcctaataaagatctcgttgtggcaaactcctactgtctg

SEQ ID NO: 382613 - DNA, 1607 bp, Homo sapiens
gctgagccttggccccggggctgttagaaggcagaggctctggggagaagtccccaaaccggatttacccgttcgtcgcacctgtccctaggagggcaggctggggtgtggaggcggtgccctgctgacccgcggggagagaagcccgggtctcccaggctgcaaaacgctcggcactgcggaagccgcgccaggctctcccagctcgatacgcagcggccggcgcgcctgctccgccgcggggccgagcggcagaggggcccggggctgcgtggaaggcccgggggcttcagcccgtgccggggaagccgacgctcagccaaccagaaagttagaggcggccgaggtctcgcggaggggaggcgcctggcggccacgggagaagtcgaagggctcaggcggggctccatccgcgacactgggagcccgggcgggcgcgcacgtgtgtatacgagtgcgtgggcccatccggcggcccggactacaagttccagggtgcccagcggcgctcccgggttttctggccgcgcctcccgctggctccgagcaggtcgccgctggctggcagtcgccacccggtcccagagtaaataagggagagacactcccgagcgccgtaaatagagtccaagtgggcggagagccgtcccgcgccgcccgctcatgtctctacagagccgactgtccggccgcctggcacagctgcgcgcggcggggcagctgctcgtccccccgcgcccccggcccggacacttggcgggtgccacgaggacccgcagcagcacgtgcggtcccccggcgttcctgggcgtgttcggccgccgtgcgcggacctcggcgggagttggggcgtggggggcggcggcggtggggcggacagccggggtgcgcacttgggcccccctggccatggcggcgaaggtggacctgagcacctccaccgactggaaggaggcgaaatcctttctgaagggcctgagtgacaagcagcgggaggaacattacttctgcaaggactttgtcaggctgaagaagatcccgacatggaaggagatggcgaaaggggtggctgtgaaggtggaggagcccaggtataaaaaggacaagcagctcaatgagaaaatctccctgctccgcagcgacatcaccaagctggaggtggacgccatcgtcaacgccgactctcacagccaggaggacccggtacccgcctggaatcccagggaatgacggaggcagggtctgaacacgggcttcccacacagagcccgagtctcctttcagccgtccagggctttgtggaaccccagcgttcaaagtggctttggcactggtcaggcctccagggtcctgggtggccttggctcccaccccagcccctgtgcccaccagggggcagcagagattgcagttcccaggagcccatatatcagcctgtttattagtggaataaaagtcgttggcaacggcagggcttttcggggctgcataaatctgcgtctgtgcctcgtgaaacccatatgtgcttaattcatatgtaaagtttcaagcaggaagagaatacgtgtccattaaattctatttgacttgattataatcattagccg

SEQ ID NO: 382614 - DNA, 371 bp, Homo sapiens
aaataggtggtcaaaagtgtgtttcagcttttagggagtacctagcatttgtgtcaaatgaaacctctctgaagagaacatgaaggatgaccttgaccagtgaaacccaaagcataaacatcctgacagcagtcaatgtgtggtcacaacagaataacaaggacaggagaagaaaggccatctctgtggacactaattatttatttaaaggggaatactaatttgtgttttatcctgtagtcggcttccttttcttcctcccagagctgtggttcctgccagaggacacttccctcgttggctgtgcccaggagcagcttgaccagaagattttccctgttatgaagtcataacacatatcataatagtaa

SEQ ID NO: 382615 - DNA, 304 bp, Homo sapiens
cagctactcgggaggctgaggtgggagaatcgcttgaacctgggagacggaggttgcagagagccgagattgcgccatcacactccagcctgggcgacagagtgaaactccatctcaaaaaaaaaaaaaaagaaccaccactgtaactgagaaatagatgatcccattaacagtttagaaaatgtatataactctaatccacagaggtttatacttacaagcaactcatggtttccctttaagggacacatgtggaaaattaatctgaacagttagtgcaaggaggagtcatacctcagagaaa

SEQ ID NO: 382616 - DNA, 820 bp, Homo sapiens
ctgctgcactgcactttagcctgggcgacgagcaaaactccttccccaccacaaaaaaaaaaaaaaaaaaaaaaaaaaagaagagaaactactgaagccaaaaagcctccaaacttgaagatccctcttgctaaggaacaattacttgacttaggcatctagattgctctgtgtgtcttgagtatacatgaagagtataaacccccaccaaccatccaggatcattcagcaaccctctgtgtgaatttgagtttttttttttttttaatattgtaagttgtctgggtgtcctttctgaccttttcttctatgaagtcctgaatttctaacttgcttctaaattgctgaatgtcacattgtcctgttgtagctttctctgaaatgcacaggaaatgtctgtagggttggcaagctcctcctcccccgacttcactcctattccacacatgtactttcagcatttgagagcctgtcttctctcttagctcccttaaaaacatttgtagtatttccactttttatgaagttaaaatggtttattttcaatccactgagttagaaggatcatgtctatccttaacctttgccaaatatccttaaaaatcatttttttcttgggaaacttccataatgccattcttataaatgcatgccaagcctgagcctgtgggtggttttcttcatctgaacttacttttcaaatatagcagtatgagacttgaggtaggggaagcagcatcagaaatggaagggctggaaactagactcaggacattgtttaaaataatcagaataaatactttcatttatttaacattct

SEQ ID NO: 382617 - DNA, 299 bp, Homo sapiens
ttttataccaaaaggctgagggaaaactagagtaatatttttaggttttatggctggctttgaggaaagggagttctagtttctgtgacctagagaagagggattctagtttctatggcttaccttgggggagaatgggactgagagacagagcaggagaaggtcaaagaaaaacttctgtgtctaatgcagctgagtccttcattttggagtattgttttctgagcccaacaaactttttattcagctttgtgttctcagcagttagcataatgtatagcatatagtaatgtggtaaa

SEQ ID NO: 382618 - DNA, 419 bp, Homo sapiens
cagcaggaaagcaagaagagtagtagggcaatcgggaggttttagaaacagttcagatgaaagatgatggtggtagtagcagtgatggtggtggtggaaactagtcatgttttttatatattttgaagatcaagctgataggaattgctaatggatttaatataaggtatgagaggaagaaagacatcaagaatgatgccaaggcttgagaaactggaataataaaaatgccatttactggtgagaactatgagaggagtaggttttgggtgaagaacagaaatctggatttggacttagattggagatgcctaagaattttgctcagaacaatgtttgatatacaatcaacaccccatagaaggttagccattaggactaccacaaacattacctctttggtggttctgtggaggtta

SEQ ID NO: 382619 - DNA, 325 bp, Homo sapiens
  misc_feature (293)..(293): n is a, c, g, or t
  misc_feature (297)..(297): n is a, c, g, or t
tgcaaataaaaagtgtagtataactatttacatagcatttacattctattaggaattataagtaatctagagatcatttaaagtatacaggaggatgtgcataggttatatgcaaatactacaccattttatattagggacttgaacatcctcagattttggtgtctgagggagtcctggaagcaatcccccacagataccttgtttcagatgaaaaagcatcatactctatgggtaactggttaactcaccttattctgatatatgaatgccatttcacgaagctgaaaggntggntcctggggaaggttggagccagcttgca

SEQ ID NO: 382620 - DNA, 431 bp, Homo sapiens
tgcaaataaaaagtgtagtataactatttacatagcatttacattctattaggaattataagtaatctagagatcatttaaagtatacaggaggatgtgcataggttatatgcaaatactacaccattttatattagggacttgaacatcctcagattttggtgtctgagggagtcctggaagcaatcccccacagataccttgtttcagatgaaaaagcatcatactctatgggtaactggttaactcaccttattctgatatatgaatgccattcacattatgctggatatgggtcaaacttaagttcttctgcgaaagccacaacataccaggcatcagaaatgctagagagttttgaccatcattcagaaaaacaattgtttaacagcaaccaacaattcaaactatttaacaggcaccagctgtca

SEQ ID NO: 382621 - DNA, 787 bp, Homo sapiens
gagaagaagctcagggtttccttgtgaaaattctagggacacttcgctgcagcagagaatcgtccccattccgaacgcttcggcggcctagaccagaggcgcccttccctggagccggcgtgcgcgcttggggtccggagtggatggggctaaggctcagatgctagcgcgctcccagttcccccgctagccccatagtccagcggcagctgatattttcaagtttgacttcaatagaaagcgtcaagaccaccttccctagggcgagagcgaagtgtcccccggcccctggcgtccccgctctcctaaggactcctctcagttcaccaagcagatctccggttcggtgccagtccctaacacccaaggttgatcaccagcggtacaagaactgaggcaaagagatgcttttccttttcggagccgcgagactctctaacctccccaactcgctccacactcgccaacccagagttcggtaaaaggcgcgtctggtgaggtgccgcgctcggagagtgtcctggagcgccctacgccaccgccccgagagctagttcttgcgggcgtgccctggacagtatctgcagttctttggcgccggctctagggcgaggaaggaatctcgaaatctcagcccgcttcacaatctcctgagactctctgaagaaggagagtcccggactcccgcctgagcgtgctcgatatccaccgttgacactggaagctgggcgaccgccagcagaacctggatgcccgccaacaggtcctggccggggggggggggggg

SEQ ID NO: 382622 - DNA, 437 bp, Homo sapiens
cataaaatctaaagaaatcagagaacactgcatgttaggttaagtcatgttttgtgaaacttttcttccatgtgtgtttcttacatatgtgcgtatgtatagcattataatggtaactgcgtcaaaaacggcttgagagcctagccctggagaaacttctggagtggacagggagtcaggtacaggatgttcattgctgcattgttggaaatagtttggaaacaaccgagtaaccacagcaagggaatgggtaaatgaaatacaagagagcgctgtgactgagtcctctacagcattttagaaaacctaggtgaggaggaagccagaagcgtaacattcatgtaaattagacatctataaaaggagacctgtgtccttggacacgtgtaaacgagaagctatttcaccgtgggttggagggacctcgccaggttcat

SEQ ID NO: 382623 - DNA, 1094 bp, Homo sapiens
  misc_feature (404)..(404): n is a, c, g, or t
  misc_feature (762)..(762): n is a, c, g, or t
ctgtaatcccagcactttcgggaggctgagatggggtcttgctttgtagctcaggctggtctcaaactcctggctttaagcgatactctcacctcagcctcccgaaagtgctgggattacaggtgtgagccactgtgctcagcttcttctctccttttataaaggatgaattatctgtgctcctagcaaagaccaaccccatccacttgtacatcagactctatctcctctcatctattcaaggacacttctccagcaatttcctccctcttttctgcatcattaatttctcttgtagattcttctcatcaacatgcaaacacatttgtcagatcacgtcactattctgctcaaaatcctccaaggttttttcattttaatcagagtaaaagcaaaagtccaantgctctggcgccccctacctctctgacctcatctccctctggcttgctcttgtcatgcctggcctccttgctgtttcttgaacactccttcataacctcagctcacagattttgcgcttgctgttctctctgcctcgaaagctcacctccagatgcccaggtagcctgtttcctctctctcttcaggtctttgctctactgtcacctcactgaagtcttctccgaccacctgcttaaaactgtaccccttcccacctttccttaccacctttccctgctttttatttcatagaacttgcatggtcattaacacactgtatgttttattatttggaaagctccacaacgaagggactcntgtttcttttgttcactgcagtatctctagcatatagaacagtacctaactatagcggatggttagtacgtgttagctgagtaagtgaatcaaataatcacgtgttgcaggtgaaaaaacaaaacaaaaccaaaaaaccaaaaatccaaattttaactgtaattatttctggctgattgaattctaaatgttttctgttttctcctttgtattttccaaatcctttttttttttttgagatggagtgttgctctgtcgcccaggctggagtgcagtagcgcgatctcggctcactgtacttcagcctgggcgacagagcgagactcagtctc

SEQ ID NO: 382624 - DNA, 319 bp, Homo sapiens
tggaaagatacgcaaaagtgttataagagaaggagaggataattctggctggtgggatgatctaggaaagcttccttaaggcagttttaaataattccagaacaagtcaaatgtattctcttatacccctactcagctcctatactcaattatataaaataaacatgaaaaaacctcaaataattatgaataattactatatgttaccaagtattttaggcatgttagaatgatattttacctcctctaaagcagggaccatagatggtttgctatatggtttagagaaattaatacatagtgattgtttttaaaatac

SEQ ID NO: 382625 - DNA, 600 bp, Homo sapiens
aaaacttgcacattcaaagcacatgatttgtacagtcacacctggcagtagcactgcacagttacaaatatgcacacacgttaactgctatgcataaatattgacagttaaaccagaacacaattgaaacagtgacataaatacctacaggattcagaattgttccagggtaatataaattattctacttgttcactctccccaccctcttgaacttgttagaagatttgctgctttagcagaatctttccaagattgagaaaagtgtatcaacctaggattttcattactatatagtcacataaatggaggaggagatatatttggcttctgcctctgcaacaattagtatgaacatatttctttctctagggaataataggttttaaacatttgagatatcatgaagcaaagtcagggtataccactacaatccccactaatctctattcccacattatgaaattgtacagaagaaagggtgtcattaaatcaaggtatccagataattcatggctactttaactattttttcattcgtgttaactgagccccccatattttttactacttaaccttaaatatgccatcactaattta

SEQ ID NO: 382626 - DNA, 591 bp, Homo sapiens
aagatgtttttcattgtgagcatgtagtttgtgaaataacagataatggaaaataatacaattgagttattttcttcgtgctttcatggatttttccattattaacaagcaattttatgagaagagcagaagcatagctatatgtaagccctgtgttatcaaggcaaacaatatataaatagttcagtatctccagtggctatcattatctcagactgatggttgactttgaggcataaagaaaatatttaattgtgttcctgtacactaagtggattacagtgttacatgtttttgaaccattctggtttaaaattgtgacagcatttggagaggctcaggagctgacattttaatgtggaagttatgtggggtttatagtcttgacacatctcccagtttctataaagatcacatgcagtctggtctaataattgatagttttgagacatgctgcaacttttttataagccaggttttttgaatcaagaagggatgggacgggacttaaaaataaaatgtcattctccccaaaatcaaaagcttttagtcttggtaactcttgactgcagttgtatttttagaaagtag

SEQ ID NO: 382627 - DNA, 383 bp, Homo sapiens
ataagttcttgtgtggatatgtttttatttctgttggatagatacctaggagttgaattgctgggacatatgatagttgtgtttcacatttttagaaactgacaaactattttccaaaatgactatgtcattttacttccttatcagcaatatagaaggttctagtttctccacattcttaccaacacatggtaccatctatctttgattacagtcattctagtgggtgtgaagtatgatttccctaatgactaatagtgttgagtatctttttatgtgcttattggccatttatcctcttaggagagaaataactgtataaatacttcgctcatttaaaaattacattttcttactaagttgtaagagttctttatatattt

SEQ ID NO: 382628 - DNA, 152 bp, Homo sapiens
atccacataggaaaaattttttacccggcgttacacacaaaaataaactcgaggtgaagtgcatatgtaaatacgaaagcaaaatattatactttgataagaaaatatataaatatatcttcctaacttaggctgttggaagagtttcataa

SEQ ID NO: 382629 - DNA, 295 bp, Homo sapiens
ctaattagaattgagataaaaagatggaagaaagccacttccacagcacgttttatatgaactcgcaggaagcagaagtatgcagaagttagaagaggcaccttgagctcaaaatgaaaaaattctgtcttttaaacatcactgcttgtcttcatcagaaaccaaatgtgacttcttggtagggatgttgtaaaggggtttaccattggtgggtagatgaattccatgaatttaaaattgcttttcacctttgaaatttagtgagttcattacagctgggaggcagacctatggg

SEQ ID NO: 382630 - DNA, 234 bp, Homo sapiens
catagcgccctatccttctgcatctgactttgaaaggcagttttactttcacacaactttttatttcaataaacctcttacagccaaaaattgtcttgggctccataactggaattaaatgatttctactcttgttgacaaaaagaattcctcaagagagtaactctaacattagcttattatgttgtcattgttgatgttgaatatttaagctctcagggtgcttttcttaaa

SEQ ID NO: 382631 - DNA, 507 bp, Homo sapiens
ctcaagtagttctttatagcagtgtaagaacagacaatacatctagcttacatggagaaaagaaataaattttagctggttagctgtgtcctcagccaaaaattgggattcttaatactaaggaaggaagaatgagtatcaggaggcaaaattatttcaaggatcagtttggtttcaaccaagtaaagtataaagaaagacagtggatgggttatggtcaccacaaacatatactctgtttttcagcatgacatacaaatacagagttaactgttcaggatgccagagaactttagttgtgttatattcacagttttcaaagagaatggcatcaataagaacactgacctggtttaaacatggaaatccactaataactttaagcaagtttgaggcagcagcatgaaatatattctttcacagaagtttatgtgtggcatttctttagagaaagcatccatttctgaatcagtcaggattcagttctagcaataagaatcatcaccc

SEQ ID NO: 382632 - DNA, 426 bp, Homo sapiens
gagaaaaccaaataaatgagggtcaactctatatttctataaactagcaataaggaaaaaatagttatatatatttatatactattttcaaatggcatcacaaatatcaaatataggagtaaatctaataattttataggcaaaatggagaactcagtacaatacagatgtcagtttttcccactctgatctatagattcaaagtaatctcaattaaaaccacaatagagggctgggcacagtggcttacacttgtaaacccagtactttggaaggccaaggcgggcagatcaccttgactgaggacaggagttcaagaccaccagcctggccaacatggtgaaatgccatctctactaaaaatacaaaaaacagccaggcgtggtggtgggtgcctgtaatcccagctactctgggggctgaggc

SEQ ID NO: 382633 - DNA, 452 bp, Homo sapiens
aaggggtttgcccaacgagacttctctgaagccccaaagtttacccagcctctggccgactgcactacagtcaccggctataatacccagctcttctgctgtgtccgcgcctctccccggcccaagatcatctggctgaagaacaagatggatatccaaggcaaccctaagtacagagccctgactcacctgggaatctgctccctagagatccgcaagccgggtccctttgatggaggcatctatacctgcaaggcggtgaaccccctaggggaggcatctgtggactgtcgggtggatgtgaaagttcctaattgaggacacctaagaaggcatggtactctgacaaagtgcctccaggaagcccgccagtggtgagactgtgtcctcaaggagcttcggcaccatgtctggtttggattcatctaaataaatatgtggttccccagtgc

SEQ ID NO: 382634 - DNA, 353 bp, Homo sapiens
aggtaagttttcaagaattactaactctaaaaccctactctcacctactttaatttttttccccttttggttcattttatttgaaaacatgcagggatgtggttagtagaggatttgtactttaaaaaaatattcacagttggaaaatgttaaatatttcaggtgctggttatgttaactagcttgattttattattccacattacattcatatatcataacatcaatttgtactccaaatttatataattacaaactgtcaatttacaataaaaaagaatcacagttggaagtaaatagtatgctgtgctgcaaaatagcaatgtccttttttttttttttttttttttttt

SEQ ID NO: 382635 - DNA, 516 bp, Homo sapiens
gaccaagacaatcgaacatccctggatatctgagatagccagcctttcttctggagagcttcccagatgaagtcttgctctgtcgcccagactagattgcagtgatgtgttctcggctcactgcaacctccgctacctgggtttaagcgactctcctgcctcagcttccagagtagctgggactacagatagaggcattcggtactcctcaacttctgttcctgatggctcctcccgggaaatttcacctaaactcaacctcatgagctacagaagaaatggtcctttaatttagtgccttccaatttagaaagtgagagtggctgtacatccaaagagttcatggcagtcgcccggcacctacatgctgggtccggagaaagggtcgcgccgggcagccgcgaaagcaaggcttccccacgtctgttgacaggacggccgcctctctacttccgctggctacggcctctacgcagtagaggtaccgcgtctgtgggtcgggtttccggggccgga

SEQ ID NO: 382636 - DNA, 967 bp, Homo sapiens
agttgcccattaccatggatattttggaagtgattatgtactgaatcttaccatgaagcagtagtccatgtatctgaattacatttaggccttttaaaacatatcacattatgtatatagttagaaggagggatgagatgggtatttttgaattgagtttaatggcttacttcaataggtgaataaggttctgctctgggaattaaagggacttttaagtttctctcttgactctgatgtgcctttcactgaacagtaaaggaccggggagacttgcccagctctcctacttgacaaaaggtgaaatagaatgatgccatgaaatgcatcaatgtaaaatgcagttttaagattgcattttaacttgagagggtcgtgaagctcttgccttcccattaagcccccaggaataatctccaggtgtgtcttctggcactccacgctgcctgccttctgatgcttcctatgaattgttggaaccagccatatccttctcacttctgccacaaaaactcctggtggttttgtactttgccaccttgtttaggtttcataggcgattggttcaaggcagtgcctatctgcacttccctgtaactctcactttttttctttaatgtggcctgcatatgaatatatcaacactttttaaattaaaggctaatgagctcactgcacagcctgagtacgtttggtatttggccttcttggagatgctctgcatgtgtcaaatgttattttcagaaaactggctaaacttttaatgggacctgttgttaaatcaccctgtgtttcccccataaacacgaatgttaatttacatttttaacctaactgaatgagttgtttttcttaaattcctttgcagtttgaaggaacataccttgcaacaggaaagctttaagaaagaggacgaaaaggctttataatctttcttgaagagaccctgttgctaaaaagaaaaaaa

SEQ ID NO: 382637 - DNA, 913 bp, Homo sapiens
agttgcccattaccatggatattttggaagtgattatgtactgaatcttaccatgaagcagtagtccatgtatctgaattacatttaggccttttaaaacatatcacattatgtatatagttagaaggagggatgagatgggtatttttgaattgagtttaatggcttacttcaataggtgaataaggttctgctctgggaattaaagggacttttaagtttctctcttgactctgatgtgcctttcactgaacagtaaaggaccggggagacttgcccagctctcctacttgacaaaaggtgaaatagaatgatgccatgaaatgcatcaatgtaaaatgcagttttaagattgcattttaacttgagagggtcgtgaagctcttgccttcccattaagcccccaggaataatctccaggtgtgtcttctggcactccacgctgcctgccttctgatgcttcctatgaattgttggaaccagccatatccttctcacttctgccacaggttcaaggcagtgcctatctgcacttccctgtaactctcactttttttctttaatgtggcctgcatatgaatatatcaacactttttaaattaaaggctaatgagctcactgcacagcctgagtacgtttggtatttggccttcttggagatgctctgcatgtgtcaaatgttattttcagaaaactggctaaacttttaatgggacctgttgttaaatcaccctgtgtttcccccataaacacgaatgttaatttacatttttaacctaactgaatgagttgtttttcttaaattcctttgcagtttgaaggaacataccttgcaacaggaaagctttaagaaagaggacgaaaaggctttataatctttcttgaagagaccctgttgctaaaaagaaaaaaa

SEQ ID NO: 382638 - DNA, 447 bp, Homo sapiens
cctccttgttgatttcaaaacctatttagattggtgcaaaagtaattgcggtttttgcctttaaaagtaatggcagcagaataggttggaaaatttacccctctttccactgtaagatgatgtggtggttttccaaaacaaaagattgataatctgccagcatatgtgtttaacccaatttataatatattcagaatgttttttcatttctctaaatgtttttcacttgtttttatgtgaaaccctcaaaatggggaagttgagagggggatatctcaaatttttgtgttttatgtgagttttaacagttcacacttactaactagaaacatatacattcattcagcaatccaaagaggtcacagtttgggtttctatgaagaacatatgctcaagtaagaatataagattttactaaccacagctcctgttaaagaggattttgaa

SEQ ID NO: 382639 - DNA, 671 bp, Homo sapiens
ccctggtgtagacccacgctccttactgcatagatttatcttcagattcaacaagttttttaaagcctacattgaatgtatttaaatatctgagaattatgttaaaaccgtcactattttttctagtttgactttttaaatgacagagaagagcatgagcctgggaggacatcccaacacccggatcccttcggggacattggaaagttttgttggggtctcacgctggcggcgtggtggctgctgactggcgggtgtgtggtgcacttgctgtggctctgaagttccagaacctgttgtcaggaagaagcactggtttcttcttaatggtctccaacatcttttccagggatacttcaggccagggaagattttgtaccatattccgctcctactcccggggcgcacaggtaacacagcatcccccgagctgggagatcaaaccaactttgaataataacatttacaatgcttaacttaccatcctttaatggatgattggaggacaaggcggttaagcttacgtataaattggtgctgagagtctaaaaacgtgctgtagagtggttggttgtttgaaagacttcatcagtattacggatgtaagcgtgcatttacgggactgtgtgtgcatgtacacgtgtgtgcaggtacgtgcactgtgtatgcgt

SEQ ID NO: 382640 - DNA, 640 bp, Homo sapiens
cgtctgcaaagacggtctttccaattacgaggtcccatgctgaggttctgggtggacatgaactcgtggggggttcctcgacccagagcacccacattacgacgacaacaaaatctcactgaagtaacccatgctcctcgcctttctcctgcccgctagcatgcccccggagtccccaagatcctggtggggaaccgcctgcacctggcgttcaagcggcaggtgcccacggagcaggcccaggcctacgccgagcgcctgggcgtgaccttctttgaggtcagccctctgtgcaatttcaacatcacagagtcgttcacggagctggccaggatcgtgctgctgcggcatgggatggaccggctctggcggccgagcaagggtaggcccaggggctattccgggggccacctctgccctccagatgccgaggtgggtcagcggccccctggataagtgtctgcctcccgggacccgtctcaaggccactgtgtccgttctcagagcaaggcatttgagagaagtaatgactacagctttgtcagaaagctcatgagggagctcctgggatctgtacgtgggcagaggggacgtcgcggcagggcttgctgcatgtacaagccagggccacgggcgtccg

SEQ ID NO: 382641 - DNA, 647 bp, Homo sapiens
agcgctgggcggcggggcggggccggaggcgagcaaggactcggggcccgcgcggcgcctctcggggccgggccgccgcctctgcgctcagccccgcaggccgggcatgggtgggggcgccgggccgtcacgatgagcgccctgggcagcccggtccgggcctacgactttctgctcaagttcctgctggtgggcgacagcgacgtgggcaagggcgagatcctggcgagcctgcaggatggcgcggccgagtccccgtacggccacccggcggatagttcggatgtcgctgtggcaaagtccgagggccagcgctgccctggagattgagcgcctggaggacagggctggagattgagcgcctggaggacagggctggagattgagcgcctggaggacagggctggagattgagcgcctggaggacagggctggagattgagcgcctggaggacagggctggagattgagcgcctggaggacagggctggagattgagcgcctggaggacagggctggagattgagcgcctggaggacagggctttgtctgcactgtgccctcggggtctgggctcagtgagggatgaaccctaccagagctacaggaataaagcacccaacaacgtgtacgcccagacgaatatg

SEQ ID NO: 382642 - DNA, 534 bp, Homo sapiens
cacccagcggccacagccccgcggcaaacccaccggcctccaggtcacatgtaggccctgcagtgcctgtcggggagccccctgggccagggtgatgcgagcctgacccccacagaggccaaggcggctgaggacaggaggggcccgggtgcgggagggcgcaggcagggcccctgtgagcttgggcagacacagggagggggtcccatccgcctgccttgtaaacctggaagttgcactgatgagaaacccttttcttccctgaacgtgagacttccagcgtcctgttagctgcagcctcaggcctaagccgtctctaacccttccgcaggcatcgactacaagacgaccaccatcctgctggacgggcggcgggtgaagctgcagctctggtgagtctggaggaggtgcgagcgtcccgcacccccagggagtaacccccctggctggcatagcaccccctgtcagcacagtgccccggggagcacccatcccccaccaccatcggcacagcgcccccgggaacaccctccc

SEQ ID NO: 382643 - DNA, 516 bp, Homo sapiens
ctagaggatccccgctgactcttccccggatcccttcggggacattggaaagttttgttggggtctcacgctggcggcgtggtggctgctgactggcgggtgtgtggtgcacttgctgtggctctgaagttccagaacctgttgtcaggaagaagcactggtttcttcttaatggtctccaacatcttttccagggatacttcaggccagggaagattttgtaccatattccgctcctactcccggggcgcacaggtaacacagcatcccccgagctgggagatcaaaccaactttgaataataacatttacaatgcttaacttaccatcctttaatggatgattggaggacaaggcggttaagcttacgtataaattggtgctgagagtctaaaaacgtgctgtagagtggttggttgtttgaaagacttcatcagtattacggatgtaagcgtgcatttacgggactgtgtgtgcatgtacacgtgtgtgcaggtacgtgcactgtgtatgcgt

SEQ ID NO: 382644 - DNA, 1850 bp, Homo sapiens
agcgctgggcggcggggcggggccggaggcgagcaaggactcggggcccgcgcggcgcctctcggggccgggccgccgcctctgcgctcagccccgcaggccgggcatgggtgggggcgccgggccgtcacgatgagcgccctgggcagcccggtccgggcctacgactttctgctcaagttcctgctggtgggcgacagcgacgtgggcaagggcgagatcctggcgagcctgcaggatggcgcggccgagtccccgtacggccacccggcgggcatcgactacaagacgaccaccatcctgctggacgggcggcgggtgaagctgcagctctgggatacttcaggccagggaagattttgtaccatattccgctcctactcccggggcgcacagggtgtgatcctggtctatgacattgcgaaccgctggtcttttgacggcattgatcgatggattaaggagatcgatgagcatgcccccggagtccccaagatcctggtggggaaccgcctgcacctggcgttcaagcggcaggtgcccacggagcaggcccaggcctacgccgagcgcctgggcgtgaccttctttgaggtcagccctctgtgcaatttcaacatcacagagtcgttcacggagctggccaggatcgtgctgctgcggcatgggatggaccggctctggcggccgagcaaggtgctgagcttgcaagacctctgctgccgggcggtcgtgtcctgcacgccggtgcacctggtggacaagctcccgctccccattgccttaagaagccacctcaagtccttctcgatggccaacggcctgaatgccaggatgatgcacggcggttcctactccctcaccaccagctccacccacaaaaggagcagcctccgcaaagtgaagctcgtccgccccccccagagcccccccaaaaactgcaccagaaacagctgcaaaatttcttaaggaaggcactgaaagaaacacggcggaatctctccaggagaagctcggcgttacccccggcagctggtggatgcatctcagatcccggttcctctcggcgaatgctgcttgcgaatgtgtgcgacgccttccgtgtgatggaaacacactaccccgtcggacttcgaatttctacgtggatgtgcatgaagctcttgttttcgatgtgtgtttgtaaagggaaaattagtactctgctcgactcttggtaacatgaaattctgaatgttactttatcatgattgcactgcaactttttccttaaaataactgcttttgtaagaacggtgatattggagtgattagtataaattcaatggaatttgagaagcaatggcagcgggataatttagagtcactgatattacgagaggggtctttttgtaaacctccttttcaatgtcaaagcaccaatttataaaacgctgcagatgtagaggttatgtgcaactgatctgtccagtttgtgtatgaaatggatttgataaagtttttgctagttatttactacattttgggattaataagtgatttatatgcatatttttctgtaaatctacagttttttgtacaagatattctacaagttatgaagctaagggaagaaaatgccaaagatacctctagttatgttgaacacagccagcacagtttcgacaggtcaaggaagagctgtttcagtaaagaatgaagtgaaaacacttatttaggaaaatgtttctcaacaataaaatgtatagttgtttctcttcccttagcttcataacttgtagaatatcttgtacaaaaaactgtagatttacagaaaaatatgcatataaatcacttattaatcgtcgacg

SEQ ID NO: 382645 - DNA, 1907 bp, Homo sapiens
cacccagcggccacagccccgcggcaaacccaccggcctccaggtcacatgtaggccctgcagtgcctgtcggggagccccctgggccagggtgatgcgagcctgacccccacagaggccaaggcggctgaggacaggaggggcccgggtgcgggagggcgcaggcagggcccctgtgagcttgggcagacacagggagggggtcccatccgcctgccttgtaaacctggaagttgcactgatgagaaacccttttcttccctgaacgtgagacttccagcgtcctgttagctgcagcctcaggcctaagccgtctctaacccttccgcaggcatcgactacaagacgaccaccatcctgctggacgggcggcgggtgaagctgcagctctgggatacttcaggccagggaagattttgtaccatattccgctcctactcccggggcgcacagggtgtgatcctggtctatgacattgcgaaccgctggtcttttgacggcattgatcgatggattaaggagatcgatgagcatgcccccggagtccccaagatcctggtggggaaccgcctgcacctggcgttcaagcggcaggtgcccacggagcaggcccaggcctacgccgagcgcctgggcgtgaccttctttgaggtcagccctctgtgcaatttcaacatcacagagtcgttcacggagctggccaggatcgtgctgctgcggcatgggatggaccggctctggcggccgagcaaggtgctgagcttgcaagacctctgctgccgggcggtcgtgtcctgcacgccggtgcacctggtggacaagctcccgctccccattgccttaagaagccacctcaagtccttctcgatggccaacggcctgaatgccaggatgatgcacggcggttcctactccctcaccaccagctccacccacaaaaggagcagcctccgcaaagtgaagctcgtccgccccccccagagcccccccaaaaactgcaccagaaacagctgcaaaatttcttaaggaaggcactgaaagaaacacggcggaatctctccaggagaagctcggcgttacccccggcagctggtggatgcatctcagatcccggttcctctcggcgaatgctgcttgcgaatgtgtgcgacgccttccgtgtgatggaaacacactaccccgtcggacttcgaatttctacgtggatgtgcatgaagctcttgttttcgatgtgtgtttgtaaagggaaaattagtactctgctcgactcttggtaacatgaaattctgaatgttactttatcatgattgcactgcaactttttccttaaaataactgcttttgtaagaacggtgatattggagtgattagtataaattcaatggaatttgagaagcaatggcagcgggataatttagagtcactgatattacgagaggggtctttttgtaaacctccttttcaatgtcaaagcaccaatttataaaacgctgcagatgtagaggttatgtgcaactgatctgtccagtttgtgtatgaaatggatttgataaagtttttgctagttatttactacattttgggattaataagtgatttatatgcatatttttctgtaaatctacagttttttgtacaagatattctacaagttatgaagctaagggaagaaaatgccaaagatacctctagttatgttgaacacagccagcacagtttcgacaggtcaaggaagagctgtttcagtaaagaatgaagtgaaaacacttatttaggaaaatgtttctcaacaataaaatgtatagttgtttctcttcccttagcttcataacttgtagaatatcttgtacaaaaaactgtagatttacagaaaaatatgcatataaatcacttattaatcgtcgacg

SEQ ID NO: 382646 - DNA, 1699 bp, Homo sapiens
agcgctgggcggcggggcggggccggaggcgagcaaggactcggggcccgcgcggcgcctctcggggccgggccgccgcctctgcgctcagccccgcaggccgggcatgggtgggggcgccgggccgtcacgatgagcgccctgggcagcccggtccgggcctacgactttctgctcaagttcctgctggtgggcgacagcgacgtgggcaagggcgagatcctggcgagcctgcaggatggcgcggccgagtccccgtacggccacccggcgggcatcgactacaagacgaccaccatcctgctggacgggcggcgggtgaagctgcagctctgggatacttcaggccagggaagattttgtaccatattccgctcctactcccggggcgcacagggtgtgatcctggtctatgacattgcgaaccgctggtcttttgacggcattgatcgatggattaaggagatcgatgagagtcgttcacggagctggccaggatcgtgctgctgcggcatgggatggaccggctctggcggccgagcaaggtgctgagcttgcaagacctctgctgccgggcggtcgtgtcctgcacgccggtgcacctggtggacaagctcccgctccccattgccttaagaagccacctcaagtccttctcgatggccaacggcctgaatgccaggatgatgcacggcggttcctactccctcaccaccagctccacccacaaaaggagcagcctccgcaaagtgaagctcgtccgccccccccagagcccccccaaaaactgcaccagaaacagctgcaaaatttcttaaggaaggcactgaaagaaacacggcggaatctctccaggagaagctcggcgttacccccggcagctggtggatgcatctcagatcccggttcctctcggcgaatgctgcttgcgaatgtgtgcgacgccttccgtgtgatggaaacacactaccccgtcggacttcgaatttctacgtggatgtgcatgaagctcttgttttcgatgtgtgtttgtaaagggaaaattagtactctgctcgactcttggtaacatgaaattctgaatgttactttatcatgattgcactgcaactttttccttaaaataactgcttttgtaagaacggtgatattggagtgattagtataaattcaatggaatttgagaagcaatggcagcgggataatttagagtcactgatattacgagaggggtctttttgtaaacctccttttcaatgtcaaagcaccaatttataaaacgctgcagatgtagaggttatgtgcaactgatctgtccagtttgtgtatgaaatggatttgataaagtttttgctagttatttactacattttgggattaataagtgatttatatgcatatttttctgtaaatctacagttttttgtacaagatattctacaagttatgaagctaagggaagaaaatgccaaagatacctctagttatgttgaacacagccagcacagtttcgacaggtcaaggaagagctgtttcagtaaagaatgaagtgaaaacacttatttaggaaaatgtttctcaacaataaaatgtatagttgtttctcttcccttagcttcataacttgtagaatatcttgtacaaaaaactgtagatttacagaaaaatatgcatataaatcacttattaatcgtcgacg

SEQ ID NO: 382647 - DNA, 1187 bp, Homo sapiens
catgctgatgtcagatctagaggatcccggaaggtgctgagcttgcaagacctctgctgccgggcggtcgtgtcctgcacgccggtgcacctggtggacaagctcccgctccccattgccttaagaagccacctcaagtccttctcgatggccaacggcctgaatgccaggatgatgcacggcggttcctactccctcaccaccagctccacccacaaaaggagcagcctccgcaaagtgaagctcgtccgccccccccagagcccccccaaaaactgcaccagaaacagctgcaaaatttcttaaggaaggcactgaaagaaacacggcggaatctctccaggagaagctcggcgttacccccggcagctggtggatgcatctcagatcccggttcctctcggcgaatgctgcttgcgaatgtgtgcgacgccttccgtgtgatggaaacacactaccccgtcggacttcgaatttctacgtggatgtgcatgaagctcttgttttcgatgtgtgtttgtaaagggaaaattagtactctgctcgactcttggtaacatgaaattctgaatgttactttatcatgattgcactgcaactttttccttaaaataactgcttttgtaagaacggtgatattggagtgattagtataaattcaatggaatttgagaagcaatggcagcgggataatttagagtcactgatattacgagaggggtctttttgtaaacctccttttcaatgtcaaagcaccaatttataaaacgctgcagatgtagaggttatgtgcaactgatctgtccagtttgtgtatgaaatggatttgataaagtttttgctagttatttactacattttgggattaataagtgatttatatgcatatttttctgtaaatctacagttttttgtacaagatattctacaagttatgaagctaagggaagaaaatgccaaagatacctctagttatgttgaacacagccagcacagtttcgacaggtcaaggaagagctgtttcagtaaagaatgaagtgaaaacacttatttaggaaaatgtttctcaacaataaaatgtatagttgtttctcttcccttagcttcataacttgtagaatatcttgtacaaaaaactgtagatttacagaaaaatatgcatataaatcacttattaatcgtcgacg

SEQ ID NO: 382648 - DNA, 1627 bp, Homo sapiens
agcgctgggcggcggggcggggccggaggcgagcaaggactcggggcccgcgcggcgcctctcggggccgggccgccgcctctgcgctcagccccgcaggccgggcatgggtgggggcgccgggccgtcacgatgagcgccctgggcagcccggtccgggcctacgactttctgctcaagttcctgctggtgggcgacagcgacgtgggcaagggcgagatcctggcgagcctgcaggatggcgcggccgagtccccgtacggccacccggcgggcatcgactacaagacgaccaccatcctgctggacgggcggcgggtgaagctgcagctctgggatacttcaggccagggaagattttgtaccatattccgctcctactcccggggcgcacagggtgtgatcctggtctatgacattgcgaaccgctggtcttttgacggcattgatcgatggattaaggagatcgatgagtgctgagcttgcaagacctctgctgccgggcggtcgtgtcctgcacgccggtgcacctggtggacaagctcccgctccccattgccttaagaagccacctcaagtccttctcgatggccaacggcctgaatgccaggatgatgcacggcggttcctactccctcaccaccagctccacccacaaaaggagcagcctccgcaaagtgaagctcgtccgccccccccagagcccccccaaaaactgcaccagaaacagctgcaaaatttcttaaggaaggcactgaaagaaacacggcggaatctctccaggagaagctcggcgttacccccggcagctggtggatgcatctcagatcccggttcctctcggcgaatgctgcttgcgaatgtgtgcgacgccttccgtgtgatggaaacacactaccccgtcggacttcgaatttctacgtggatgtgcatgaagctcttgttttcgatgtgtgtttgtaaagggaaaattagtactctgctcgactcttggtaacatgaaattctgaatgttactttatcatgattgcactgcaactttttccttaaaataactgcttttgtaagaacggtgatattggagtgattagtataaattcaatggaatttgagaagcaatggcagcgggataatttagagtcactgatattacgagaggggtctttttgtaaacctccttttcaatgtcaaagcaccaatttataaaacgctgcagatgtagaggttatgtgcaactgatctgtccagtttgtgtatgaaatggatttgataaagtttttgctagttatttactacattttgggattaataagtgatttatatgcatatttttctgtaaatctacagttttttgtacaagatattctacaagttatgaagctaagggaagaaaatgccaaagatacctctagttatgttgaacacagccagcacagtttcgacaggtcaaggaagagctgtttcagtaaagaatgaagtgaaaacacttatttaggaaaatgtttctcaacaataaaatgtatagttgtttctcttcccttagcttcataacttgtagaatatcttgtacaaaaaactgtagatttacagaaaaatatgcatataaatcacttattaatcgtcgacg

SEQ ID NO: 382649 - DNA, 1535 bp, Homo sapiens
cgtctgcaaagacggtctttccaattacgaggtcccatgctgaggttctgggtggacatgaactcgtggggggttcctcgacccagagcacccacattacgacgacaacaaaatctcactgaagtaacccatgctcctcgcctttctcctgcccgctagcatgcccccggagtccccaagatcctggtggggaaccgcctgcacctggcgttcaagcggcaggtgcccacggagcaggcccaggcctacgccgagcgcctgggcgtgaccttctttgaggtcagccctctgtgcaatttcaacatcacagagtcgttcacggagctggccaggatcgtgctgctgcggcatgggatggaccggctctggcggccgagcaaggtgctgagcttgcaagacctctgctgccgggcggtcgtgtcctgcacgccggtgcacctggtggacaagctcccgctccccattgccttaagaagccacctcaagtccttctcgatggccaacggcctgaatgccaggatgatgcacggcggttcctactccctcaccaccagctccacccacaaaaggagcagcctccgcaaagtgaagctcgtccgccccccccagagcccccccaaaaactgcaccagaaacagctgcaaaatttcttaaggaaggcactgaaagaaacacggcggaatctctccaggagaagctcggcgttacccccggcagctggtggatgcatctcagatcccggttcctctcggcgaatgctgcttgcgaatgtgtgcgacgccttccgtgtgatggaaacacactaccccgtcggacttcgaatttctacgtggatgtgcatgaagctcttgttttcgatgtgtgtttgtaaagggaaaattagtactctgctcgactcttggtaacatgaaattctgaatgttactttatcatgattgcactgcaactttttccttaaaataactgcttttgtaagaacggtgatattggagtgattagtataaattcaatggaatttgagaagcaatggcagcgggataatttagagtcactgatattacgagaggggtctttttgtaaacctccttttcaatgtcaaagcaccaatttataaaacgctgcagatgtagaggttatgtgcaactgatctgtccagtttgtgtatgaaatggatttgataaagtttttgctagttatttactacattttgggattaataagtgatttatatgcatatttttctgtaaatctacagttttttgtacaagatattctacaagttatgaagctaagggaagaaaatgccaaagatacctctagttatgttgaacacagccagcacagtttcgacaggtcaaggaagagctgtttcagtaaagaatgaagtgaaaacacttatttaggaaaatgtttctcaacaataaaatgtatagttgtttctcttcccttagcttcataacttgtagaatatcttgtacaaaaaactgtagatttacagaaaaatatgcatataaatcacttattaatcgtcgacg

SEQ ID NO: 382650 - DNA, 1400 bp, Homo sapiens
agcgctgggcggcggggcggggccggaggcgagcaaggactcggggcccgcgcggcgcctctcggggccgggccgccgcctctgcgctcagccccgcaggccgggcatgggtgggggcgccgggccgtcacgatgagcgccctgggcagcccggtccgggcctacgactttctgctcaagttcctgctggtgggcgacagcgacgtgggcaagggcgagatcctggcgagcctgcaggatggcgcggccgagtccccgtacggccacccggcgggcatcgactacaagacgaccaccatcctgctggacgggcggcgggtgaagctgcagctctgggatacttcaggccagggaagattttgtaccatattccgctcctactcccggggcgcacagggtgtgatcctggtctatgacattgcgaaccgctggtcttttgacggcattgatcgatggattaaggagatcgatgagcatgcccccggagtccccaagatcctggtggggaaccgcctgcacctggcgttcaagcggcaggtgcccacggagcaggcccaggcctacgccgagcgcctgggcgtgaccttctttgaggtcagccctctgtgcaatttcaacatcacagagtcgttcacggagctggccaggatcgtgctgctgcggcatgggatggaccggctctggcggccgagcaaggtgctgagcttgcaagacctctgctgccgggcggtcgtgtcctgcacgccggtgcacctggtggacaagctcccgctccccattgccttaagaagccacctcaagtccttctcgatggccaacggcctgaatgccaggatgatgcacggcggttcctactccctcaccaccagctccacccacaaaaggagcagcctccgcaaagtgaagctcgtccgccccccccagagcccccccaaaaactgcaccagaaacagctgcaaaatttcttaaggaaggcactgaaagaaacacggcggaatctctccaggagaagctcggcgttacccccggcagctggtggatgcatctcagatcccggttcctctcggcgaatgctgcttgcgaatgtgtgcgacgccttccgtgtgatggaaacacactaccccgtcggacttcgaatttctacgtggatgtgcatgaagctcttgttttcgatgtgtgtttgtaaagggaaaattagtactctgctcgactcttggtaacatgaaattctgaatgttactttatcatgattgcactgcaactttttccttaaaataactgcttttgtaagaacggtgatattgaatggaattagatttaattcccaagggaattaggacaaaaccatggcaaggggagataaattttaaaagcaccctaatttttcccaagaggggttc

SEQ ID NO: 382651 - DNA, 1273 bp, Homo sapiens
agcgctgggcggcggggcggggccggaggcgagcaaggactcggggcccgcgcggcgcctctcggggccgggccgccgcctctgcgctcagccccgcaggccgggcatgggtgggggcgccgggccgtcacgatgagcgccctgggcagcccggtccgggcctacgactttctgctcaagttcctgctggtgggcgacagcgacgtgggcaagggcgagatcctggcgagcctgcaggatggcgcggccgagtccccgtacggccacccggcgggcatcgactacaagacgaccaccatcctgctggacgggcggcgggtgaagctgcagctctgggatacttcaggccagggaagattttgtaccatattccgctcctactcccggggcgcacagggtgtgatcctggtctatgacattgcgaaccgctggtcttttgacggcattgatcgatggattaaggagatcgatgagcatgcccccggagtccccaagatcctggtggggaaccgcctgcacctggcgttcaagcggcaggtgcccacggagcaggcccaggcctacgccgagcgcctgggcgtgaccttctttgaggtcagccctctgtgcaatttcaacatcacagagtcgttcacggagctggccaggatcgtgctgctgcggcatgggatggaccggctctggcggccgagcaaggtgctgagcttgcaagacctctgctgccgggcggtcgtgtcctgcacgccggtgcacctggtggacaagctcccgctccccattgccttaagaagccacctcaagtccttctcgatggccaacggcctgaatgccaggatgatgcacggcggttcctactccctcaccaccagctccacccacaaaaggagcagcctccgcaaagtgaagctcgtccgccccccccagagcccccccaaaaactgcaccagaaacagctgcaaaatttcttaaggaaggcactgaaagaaacacggcggaatctctccaggagaagctcggcgttacccccggcagctggtggatgcatctcagatcccggttcctctcggcgaatgctgcttgcgaatgtgtgcgacgccttccgtgtgatggaaacacactaccccgtcggacttcgaatttctacgtggatgtgcatgaagctcttgttttcgatgtgtgtttgtaaagggaaaattagtactctgctcgactcttggtacctgaatctgatggtcttatataatggcggagatttccttcgggttgtgggggg

SEQ ID NO: 382652 - DNA, 471 bp, Homo sapiens
  misc_feature (460)..(460): n is a, c, g, or t
ttgataggatgattaaagttaggacacgtaggttaaggtggtttttcttccttgtagtgcacataatgcccctagttatcgagcttgtgtccagctgctcagcagtcttagtgggtatcagtacacacggagagcttggaaaaaagaagcttttgacctctttatggatcccagtttctttcagatggatgcctcttgtgttaatcagtaagttgccctcttatttgtattcagcatgatgcacctcacagtctgatgaaatcagctactcccctggaaagttagaatactgttctttaacagtaacaacataattacatgttgtaatccttatctctttcagttggagagcaattatggacaatctgatgacacatgataaaacaacatttagagatttgatgagtgagtattacgggatgacaatccaagttctttcctgtacatgcctatcaaaagncgagggtaccg

SEQ ID NO: 382653 - DNA, 639 bp, Homo sapiens
taattcattctgcttttttaatgttaggaatgattacatgaaatatcttcttactatcatattccattttgcgtttaactgacctgtgaacagaagttatgatttgagtttttataacttcttactcaagaaccagactcttcatcctcctttataagataattccattttattcaccaaactcagcctccatttgtaatctatgactagcattataaggtcaggctattgagtgtatttaaactggttgtgacctagagcaagcactgcctaaaatctgaacttatatacagagaggtgttagggttaaggtcagactgaaacaaagatagtcttcattatttttacaggttaaagactaatgttcagttgacagccctccataatatgaggtagagacgtacaaggtgaaggaaaaagaactaagagggaaatggagagaccaggctagggagtacatgactgtggtatcagtagttaaactgagaattactgcagttgtattttacttttgagatcccatgtgataaatgggatttcaatagaaaaatttctagattaagaaattgcaggctaggggcggtgactctcgcctgtaatctcagcactttgggaggccgaggcgggcggatcacgaac

SEQ ID NO: 382654 - DNA, 6500 bp, Homo sapiens
tatagcatgtagctttaacattgtgggaccagttgggagatgggacacctcagcatcaccagaagagtgtggaactattttatcaattacataacttagttccttcttctagcatctgtgaggatgttataagtcagcagttaacccataaagataagaaaataaggatggaagcacatgccaagtttgcagttctttggcatctaacgagagatctccatataaataaatcttcatcttttgtacgttcttttgacaggtcactgttcatcatgttagatagccttaacagtctcgatggttctactagctctgtgggacaagcctggctgaaccaagtcctacaaagacatgatattgcacgagttttggaaccattgctattgctcctgcttcatccaaaaactcagagggtttcagtacagcgtgtacaagcagaacgttattggaataagtctccctgttatccaggagaggagagtgacaagcatttcatgcaaaattttgcctgcagcaatgtgagccaagtacaactcatcacatcaaaaggaaatggtgaaaagccacttaccatggatgaaatagagaactttagtctcactgtgaatccattaagtgacagactttccctcctaagtaccagcagtgagacaattccaatggttgtgtctgattttgatcttccagaccaacagatagaaatacttcagagttctgactcgggatgttcacagtcctctgctggggacaacttgagttacgaagttgatcctgaaaccgtgaatgcccaagaggattctcaaatgcccaaggaaagctccccagatgatgatgttcaacaggtagtatttgacctgatatgtaaagttgtaagtggcctcgaagtggaatctgcatcagttacatctcaattagaaattgaagctatgcccccaaagtgcagtgatatagatccagatgaagagacgattaaaattgaagatgactccattcaacagagtcagaatgctttgctgagtaatgaaagttctcagtttctgtctgtgtctgcagagggaggccatgagtgtgtggcaaatggaatctccaggaatagctcctcaccttgtatttcaggaaccacacacactcttcatgactcttctgttgcttccatagaaaccaaatctagacaaaggagtcacagtagtattcaattcagcttcaaagaaaaattatcagaaaaagtttcggagaaggaaacaatagttaaggagtcaggtaaacaaccaggagcaaaacctaaagtaaaacttgccagaaaaaaggatgatgacaagaaaaaatcttcaaatgaaaaactcaaacaaaccagtgtattcttcagtgatggtctggatttagagaactggtatagctgtggagagggagacatttctgaaattgagagtgacatgggttctccaggatctcgaaaatctcccaatttcaacattcatcctctctatcaacatgtgctcctgtatctccagttgtatgattcatccaggactttgtatgctttctctgccatcaaagccatcttgaaaactaaccctatagcttttgtaaatgccatttcaactactagtgtaaataatgcatatactcctcagttgtctctccttcagaatctattggccagacaccggatttctgttatgggcaaagatttttatagtcacattccagtggactcaaatcataacttccggagttctatgtacatagaaattcttatttctctctgcttatattacatgcgtagccattacccaactcatgtcaaggttactgcacaagatttaataggcaatcgaaacatgcaaatgatgagcatagaaattctgacactactcttcactgagctggcaaaagtaatagaaagctcagcgaagggtttccctagttttatttctgatatgttatctaagtgcaaagttcagaaagtgattcttcattgtttgctgtcatctatctttagtgctcagaaatggcatagtgaaaaaatggcaggtaagaacctggttgctgtggaagaaggtttctcagaggacagccttattaatttctcagaggatgaatttgacaatggcagcacgttgcagtcacaacttcttaaggtgcttcagaggctgattgttctagaacacagagtaatgactattcctgaagagaatgaaacaggttttgattttgttgtatctgacttagaacacatcagtccccatcaacccatgacttctcttcagtatttgcatgctcagccaatcacatgtcaaggcatgttcctctgtgcagtgatacgagctttgcatcagcactgtgcatgtaagatgcacccacaatggattggtttaatcacatctactctgccttacatgggaaaagttctgcagagagtggttgtttctgtgacactacaactgtgcagaaatttagataatctaattcagcagtacaaatacgaaacaggattatctgatagtaggcctctgtggatggcatcaattattccaccagatatgattcttactcttttggaagggattacagccattatccattactgtttgttggatccaactacacagtatcaccaacttttggtcagtgtagaccagaaacacttgtttgaagcacgcagtggaatcctctcaatccttcatatgatcatgtcctctgtgacactgctttggagcatactgcatcaagctgattcttcagaaaagatgactattgccgcatccgcatctcttaccactattaatcttggagctacaaagaacttgagacaacagattcttgaattgttgggccccatttcaatgaatcatggtgttcactttatggctgccattgcatttgtgtggaatgaaagaagacagaataaaacaaccaccaggaccaaggtcattcctgcagccagtgaagaacagcttttattagtggaattggttcgttcaatcagtgtcatgagagcagaaactgttatccagactgtaaaagaagttttaaagcagccaccagccatagccaaggacaagaaacatctttctttggaagtctgcatgcttcagtttttctatgcttatattcaaagaattccagtgcccaatttagtggatagctgggcgtcactgttgatacttctgaaagactctatacaactgagtcttccagctccagggcagtttcttatacttggggttctgaatgagtttattatgaaaaaccctagtttggaaaataaaaaagaccaaagagaccttcaggatgtaactcacaaaatagtggatgcaattggtgcaattgctggttcttctctggaacagacaacatggctgcgacgaaatcttgaagttaagccttctcccaaaataatggtagatggaaccaatttggaatctgatgttgaagatatgttatcacctgcaatggaaaccgcaaacataactccttctgtatatagtgtccatgcattgacattactctctgaggttttggctcatcttttggatatggttttctatagtgatgaaaaggagcgggttattcctttacttgtaaatattatgcattatgttgtgccctacctcagaaatcacagtgcacataatgcccctagttatcgagcttgtgtccagctgctcagcagtcttagtgggtatcagtacacacggagagcttggaaaaaagaagcttttgacctctttatggatcccagtttctttcagatggatgcctcttgtgttaatcattggagagcaattatggacaatctgatgacacatgataaaacaacatttagagatttgatgactcgtgtagcagtggctcaaagcagttcacttaatctctttgcaaaccgtgatgtggagctagaacagagagctatgcttcttaaaagattagcatttgctatttttagcagtgaaattgaccagtaccagaaatatcttccagatatacaagagagattggttgagagtctccgtttgccacaggtgccaactctccattctcaagtgttcctgtttttcagagtgttacttttaagaatgtctccccaacatcttacctcactctggcctaccatgattacagaacttgtacaagtatttttactgatggagcaggaactcactgctgatgaagatatttcacggacttcagggccctctgtggctggtctggagacaacgtacacaggaggtaatggcttctctacttcatataacagccagcggtggttaaacctctatctctctgcttgcaaatttttggatttggctctcgcattgccctctgaaaaccttcctcagtttcagatgtaccgatgggcctttattccagaagcctcagatgattcaggtttggaagtcagaaggcagggtatacatcaacgagaatttaaaccttacgtggtacgactagcaaaacttcttcggaaaagagcaaagaaaaatccagaggaagacaactcagggagaacattgggttgggagccagggcacttgctgctcaccatctgcaccgtgcgcagtatggagcagctcctgccgttcttcaatgtgctcagtcaagtcttcaacagcaaagtcacaagccgatgtggaggacactcagggagtcctatcctctactcaaatgccttccctaataaggacatgaaactggagaaccacaaaccatgttccagcaaagccaggcaaaaaatagaagagatggtagaaaaagattttctggaagggatgataaaaacttgagcaccattgctggttccatttagcttacatgtaaatgtaattatttaaaacacacacactgctctgcgttgtatagtttttccttttttgtatgtaacagaacacatttcagattgtatttaatttaaatatttgtatataagagcaaatgtctgaatgtggcctgaatcaagtttaaatattgttggctcatactgattatggtgcctaagagagctatatatatacacatgtaaagtccattgtttttattgtcctgagttgtcttaaacctgcaaaatatacactacccatttttttttccattggtttcagacttggttcaattaagattggttggggatttttctcttttccttattaaccatgttctggtatcagaatggtgttccttctccatcagaggctgggaaacgtattataattagtttttctcccacataccttcaccaagagcagtgaagaataactgaaggctggaccatgcatccttaaaagtattgcatgagcatctccacctcagtatggaagagggatggacaaccccctattcatacctctgagttcctgatggcattagtcatatagtaacaaattccaaagcccttaaataaacggaaaacagaccaaattcttctaaataagaactatcccagcttacttgtgagtctgcttctgcatatactcggacgacatcttctgtaccagagggccggacaaaagctcgagaaagcttgtacttcttcaccaggtcattgattgcctcctgtaatcctgggggtgtaactgcttgtctttcagcatcggtagtgctaataactctcctgtctgcaacctaagtgcaagcatttcatatttgttactctattacacttcctttcagaagcttaacctgttaaacatacattctacgaaaagtgccagactaaatataaaattacattaaaacttctttctccaaggtcagggtaattaatttcaacatttgtgcaacttttctctttttcttcagtctataaagaattacctttggcaaaaaatatttccacaaatgcttagagttaccactaagataatggccagtaaatacgatatgactaagtcccatatcacacacaaaaacaggataagtggtagcccattatataagaagaccgataagaatttcttaaatatgccaaaaataatctgaacaatcagccatttctgtgaactgtggctttagtacctccaattgtctttcacaaattctgttggtgaatgtgtaaactggcataaacatgtacagaaatcaattagcaatttatctgaattctctccctcaggaagtactctgtgaactaaacataatgcagagtaagtactttcacttgaaatgacagggcatctgagttttgcttcaaaataatgttggggccaggtgcagtagctcacacctgtaatcctagcactttgggaggccaagggagaaggatcacctgagctcaggagttcaagaccagcctaggcaacatagtgagatctcgtctctaaataaaatatacaaaagagtattgggagggggtatgaagaatgtatagggcaataattgaaatctgttgaagctgggtacacaaaagttcattatgttgtttctctacatttatatctatttttaatttttttatatctatttttaattttccataataaaatctctttaaaaaagtgaag

SEQ ID NO: 382655 - DNA, 2942 bp, Homo sapiens
ggtcgtggacccgccacagacactcaggcctccgtgctggccggcccccctaggtggtgatgcccatggcatgatgcctgaggccaatgtggatctgatcccccagtatttccttcccttggatgctttcgtgctcccgtctgtccctctgtgccgctgagtacgatgctcttgctgtcaggcatctgggcactgtagagagtgtcgatcgcgcagcaatggattggtttaatcacatctactctgccttacatgggaaaagttctgcagagagtggttgtttctgtgacactacaactgtgcagaaatttagataatctaattcagcagtacaaatacgaaacaggattatctgatagtaggcctctgtggatggcatcaattattccaccagatatgattcttactcttttggaagggattacagccattatccattactgtttgttggatccaactacacagtatcaccaacttttggtcagtgtagaccagaaacacttgtttgaagcacgcagtggaatcctctcaatccttcatatgatcatgtcctctgtgacactgctttggagcatactgcatcaagctgattcttcagaaaagatgactattgccgcatccgcatctcttaccactattaatcttggagctacaaagaacttgagacaacagattcttgaattgttgggccccatttcaatgaatcatggtgttcactttatggctgccattgcatttgtgtggaatgaaagaagacagaataaaacaaccaccaggaccaaggtcattcctgcagccagtgaagaacagcttttattagtggaattggttcgttcaatcagtgtcatgagagcagaaactgttatccagactgtaaaagaagttttaaagcagccaccagccatagccaaggacaagaaacatctttctttggaagtctgcatgcttcagtttttctatgcttatattcaaagaattccagtgcccaatttagtggatagctgggcgtcactgttgatacttctgaaagactctatacaactgagtcttccagctccagggcagtttcttatacttggggttctgaatgagtttattatgaaaaaccctagtttggaaaataaaaaagaccaaagagaccttcaggatgtaactcacaaaatagtggatgcaattggtgcaattgctggttcttctctggaacagacaacatggctgcgacgaaatcttgaagttaagccttctcccaaaataatggtagatggaaccaatttggaatctgatgttgaagatatgttatcacctgcaatggaaaccgcaaacataactccttctgtatatagtgtccatgcattgacattactctctgaggttttggctcatcttttggatatggttttctatagtgatgaaaaggagcgggttattcctttacttgtaaatattatgcattatgttgtgccctacctcagaaatcacagtgcacataatgcccctagttatcgagcttgtgtccagctgctcagcagtcttagtgggtatcagtacacacggagagcttggaaaaaagaagcttttgacctctttatggatcccagtttctttcagatggatgcctcttgtgttaatcattggagagcaattatggacaatctgatgacacatgataaaacaacatttagagatttgatgactcgtgtagcagtggctcaaagcagttcacttaatctctttgcaaaccgtgatgtggagctagaacagagagctatgcttcttaaaagattagcatttgctatttttagcagtgaaattgaccagtaccagaaatatcttccagatatacaagagagattggttgagagtctccgtttgccacaggtgccaactctccattctcaagtgttcctgtttttcagagtgttacttttaagaatgtctccccaacatcttacctcactctggcctaccatgattacagaacttgtacaagtatttttactgatggagcaggaactcactgctgatgaagatatttcacggacttcagggccctctgtggctggtctggagacaacgtacacaggaggtaatggcttctctacttcatataacagccagcggtggttaaacctctatctctctgcttgcaaatttttggatttggctctcgcattgccctctgaaaaccttcctcagtttcagatgtaccgatgggcctttattccagaagcctcagatgattcaggtttggaagtcagaaggcagggtatacatcaacgagaatttaaaccttacgtggtacgactagcaaaacttcttcggaaaagagcaaagaaaaatccagaggaagacaactcagggagaacattgggttgggagccagggcacttgctgctcaccatctgcaccgtgcgcagtatggagcagctcctgccgttcttcaatgtgctcagtcaagtcttcaacagcaaagtcacaagccgatgtggaggacactcagggagtcctatcctctactcaaatgccttccctaataaggacatgaaactggagaaccacaaaccatgttccagcaaagccaggcaaaaaatagaagagatggtagaaaaagattttctggaagggatgataaaaacttgagcaccattgctggttccatttagcttacatgtaaatgtaattatttaaaacacacacactgctctgcgttgtatagtttttccttttttgtatgtaacagaacacatttcagattgtatttaatttaaatatttgtatataagagcaaatgtctgaatgtggcctgaatcaagtttaaatattgttggctcatactgattatggtgcctaagagagctatatatatacacatgtaaagtccattgtttttattgtcctgagttgtcttaaacctgcaaaatatacactacccattttttttt

SEQ ID NO: 382656 - DNA, 3065 bp, Homo sapiens
ttgataggatgattaaagttaggacacgtaggttaaggtggtttttcttccttgtagtgcacataatgcccctagttatcgagcttgtgtccagctgctcagcagtcttagtgggtatcagtacacacggagagcttggaaaaaagaagcttttgacctctttatggatcccagtttctttcagatggatgcctcttgtgttaatcagtaagttgccctcttatttgtattcagcatgatgcacctcacagtctgatgaaatcagctactcccctggaaagttagaatactgttctttaacagtaacaacataattacatgttgtaatccttatctctttcagttggagagcaattatggacaatctgatgacacatgataaaacaacatttagagatttgatgactcgtgtagcagtggctcaaagcagttcacttaatctctttgcaaaccgtgatgtggagctagaacagagagctatgcttcttaaaagattagcatttgctatttttagcagtgaaattgaccagtaccagaaatatcttccagatatacaagagagattggttgagagtctccgtttgccacaggtgccaactctccattctcaagtgttcctgtttttcagagtgttacttttaagaatgtctccccaacatcttacctcactctggcctaccatgattacagaacttgtacaagtatttttactgatggagcaggaactcactgctgatgaagatatttcacggacttcagggccctctgtggctggtctggagacaacgtacacaggaggtaatggcttctctacttcatataacagccagcggtggttaaacctctatctctctgcttgcaaatttttggatttggctctcgcattgccctctgaaaaccttcctcagtttcagatgtaccgatgggcctttattccagaagcctcagatgattcaggtttggaagtcagaaggcagggtatacatcaacgagaatttaaaccttacgtggtacgactagcaaaacttcttcggaaaagagcaaagaaaaatccagaggaagacaactcagggagaacattgggttgggagccagggcacttgctgctcaccatctgcaccgtgcgcagtatggagcagctcctgccgttcttcaatgtgctcagtcaagtcttcaacagcaaagtcacaagccgatgtggaggacactcagggagtcctatcctctactcaaatgccttccctaataaggacatgaaactggagaaccacaaaccatgttccagcaaagccaggcaaaaaatagaagagatggtagaaaaagattttctggaagggatgataaaaacttgagcaccattgctggttccatttagcttacatgtaaatgtaattatttaaaacacacacactgctctgcgttgtatagtttttccttttttgtatgtaacagaacacatttcagattgtatttaatttaaatatttgtatataagagcaaatgtctgaatgtggcctgaatcaagtttaaatattgttggctcatactgattatggtgcctaagagagctatatatatacacatgtaaagtccattgtttttattgtcctgagttgtcttaaacctgcaaaatatacactacccatttttttttccattggtttcagacttggttcaattaagattggttggggatttttctcttttccttattaaccatgttctggtatcagaatggtgttccttctccatcagaggctgggaaacgtattataattagtttttctcccacataccttcaccaagagcagtgaagaataactgaaggctggaccatgcatccttaaaagtattgcatgagcatctccacctcagtatggaagagggatggacaaccccctattcatacctctgagttcctgatggcattagtcatatagtaacaaattccaaagcccttaaataaacggaaaacagaccaaattcttctaaataagaactatcccagcttacttgtgagtctgcttctgcatatactcggacgacatcttctgtaccagagggccggacaaaagctcgagaaagcttgtacttcttcaccaggtcattgattgcctcctgtaatcctgggggtgtaactgcttgtctttcagcatcggtagtgctaataactctcctgtctgcaacctaagtgcaagcatttcatatttgttactctattacacttcctttcagaagcttaacctgttaaacatacattctacgaaaagtgccagactaaatataaaattacattaaaacttctttctccaaggtcagggtaattaatttcaacatttgtgcaacttttctctttttcttcagtctataaagaattacctttggcaaaaaatatttccacaaatgcttagagttaccactaagataatggccagtaaatacgatatgactaagtcccatatcacacacaaaaacaggataagtggtagcccattatataagaagaccgataagaatttcttaaatatgccaaaaataatctgaacaatcagccatttctgtgaactgtggctttagtacctccaattgtctttcacaaattctgttggtgaatgtgtaaactggcataaacatgtacagaaatcaattagcaatttatctgaattctctccctcaggaagtactctgtgaactaaacataatgcagagtaagtactttcacttgaaatgacagggcatctgagttttgcttcaaaataatgttggggccaggtgcagtagctcacacctgtaatcctagcactttgggaggccaagggagaaggatcacctgagctcaggagttcaagaccagcctaggcaacatagtgagatctcgtctctaaataaaatatacaaaagagtattgggagggggtatgaagaatgtatagggcaataattgaaatctgttgaagctgggtacacaaaagttcattatgttgtttctctacatttatatctatttttaatttttttatatctatttttaattttccataataaaatctctttaaaaaagtgaag

SEQ ID NO: 382657 - DNA, 1249 bp, Homo sapiens
gaaagacatagcatgtgtctaacatgggcaagaccatgttacttggaactctggggaagagaggggtgattcttgattttgtttcactaacaaattctaatgaaaaccttttttcatctttcagtaacaaattccaaagcccttaaataaacggaaaacagaccaaattcttctaaataagaactatcccagcttacttgtgagtctgcttctgcatatactcggacgacatcttctgtaccagagggccggacaaaagctcgagaaagcttgtacttcttcaccaggtcattgattgcctcctgtaatcctgggggtgtaactgcttgtctttcagcatcggtagtgctaataactctcctgtctgcaacctaagtgcaagcatttcatatttgttactctattacacttcctttcagaagcttaacctgttaaacatacattctacgaaaagtgccagactaaatataaaattacattaaaacttctttctccaaggtcagggtaattaatttcaacatttgtgcaacttttctctttttcttcagtctataaagaattacctttggcaaaaaatatttccacaaatgcttagagttaccactaagataatggccagtaaatacgatatgactaagtcccatatcacacacaaaaacaggataagtggtagcccattatataagaagaccgataagaatttcttaaatatgccaaaaataatctgaacaatcagccatttctgtgaactgtggctttagtacctccaattgtctttcacaaattctgttggtgaatgtgtaaactggcataaacatgtacagaaatcaattagcaatttatctgaattctctccctcaggaagtactctgtgaactaaacataatgcagagtaagtactttcacttgaaatgacagggcatctgagttttgcttcaaaataatgttggggccaggtgcagtagctcacacctgtaatcctagcactttgggaggccaagggagaaggatcacctgagctcaggagttcaagaccagcctaggcaacatagtgagatctcgtctctaaataaaatatacaaaagagtattgggagggggtatgaagaatgtatagggcaataattgaaatctgttgaagctgggtacacaaaagttcattatgttgtttctctacatttatatctatttttaatttttttatatctatttttaattttccataataaaatctctttaaaaaagtgaag

SEQ ID NO: 382658 - DNA, 4585 bp, Homo sapiens
  misc_feature (4435)..(4435): n is a, c, g, or t
  misc_feature (4534)..(4534): n is a, c, g, or t
tatagcatgtagctttaacattgtgggaccagttgggagatgggacacctcagcatcaccagaagagtgtggaactattttatcaattacataacttagttccttcttctagcatctgtgaggatgttataagtcagcagttaacccataaagataagaaaataaggatggaagcacatgccaagtttgcagttctttggcatctaacgagagatctccatataaataaatcttcatcttttgtacgttcttttgacaggtcactgttcatcatgttagatagccttaacagtctcgatggttctactagctctgtgggacaagcctggctgaaccaagtcctacaaagacatgatattgcacgagttttggaaccattgctattgctcctgcttcatccaaaaactcagagggtttcagtacagcgtgtacaagcagaacgttattggaataagtctccctgttatccaggagaggagagtgacaagcatttcatgcaaaattttgcctgcagcaatgtgagccaagtacaactcatcacatcaaaaggaaatggtgaaaagccacttaccatggatgaaatagagaactttagtctcactgtgaatccattaagtgacagactttccctcctaagtaccagcagtgagacaattccaatggttgtgtctgattttgatcttccagaccaacagatagaaatacttcagagttctgactcgggatgttcacagtcctctgctggggacaacttgagttacgaagttgatcctgaaaccgtgaatgcccaagaggattctcaaatgcccaaggaaagctccccagatgatgatgttcaacaggtagtatttgacctgatatgtaaagttgtaagtggcctcgaagtggaatctgcatcagttacatctcaattagaaattgaagctatgcccccaaagtgcagtgatatagatccagatgaagagacgattaaaattgaagatgactccattcaacagagtcagaatgctttgctgagtaatgaaagttctcagtttctgtctgtgtctgcagagggaggccatgagtgtgtggcaaatggaatctccaggaatagctcctcaccttgtatttcaggaaccacacacactcttcatgactcttctgttgcttccatagaaaccaaatctagacaaaggagtcacagtagtattcaattcagcttcaaagaaaaattatcagaaaaagtttcggagaaggaaacaatagttaaggagtcaggtaaacaaccaggagcaaaacctaaagtaaaacttgccagaaaaaaggatgatgacaagaaaaaatcttcaaatgaaaaactcaaacaaaccagtgtattcttcagtgatggtctggatttagagaactggtatagctgtggagagggagacatttctgaaattgagagtgacatgggttctccaggatctcgaaaatctcccaatttcaacattcatcctctctatcaacatgtgctcctgtatctccagttgtatgattcatccaggactttgtatgctttctctgccatcaaagccatcttgaaaactaaccctatagcttttgtaaatgccatttcaactactagtgtaaataatgcatatactcctcagttgtctctccttcagaatctattggccagacaccggatttctgttatgggcaaagatttttatagtcacattccagtggactcaaatcataacttccggagttctatgtacatagaaattcttatttctctctgcttatattacatgcgtagccattacccaactcatgtcaaggttactgcacaagatttaataggcaatcgaaacatgcaaatgatgagcatagaaattctgacactactcttcactgagctggcaaaagtaatagaaagctcagcgaagggtttccctagttttatttctgatatgttatctaagtgcaaagttcagaaagtgattcttcattgtttgctgtcatctatctttagtgctcagaaatggcatagtgaaaaaatggcaggtaagaacctggttgctgtggaagaaggtttctcagaggacagccttattaatttctcagaggatgaatttgacaatggcagcacgttgcagtcacaacttcttaaggtgcttcagaggctgattgttctagaacacagagtaatgactattcctgaagagaatgaaacaggttttgattttgttgtatctgacttagaacacatcagtccccatcaacccatgacttctcttcagtatttgcatgctcagccaatcacatgtcaaggcatgttcctctgtgcagtgatacgagctttgcatcagcactgtgcatgtaagatgcacccacaatggattggtttaatcacatctactctgccttacatgggaaaagttctgcagagagtggttgtttctgtgacactacaactgtgcagaaatttagataatctaattcagcagtacaaatacgaaacaggattatctgatagtaggcctctgtggatggcatcaattattccaccagatatgattcttactcttttggaagggattacagccattatccattactgtttgttggatccaactacacagtatcaccaacttttggtcagtgtagaccagaaacacttgtttgaagcacgcagtggaatcctctcaatccttcatatgatcatgtcctctgtgacactgctttggagcatactgcatcaagctgattcttcagaaaagatgactattgccgcatccgcatctcttaccactattaatcttggagctacaaagaacttgagacaacagattcttgaattgttgggccccatttcaatgaatcatggtgttcactttatggctgccattgcatttgtgtggaatgaaagaagacagaataaaacaaccaccaggaccaaggtcattcctgcagccagtgaagaacagcttttattagtggaattggttcgttcaatcagtgtcatgagagcagaaactgttatccagactgtaaaagaagttttaaagcagccaccagccatagccaaggacaagaaacatctttctttggaagtctgcatgcttcagtttttctatgcttatattcaaagaattccagtgcccaatttagtggatagctgggcgtcactgttgatacttctgaaagactctatacaactgagtcttccagctccagggcagtttcttatacttggggttctgaatgagtttattatgaaaaaccctagtttggaaaataaaaaagaccaaagagaccttcaggatgtaactcacaaaatagtggatgcaattggtgcaattgctggttcttctctggaacagacaacatggctgcgacgaaatcttgaagttaagccttctcccaaaataatggtagatggaaccaatttggaatctgatgttgaagatatgttatcacctgcaatggaaaccgcaaacataactccttctgtatatagtgtccatgcattgacattactctctgaggttttggctcatcttttggatatggttttctatagtgatgaaaaggagcgggttattcctttacttgtaaatattatgcattatgttgtgccctacctcagaaatcacagtgcacataatgcccctagttatcgagcttgtgtccagctgctcagcagtcttagtgggtatcagtacacacggagagcttggaaaaaagaagcttttgacctctttatggatcccagtttctttcagatggatgcctcttgtgttaatcattggagagcaattatggacaatctgatgacacatgataaaacaacatttagagatttgatgactcgtgtagcagtggctcaaagcagttcacttaatctctttgcaaaccgtgatgtggagctagaacagagagctatgcttcttaaaagattagcatttgctatttttagcagtgaaattgaccagtaccagaaatatcttccagatatacaagagagattggttgagagtctccgtttgccacaggtgccaactctccattctcaagtgttcctgtttttcagagtgttacttttaagaatgtctccccaacatcttacctcactctggcctaccatgattacagaacttgtacaagtatttttactgatggagcaggaactcactgctgatgaagatatttcacggacttcagggccctctgtggctggtctggagacaacgtacacaggaggtaatggcttctctacttcatataacagccagcggtggttaaacctctatctcctcgtgccgaattcggcacgaggagaactagtctccagtttttttttttttttttttgcattaagtggctttattgatgtttcacattcagttattatcaattcttcagttaattgtacaagtatgataaattattttctatttgctgngggaatttaaatgtaaaataaatactacatgtgtggtttaatgaacactcaatgaagcatctcttctgaggtattcctttcaagctggttttaacccanactttttacttccctaggaatagtctattccacacaatggaactgtcttgt

SEQ ID NO: 382659 - DNA, 488 bp, Homo sapiens
ttaattttagatttttctaattttaagtagtctaggttttctaacaaactgaaaatcagtaccttgggatgatgtcagtttcacctcatatgttactcttcattttttatgttttcataggttttggctcatcttttggatatggttttctatagtgatgaaaaggagcgggttattcctttacttgtaaatattatgcattatgttgtgccctacctcagaaatcacaggtactatcattatttaaatagtttttaaaattaattcatagcctgttagaaacaagttctgttcccttattgccatttctagaattatcataaaatggcatttttaccttgaattataattgtttaaaaaaattcatatattatttttcttatggtgctttctatttcatatcttcatgtcactgtcttaggtaaatgtgaacatttatgtataacttgataggatgattaaagttaggacacgtaggttaaggtggt

SEQ ID NO: 382660 - DNA, 651 bp, Homo sapiens
ctgcctttctttggtatgcccatttatactgtttgaatttttcccatggtcggatattacttttacttacttatgaaagacaaaattacaaacaaaaatacaagagaagtgcaaaaaaagcccttagttttcttaaattcgttcaattttttactcctttactatgcaactagggaacatttggccagttatatgttgaaaaatcaagtctttgtcagactgttatgttgcagtacaaagagataagctaaatgaaaacatcttccttttaagaaccttatgcctgttcgctaatgagaaaagaaacatttgttgagtacttgctttggactcatgaaaaaagtaatgatgagtactttacaagttttcatatttattccttacaaccttatgaggtagttaatagtatctttatttactgatgaaggctcagagaggttaagaaacatacccaaagtgacaaggctacgagtggcacatctggcatttgaatttttataagcagtggggtcatgatctttctactacattatgtggcctaatcttagatggcacaaagtctgtcttactgatgctgatgtcattattctatacataggtaccgatgggcctttattccagaagcctcagatgattcaggtttggaagtca

SEQ ID NO: 382661 - DNA, 516 bp, Homo sapiens
ttttgttctttcaatttttttaattaaaaattggcagtaagatacagagtagttgcaacaatgaaaaagcaaaggcagtattcttcttcactacaaaattgatttcttttatttatagaaacatctttctttggaagtctgcatgcttcagtttttctatgcttatattcaaaggtaagattactgatattgatctgtccttactatgttgctagaaacagagaaacattatttatggatatattaatataagtaatgagtgtcttaacgacccagccatgtatatcctacaaacctaaagacctaaggatattgaagattcctagatagtaaaacactgaattgtgataaaatcatttaaacataaatgaaaagttgaacctactctcgaaactatgcatattgccactgaatccattattttggtataggtgaacatacagtaattcattctgcttttttaatgttaggaatgattacatgaaatatcttcttactatcatattccattttgcg

SEQ ID NO: 382662 - DNA, 5089 bp, Homo sapiens
tatagcatgtagctttaacattgtgggaccagttgggagatgggacacctcagcatcaccagaagagtgtggaactattttatcaattacataacttagttccttcttctagcatctgtgaggatgttataagtcagcagttaacccataaagataagaaaataaggatggaagcacatgccaagtttgcagttctttggcatctaacgagagatctccatataaataaatcttcatcttttgtacgttcttttgacaggtcactgttcatcatgttagatagccttaacagtctcgatggttctactagctctgtgggacaagcctggctgaaccaagtcctacaaagacatgatattgcacgagttttggaaccattgctattgctcctgcttcatccaaaaactcagagggtttcagtacagcgtgtacaagcagaacgttattggaataagtctccctgttatccaggagaggagagtgacaagcatttcatgcaaaattttgcctgcagcaatgtgagccaagtacaactcatcacatcaaaaggaaatggtgaaaagccacttaccatggatgaaatagagaactttagtctcactgtgaatccattaagtgacagactttccctcctaagtaccagcagtgagacaattccaatggttgtgtctgattttgatcttccagaccaacagatagaaatacttcagagttctgactcgggatgttcacagtcctctgctggggacaacttgagttacgaagttgatcctgaaaccgtgaatgcccaagaggattctcaaatgcccaaggaaagctccccagatgatgatgttcaacaggtagtatttgacctgatatgtaaagttgtaagtggcctcgaagtggaatctgcatcagttacatctcaattagaaattgaagctatgcccccaaagtgcagtgatatagatccagatgaagagacgattaaaattgaagatgactccattcaacagagtcagaatgctttgctgagtaatgaaagttctcagtttctgtctgtgtctgcagagggaggccatgagtgtgtggcaaatggaatctccaggaatagctcctcaccttgtatttcaggaaccacacacactcttcatgactcttctgttgcttccatagaaaccaaatctagacaaaggagtcacagtagtattcaattcagcttcaaagaaaaattatcagaaaaagtttcggagaaggaaacaatagttaaggagtcaggtaaacaaccaggagcaaaacctaaagtaaaacttgccagaaaaaaggatgatgacaagaaaaaatcttcaaatgaaaaactcaaacaaaccagtgtattcttcagtgatggtctggatttagagaactggtatagctgtggagagggagacatttctgaaattgagagtgacatgggttctccaggatctcgaaaatctcccaatttcaacattcatcctctctatcaacatgtgctcctgtatctccagttgtatgattcatccaggactttgtatgctttctctgccatcaaagccatcttgaaaactaaccctatagcttttgtaaatgccatttcaactactagtgtaaataatgcatatactcctcagttgtctctccttcagaatctattggccagacaccggatttctgttatgggcaaagatttttatagtcacattccagtggactcaaatcataacttccggagttctatgtacatagaaattcttatttctctctgcttatattacatgcgtagccattacccaactcatgtcaaggttactgcacaagatttaataggcaatcgaaacatgcaaatgatgagcatagaaattctgacactactcttcactgagctggcaaaagtaatagaaagctcagcgaagggtttccctagttttatttctgatatgttatctaagtgcaaagttcagaaagtgattcttcattgtttgctgtcatctatctttagtgctcagaaatggcatagtgaaaaaatggcaggtaagaacctggttgctgtggaagaaggtttctcagaggacagccttattaatttctcagaggatgaatttgacaatggcagcacgttgcagtcacaacttcttaaggtgcttcagaggctgattgttctagaacacagagtaatgactattcctgaagagaatgaaacaggttttgattttgttgtatctgacttagaacacatcagtccccatcaacccatgacttctcttcagtatttgcatgctcagccaatcacatgtcaaggcatgttcctctgtgcagtgatacgagctttgcatcagcactgtgcatgtaagatgcacccacaatggattggtttaatcacatctactctgccttacatgggaaaagttctgcagagagtggttgtttctgtgacactacaactgtgcagaaatttagataatctaattcagcagtacaaatacgaaacaggattatctgatagtaggcctctgtggatggcatcaattattccaccagatatgattcttactcttttggaagggattacagccattatccattactgtttgttggatccaactacacagtatcaccaacttttggtcagtgtagaccagaaacacttgtttgaagcacgcagtggaatcctctcaatccttcatatgatcatgtcctctgtgacactgctttggagcatactgcatcaagctgattcttcagaaaagatgactattgccgcatccgcatctcttaccactattaatcttggagctacaaagaacttgagacaacagattcttgaattgttgggccccatttcaatgaatcatggtgttcactttatggctgccattgcatttgtgtggaatgaaagaagacagaataaaacaaccaccaggaccaaggtcattcctgcagccagtgaagaacagcttttattagtggaattggttcgttcaatcagtgtcatgagagcagaaactgttatccagactgtaaaagaagttttaaagcagccaccagccatagccaaggacaagaaacatctttctttggaagtctgcatgcttcagtttttctatgcttatattcaaagaattccagtgcccaatttagtggatagctgggcgtcactgttgatacttctgaaagactctatacaactgagtcttccagctccagggcagtttcttatacttggggttctgaatgagtttattatgaaaaaccctagtttggaaaataaaaaagaccaaagagaccttcaggatgtaactcacaaaatagtggatgcaattggtgcaattgctggttcttctctggaacagacaacatggctgcgacgaaatcttgaagttaagccttctcccaaaataatggtagatggaaccaatttggaatctgatgttgaagatatgttatcacctgcaatggaaaccgcaaacataactccttctgtatatagtgtccatgcattgacattactctctgaggttttggctcatcttttggatatggttttctatagtgatgaaaaggagcgggttattcctttacttgtaaatattatgcattatgttgtgccctacctcagaaatcacagtgcacataatgcccctagttatcgagcttgtgtccagctgctcagcagtcttagtgggtatcagtacacacggagagcttggaaaaaagaagcttttgacctctttatggatcccagtttctttcagatggatgcctcttgtgttaatcattggagagcaattatggacaatctgatgacacatgataaaacaacatttagagatttgatgactcgtgtagcagtggctcaaagcagttcacttaatctctttgcaaaccgtgatgtggagctagaacagagagctatgcttcttaaaagattagcatttgctatttttagcagtgaaattgaccagtaccagaaatatcttccagatatacaagagagattggttgagagtctccgtttgccacaggtgccaactctccattctcaagtgttcctgtttttcagagtgttacttttaagaatgtctccccaacatcttacctcactctggcctaccatgattacagaacttgtacaagtatttttactgatggagcaggaactcactgctgatgaagatatttcacggacttcagggccctctgtggctggtctggagacaacgtacacaggaggtaatggcttctctacttcatataacagccagcggtggttaaacctctatctctctgcttgcaaatttttggatttggctctcgcattgccctctgaaaaccttcctcagtttcagatgtaccgatgggcctttattccagaagcctcagatgattcaggtttggaagtcagaaggcagggtatacatcaacgagaatttaaaccttacgtggtacgactagcaaaacttcttcggaaaagagcaaagaaaaatccagaggaagacaactcagggagaacattgggttgggagccagggcacttgctgctcaccatctgcaccgtgcgcagtatggagcagctcctgccgttcttcaatgtgctcagtcaagtcttcaacagcaaagtcacaagccgatgtggaggacactcagggagtcctatcctctactcaaatgccttccctaataaggacatgaaactggagaaccacaaaccatgttccagcaaagccaggcaaaaaatagaagagatggtagaaaaagattttctggaagggatgataaaaacttgagcaccattgctggttccatttagcttacatgtaaatgtaattatttaaaacacacacactgctctgcgttgtatagtttttccttttttgtatgtaacagaacacatttcagattgtatttaatttaaatatttgtatataagagcaaatgtctgaatgtggcctgaatcaagtttaaatattgttggctcatactgattatggtgcctaagagagctatatatatacacatgtaaagtccattgtttttattgtcctgagttgtcttaaacctgcaaaatatacactacccattttttttt

SEQ ID NO: 382663 - DNA, 4984 bp, Homo sapiens
tatagcatgtagctttaacattgtgggaccagttgggagatgggacacctcagcatcaccagaagagtgtggaactattttatcaattacataacttagttccttcttctagcatctgtgaggatgttataagtcagcagttaacccataaagataagaaaataaggatggaagcacatgccaagtttgcagttctttggcatctaacgagagatctccatataaataaatcttcatcttttgtacgttcttttgacaggtcactgttcatcatgttagatagccttaacagtctcgatggttctactagctctgtgggacaagcctggctgaaccaagtcctacaaagacatgatattgcacgagttttggaaccattgctattgctcctgcttcatccaaaaactcagagggtttcagtacagcgtgtacaagcagaacgttattggaataagtctccctgttatccaggagaggagagtgacaagcatttcatgcaaaattttgcctgcagcaatgtgagccaagtacaactcatcacatcaaaaggaaatggtgaaaagccacttaccatggatgaaatagagaactttagtctcactgtgaatccattaagtgacagactttccctcctaagtaccagcagtgagacaattccaatggttgtgtctgattttgatcttccagaccaacagatagaaatacttcagagttctgactcgggatgttcacagtcctctgctggggacaacttgagttacgaagttgatcctgaaaccgtgaatgcccaagaggattctcaaatgcccaaggaaagctccccagatgatgatgttcaacaggtagtatttgacctgatatgtaaagttgtaagtggcctcgaagtggaatctgcatcagttacatctcaattagaaattgaagctatgcccccaaagtgcagtgatatagatccagatgaagagacgattaaaattgaagatgactccattcaacagagtcagaatgctttgctgagtaatgaaagttctcagtttctgtctgtgtctgcagagggaggccatgagtgtgtggcaaatggaatctccaggaatagctcctcaccttgtatttcaggaaccacacacactcttcatgactcttctgttgcttccatagaaaccaaatctagacaaaggagtcacagtagtattcaattcagcttcaaagaaaaattatcagaaaaagtttcggagaaggaaacaatagttaaggagtcaggtaaacaaccaggagcaaaacctaaagtaaaacttgccagaaaaaaggatgatgacaagaaaaaatcttcaaatgaaaaactcaaacaaaccagtgtattcttcagtgatggtctggatttagagaactggtatagctgtggagagggagacatttctgaaattgagagtgacatgggttctccaggatctcgaaaatctcccaatttcaacattcatcctctctatcaacatgtgctcctgtatctccagttgtatgattcatccaggactttgtatgctttctctgccatcaaagccatcttgaaaactaaccctatagcttttgtaaatgccatttcaactactagtgtaaataatgcatatactcctcagttgtctctccttcagaatctattggccagacaccggatttctgttatgggcaaagatttttatagtcacattccagtggactcaaatcataacttccggagttctatgtacatagaaattcttatttctctctgcttatattacatgcgtagccattacccaactcatgtcaaggttactgcacaagatttaataggcaatcgaaacatgcaaatgatgagcatagaaattctgacactactcttcactgagctggcaaaagtaatagaaagctcagcgaagggtttccctagttttatttctgatatgttatctaagtgcaaagttcagaaagtgattcttcattgtttgctgtcatctatctttagtgctcagaaatggcatagtgaaaaaatggcaggtaagaacctggttgctgtggaagaaggtttctcagaggacagccttattaatttctcagaggatgaatttgacaatggcagcacgttgcagtcacaacttcttaaggtgcttcagaggctgattgttctagaacacagagtaatgactattcctgaagagaatgaaacaggttttgattttgttgtatctgacttagaacacatcagtccccatcaacccatgacttctcttcagtatttgcatgctcagccaatcacatgtcaaggcatgttcctctgtgcagtgatacgagctttgcatcagcactgtgcatgtaagatgcacccacaatggattggtttaatcacatctactctgccttacatgggaaaagttctgcagagagtggttgtttctgtgacactacaactgtgcagaaatttagataatctaattcagcagtacaaatacgaaacaggattatctgatagtaggcctctgtggatggcatcaattattccaccagatatgattcttactcttttggaagggattacagccattatccattactgtttgttggatccaactacacagtatcaccaacttttggtcagtgtagaccagaaacacttgtttgaagcacgcagtggaatcctctcaatccttcatatgatcatgtcctctgtgacactgctttggagcatactgcatcaagctgattcttcagaaaagatgactattgccgcatccgcatctcttaccactattaatcttggagctacaaagaacttgagacaacagattcttgaattgttgggccccatttcaatgaatcatggtgttcactttatggctgccattgcatttgtgtggaatgaaagaagacagaataaaacaaccaccaggaccaaggtcattcctgcagccagtgaagaacagcttttattagtggaattggttcgttcaatcagtgtcatgagagcagaaactgttatccagactgtaaaagaagttttaaagcagccaccagccatagccaaggacaagaaacatctttctttggaagtctgcatgcttcagtttttctatgcttatattcaaagggttctgaatgagtttattatgaaaaaccctagtttggaaaataaaaaagaccaaagagaccttcaggatgtaactcacaaaatagtggatgcaattggtgcaattgctggttcttctctggaacagacaacatggctgcgacgaaatcttgaagttaagccttctcccaaaataatggtagatggaaccaatttggaatctgatgttgaagatatgttatcacctgcaatggaaaccgcaaacataactccttctgtatatagtgtccatgcattgacattactctctgaggttttggctcatcttttggatatggttttctatagtgatgaaaaggagcgggttattcctttacttgtaaatattatgcattatgttgtgccctacctcagaaatcacagtgcacataatgcccctagttatcgagcttgtgtccagctgctcagcagtcttagtgggtatcagtacacacggagagcttggaaaaaagaagcttttgacctctttatggatcccagtttctttcagatggatgcctcttgtgttaatcattggagagcaattatggacaatctgatgacacatgataaaacaacatttagagatttgatgactcgtgtagcagtggctcaaagcagttcacttaatctctttgcaaaccgtgatgtggagctagaacagagagctatgcttcttaaaagattagcatttgctatttttagcagtgaaattgaccagtaccagaaatatcttccagatatacaagagagattggttgagagtctccgtttgccacaggtgccaactctccattctcaagtgttcctgtttttcagagtgttacttttaagaatgtctccccaacatcttacctcactctggcctaccatgattacagaacttgtacaagtatttttactgatggagcaggaactcactgctgatgaagatatttcacggacttcagggccctctgtggctggtctggagacaacgtacacaggaggtaatggcttctctacttcatataacagccagcggtggttaaacctctatctctctgcttgcaaatttttggatttggctctcgcattgccctctgaaaaccttcctcagtttcagatgtaccgatgggcctttattccagaagcctcagatgattcaggtttggaagtcagaaggcagggtatacatcaacgagaatttaaaccttacgtggtacgactagcaaaacttcttcggaaaagagcaaagaaaaatccagaggaagacaactcagggagaacattgggttgggagccagggcacttgctgctcaccatctgcaccgtgcgcagtatggagcagctcctgccgttcttcaatgtgctcagtcaagtcttcaacagcaaagtcacaagccgatgtggaggacactcagggagtcctatcctctactcaaatgccttccctaataaggacatgaaactggagaaccacaaaccatgttccagcaaagccaggcaaaaaatagaagagatggtagaaaaagattttctggaagggatgataaaaacttgagcaccattgctggttccatttagcttacatgtaaatgtaattatttaaaacacacacactgctctgcgttgtatagtttttccttttttgtatgtaacagaacacatttcagattgtatttaatttaaatatttgtatataagagcaaatgtctgaatgtggcctgaatcaagtttaaatattgttggctcatactgattatggtgcctaagagagctatatatatacacatgtaaagtccattgtttttattgtcctgagttgtcttaaacctgcaaaatatacactacccattttttttt

SEQ ID NO: 382664 - DNA, 5830 bp, Homo sapiens
tatagcatgtagctttaacattgtgggaccagttgggagatgggacacctcagcatcaccagaagagtgtggaactattttatcaattacataacttagttccttcttctagcatctgtgaggatgttataagtcagcagttaacccataaagataagaaaataaggatggaagcacatgccaagtttgcagttctttggcatctaacgagagatctccatataaataaatcttcatcttttgtacgttcttttgacaggtcactgttcatcatgttagatagccttaacagtctcgatggttctactagctctgtgggacaagcctggctgaaccaagtcctacaaagacatgatattgcacgagttttggaaccattgctattgctcctgcttcatccaaaaactcagagggtttcagtacagcgtgtacaagcagaacgttattggaataagtctccctgttatccaggagaggagagtgacaagcatttcatgcaaaattttgcctgcagcaatgtgagccaagtacaactcatcacatcaaaaggaaatggtgaaaagccacttaccatggatgaaatagagaactttagtctcactgtgaatccattaagtgacagactttccctcctaagtaccagcagtgagacaattccaatggttgtgtctgattttgatcttccagaccaacagatagaaatacttcagagttctgactcgggatgttcacagtcctctgctggggacaacttgagttacgaagttgatcctgaaaccgtgaatgcccaagaggattctcaaatgcccaaggaaagctccccagatgatgatgttcaacaggtagtatttgacctgatatgtaaagttgtaagtggcctcgaagtggaatctgcatcagttacatctcaattagaaattgaagctatgcccccaaagtgcagtgatatagatccagatgaagagacgattaaaattgaagatgactccattcaacagagtcagaatgctttgctgagtaatgaaagttctcagtttctgtctgtgtctgcagagggaggccatgagtgtgtggcaaatggaatctccaggaatagctcctcaccttgtatttcaggaaccacacacactcttcatgactcttctgttgcttccatagaaaccaaatctagacaaaggagtcacagtagtattcaattcagcttcaaagaaaaattatcagaaaaagtttcggagaaggaaacaatagttaaggagtcaggtaaacaaccaggagcaaaacctaaagtaaaacttgccagaaaaaaggatgatgacaagaaaaaatcttcaaatgaaaaactcaaacaaaccagtgtattcttcagtgatggtctggatttagagaactggtatagctgtggagagggagacatttctgaaattgagagtgacatgggttctccaggatctcgaaaatctcccaatttcaacattcatcctctctatcaacatgtgctcctgtatctccagttgtatgattcatccaggactttgtatgctttctctgccatcaaagccatcttgaaaactaaccctatagcttttgtaaatgccatttcaactactagtgtaaataatgcatatactcctcagttgtctctccttcagaatctattggccagacaccggatttctgttatgggcaaagatttttatagtcacattccagtggactcaaatcataacttccggagttctatgtacatagaaattcttatttctctctgcttatattacatgcgtagccattacccaactcatgtcaaggttactgcacaagatttaataggcaatcgaaacatgcaaatgatgagcatagaaattctgacactactcttcactgagctggcaaaagtaatagaaagctcagcgaagggtttccctagttttatttctgatatgttatctaagtgcaaagttcagaaagtgattcttcattgtttgctgtcatctatctttagtgctcagaaatggcatagtgaaaaaatggcaggtaagaacctggttgctgtggaagaaggtttctcagaggacagccttattaatttctcagaggatgaatttgacaatggcagcacgttgcagtcacaacttcttaaggtgcttcagaggctgattgttctagaacacagagtaatgactattcctgaagagaatgaaacaggttttgattttgttgtatctgacttagaacacatcagtccccatcaacccatgacttctcttcagtatttgcatgctcagccaatcacatgtcaaggcatgttcctctgtgcagtgatacgagctttgcatcagcactgtgcatgtaagatgcacccacaatggattggtttaatcacatctactctgccttacatgggaaaagttctgcagagagtggttgtttctgtgacactacaactgtgcagaaatttagataatctaattcagcagtacaaatacgaaacaggattatctgatagtaggcctctgtggatggcatcaattattccaccagatatgattcttactcttttggaagggattacagccattatccattactgtttgttggatccaactacacagtatcaccaacttttggtcagtgtagaccagaaacacttgtttgaagcacgcagtggaatcctctcaatccttcatatgatcatgtcctctgtgacactgctttggagcatactgcatcaagctgattcttcagaaaagatgactattgccgcatccgcatctcttaccactattaatcttggagctacaaagaacttgagacaacagattcttgaattgttgggccccatttcaatgaatcatggtgttcactttatggctgccattgcatttgtgtggaatgaaagaagacagaataaaacaaccaccaggaccaaggtcattcctgcagccagtgaagaacagcttttattagtggaattggttcgttcaatcagtgtcatgagagcagaaactgttatccagactgtaaaagaagttttaaagcagccaccagccatagccaaggacaagaaacatctttctttggaagtctgcatgcttcagtttttctatgcttatattcaaagaattccagtgcccaatttagtggatagctgggcgtcactgttgatacttctgaaagactctatacaactgagtcttccagctccagggcagtttcttatacttggggttctgaatgagtttattatgaaaaaccctagtttggaaaataaaaaagaccaaagagaccttcaggatgtaactcacaaaatagtggatgcaattggtgcaattgctggttcttctctggaacagacaacatggctgcgacgaaatcttgaagttaagccttctcccaaaataatggtagatggaaccaatttggaatctgatgttgaagatatgttatcacctgcaatggaaaccgcaaacataactccttctgtatatagtgtccatgcattgacattactctctgaggttttggctcatcttttggatatggttttctatagtgatgaaaaggagcgggttattcctttacttgtaaatattatgcattatgttgtgccctacctcagaaatcacagtgcacataatgcccctagttatcgagcttgtgtccagctgctcagcagtcttagtgggtatcagtacacacggagagcttggaaaaaagaagcttttgacctctttatggatcccagtttctttcagatggatgcctcttgtgttaatcattggagagcaattatggacaatctgatgacacatgataaaacaacatttagagatttgatgactcgtgtagcagtggctcaaagcagttcacttaatctctttgcaaaccgtgatgtggagctagaacagagagctatgcttcttaaaagattagcatttgctatttttagcagtgaaattgaccagtaccagaaatatcttccagatatacaagagagattggttgagagtctccgtttgccacaggtgccaactctccattctcaagtgttcctgtttttcagagtgttacttttaagaatgtctccccaacatcttacctcactctggcctaccatgattacagaacttgtacaagtatttttactgatggagcaggaactcactgctgatgaagatatttcacggacttcagggccctctgtggctggtctggagacaacgtacacaggaggtaatggcttctctacttcatataacagccagcggtggttaaacctctatctctctgcttgcaaatttttggatttggctctcgcattgccctctgaaaaccttcctcagtttcagatgtaccgatgggcctttattccagaagcctcagatgattcaggtttggaagtcagaaggcagggtatacatcaacgagaatttaaaccttacgtggtacgactagcaaaacttcttcggaaaagagcaaagaaaaatccagaggaagacaactcagggagaacattgggttgggagccagggcacttgctgctcaccatctgcaccgtgcgcagtatggagcagctcctgccgttcttcaatgtgctcagtcaagtcttcaacagcaaagtcacaagccgatgtggaggacactcagggagtcctatcctctactcaaatgccttccctaataaggacatgaaactggagaaccacaaaccatgttccagcaaagccaggcaaaaaatagaagagatggtagaaaaagattttctggaagggatgataaaaacttgagcaccattgctggttccatttagcttacatgtaaatgtaattatttaaaacacacacactgctctgcgttgtatagtttttccttttttgtatgtaacagaacacatttcagattgtatttaatttaaatatttgtatataagagcaaatgtctgaatgtggcctgaatcaagtttaaatattgttggctcatactgattatggtgcctaagagagctatatatatacacatgtaaagtccattgtttttattgtcctgagttgtcttaaacctgcaaaatatacactacccatttttttttccattggtttcagacttggttcaattaagattggttggggatttttctcttttccttattaaccatgttctggtatcagaatggtgttccttctccatcagaggctgggaaacgtattataattagtttttctcccacataccttcaccaagagcagtgaagaataactgaaggctggaccatgcatccttaaaagtattgcatgagcatctccacctcagtatggaagagggatggacaaccccctattcatacctctgagttcctgatggcattagtcatatagtaacaaattccaaagcccttaaataaacggaaaacagaccaaattcttctaaataagaactatcccagcttacttgtgagtctgcttctgcatatactcggacgacatcttctgtaccagagggccggacaaaagctcgagaaagcttgtacttcttcaccaggtcattgattgcctcctgtaatcctagcactttgggaggccaagggagaaggatcacctgagctcaggagttcaagaccagcctaggcaacatagtgagatctcgtctctaaataaaatatacaaaagagtattgggagggggtatgaagaatgtatagggcaataattgaaatctgttgaagctgggtacacaaaagttcattatgttgtttctctacatttatatctatttttaatttttttatatctatttttaattttccataataaaatctctttaaaaaagtgaag

SEQ ID NO: 382665 - DNA, 4912 bp, Homo sapiens
tatagcatgtagctttaacattgtgggaccagttgggagatgggacacctcagcatcaccagaagagtgtggaactattttatcaattacataacttagttccttcttctagcatctgtgaggatgttataagtcagcagttaacccataaagataagaaaataaggatggaagcacatgccaagtttgcagttctttggcatctaacgagagatctccatataaataaatcttcatcttttgtacgttcttttgacaggtcactgttcatcatgttagatagccttaacagtctcgatggttctactagctctgtgggacaagcctggctgaaccaagtcctacaaagacatgatattgcacgagttttggaaccattgctattgctcctgcttcatccaaaaactcagagggtttcagtacagcgtgtacaagcagaacgttattggaataagtctccctgttatccaggagaggagagtgacaagcatttcatgcaaaattttgcctgcagcaatgtgagccaagtacaactcatcacatcaaaaggaaatggtgaaaagccacttaccatggatgaaatagagaactttagtctcactgtgaatccattaagtgacagactttccctcctaagtaccagcagtgagacaattccaatggttgtgtctgattttgatcttccagaccaacagatagaaatacttcagagttctgactcgggatgttcacagtcctctgctggggacaacttgagttacgaagttgatcctgaaaccgtgaatgcccaagaggattctcaaatgcccaaggaaagctccccagatgatgatgttcaacaggtagtatttgacctgatatgtaaagttgtaagtggcctcgaagtggaatctgcatcagttacatctcaattagaaattgaagctatgcccccaaagtgcagtgatatagatccagatgaagagacgattaaaattgaagatgactccattcaacagagtcagaatgctttgctgagtaatgaaagttctcagtttctgtctgtgtctgcagagggaggccatgagtgtgtggcaaatggaatctccaggaatagctcctcaccttgtatttcaggaaccacacacactcttcatgactcttctgttgcttccatagaaaccaaatctagacaaaggagtcacagtagtattcaattcagcttcaaagaaaaattatcagaaaaagtttcggagaaggaaacaatagttaaggagtcaggtaaacaaccaggagcaaaacctaaagtaaaacttgccagaaaaaaggatgatgacaagaaaaaatcttcaaatgaaaaactcaaacaaaccagtgtattcttcagtgatggtctggatttagagaactggtatagctgtggagagggagacatttctgaaattgagagtgacatgggttctccaggatctcgaaaatctcccaatttcaacattcatcctctctatcaacatgtgctcctgtatctccagttgtatgattcatccaggactttgtatgctttctctgccatcaaagccatcttgaaaactaaccctatagcttttgtaaatgccatttcaactactagtgtaaataatgcatatactcctcagttgtctctccttcagaatctattggccagacaccggatttctgttatgggcaaagatttttatagtcacattccagtggactcaaatcataacttccggagttctatgtacatagaaattcttatttctctctgcttatattacatgcgtagccattacccaactcatgtcaaggttactgcacaagatttaataggcaatcgaaacatgcaaatgatgagcatagaaattctgacactactcttcactgagctggcaaaagtaatagaaagctcagcgaagggtttccctagttttatttctgatatgttatctaagtgcaaagttcagaaagtgattcttcattgtttgctgtcatctatctttagtgctcagaaatggcatagtgaaaaaatggcaggtaagaacctggttgctgtggaagaaggtttctcagaggacagccttattaatttctcagaggatgaatttgacaatggcagcacgttgcagtcacaacttcttaaggtgcttcagaggctgattgttctagaacacagagtaatgactattcctgaagagaatgaaacaggttttgattttgttgtatctgacttagaacacatcagtccccatcaacccatgacttctcttcagtatttgcatgctcagccaatcacatgtcaaggcatgttcctctgtgcagtgatacgagctttgcatcagcactgtgcatgtaagatgcacccacaatggattggtttaatcacatctactctgccttacatgggaaaagttctgcagagagtggttgtttctgtgacactacaactgtgcagaaatttagataatctaattcagcagtacaaatacgaaacaggattatctgatagtaggcctctgtggatggcatcaattattccaccagatatgattcttactcttttggaagggattacagccattatccattactgtttgttggatccaactacacagtatcaccaacttttggtcagtgtagaccagaaacacttgtttgaagcacgcagtggaatcctctcaatccttcatatgatcatgtcctctgtgacactgctttggagcatactgcatcaagctgattcttcagaaaagatgactattgccgcatccgcatctcttaccactattaatcttggagctacaaagaacttgagacaacagattcttgaattgttgggccccatttcaatgaatcatggtgttcactttatggctgccattgcatttgtgtggaatgaaagaagacagaataaaacaaccaccaggaccaaggtcattcctgcagccagtgaagaacagcttttattagtggaattggttcgttcaatcagtgtcatgagagcagaaactgttatccagactgtaaaagaagttttaaagcagccaccagccatagccaaggacaagaaacatctttctttggaagtctgcatgcttcagtttttctatgcttatattcaaagggttctgaatgagtttattatgaaaaaccctagtttggaaaataaaaaagaccaaagagaccttcaggatgtaactcacaaaatagtggatgcaattggtgcaattgctggttcttctctggaacagacaacatggctgcgacgaaatcttgaagttaagccttctcccaaaataatggtagatggaaccaatttggaatctgatgttgaagatatgttatcacctgcaatggaaaccgcaaacataactccttctgtatatagtgtccatgcattgacattactctctgaggttttggctcatcttttggatatggttttctatagtgatgaaaaggagcgggttattcctttacttgtaaatattatgcattatgttgtgccctacctcagaaatcacagtgcacataatgcccctagttatcgagcttgtgtccagctgctcagcagtcttagtgggtatcagtacacacggagagcttggaaaaaagaagcttttgacctctttatggatcccagtttctttcagatggatgcctcttgtgttaatcagtaagttgccctcttatttgtattcagcatgatgcacctcacagtctgatgaaatcagctactcccctggaaagttagaatactgttctttaacagtaacaacataattacatgttgtaatccttatctctttcagttggagagcaattatggacaatctgatgacacatgataaaacaacatttagagatttgatgagtgagtattacgggatgacaatccaagttctttcctgtacatggttccttcttactatttacttgtactcttttctggagactaggagactactgaattagctctttgtcaagtgtcagtggggatatgtgctctagggaaagcacactactttctgtacgctatgggaatataatcttaaaatttacagaggacaacttaagtgataagtaataagtaaaactatttgtccttttgcagcaactagtggagggaagggtccatgtctaatttgaatctaaattatttcctcagtacacagcatcatacccagcacataataatagcactcaataaataattattcagtgaatgagagactgacagatggtgaagtgcaaaaggcaggcagtcgaatccagcctatcagacaagtcactttaaatctctggggctctgtttatttcatctgaaggaagaaagaggggtgccaagaagggcagaatcaccccccaccccctctttctactcttgattgtttttatagtttaggattccatttagaatttcatctgaaaaaaaagagttttaaaaaacgtttgaaagttattaaatagcagtaacattgtatgattctgtaatattttttaacaaattctttagctaaagctacagttttctcatttggaaaaagggcaggatatctgttttatcttcataaggttgttttaaggttcagatttatccattcaacaaatttttattaaaagacaacagtgggccacgcattgcgctaaccttaatcaaattttaaaagttgtgaaggaaatagggcaatgtgtgatggattttaaataacagctaaatagctcatatacaaggtgaaactaaagaagccaaccatgagaaggcctagggtcaaaatattccaggaatagggaacaagaattacaaaggttggctgggtgcagtggctcacgcctgtaatcctagcactttgacaggccaaggcactaggattgtttgaggccaggagtttgagactaacctggacaaaatagc

SEQ ID NO: 382666 - DNA, 234 bp, Homo sapiens
actacgtgaaagccaaataacactagatttgaaaataaattcctgaaaaaaatgtgaaacattaaaattcatatgagaatcagaaaatcgacacaaaccaacagctattaaagaaattgaagtgttactcaaagtcctctccagaaaaaagatctaggcctaaatggtcacataggggaggtcttccaaactttcaaggaacagataatcccagtctaaaatgatcctgaaaaa

SEQ ID NO: 382667 - DNA, 549 bp, Homo sapiens
agtaatctatagataatttatacaggaggatatatgtgggttatgtgcaaatactatatcattttatattagagacctgagaggattttggtactggtcgtggtcctagagccaatccccctcggatactgaggtatgcctgtatttatctgatatgtttagcttttagtgtctgccttccctagtagaagctgggatttttgtctgttttgttcaactgatgtatcccaagtccctagaataaatgaaaaatttaaaaattccctgagattaaaaaaaactaaagcaacaaaaaatgaccaattttttttattttaaattttctcttggtttctgtttcagttaaccataagatctttatctacatcataccataagcattttgattttccagttactgtgagtacagtgatgaccatttacttgacttttaatgcagttttttgaccaatgatacgctacaatcctatttcactgaatgagaataacatgatagagtagaggaaggttacataaagactattaattctaaaaatttcctagaacaaa

SEQ ID NO: 382668 - DNA, 1085 bp, Homo sapiens
aataggggtggggagtggtatgtacttcaaattactgaaatcttcctagtagaattcctttttaaatgtttgaactcccctggtacatcttaaacacgacattgacactgcaagtgcttggatgtcctggcacctcagaacacaactttgtgcaaaaggagtgctgtgcatctgaatagtgcaattcatttccaatgcaagaatgccagtttcttagggcccccggtcaggatattacccacttggtttaagttgtgatttcaaatcccattttctatgggagatacactggtggaacaaatctgcagagggccctgcacctgcgctggtggatcaacggtgtcttctcacctccagggctagctgccttgccttccctcgtggggcttaagtggctgggaagcagatagacagtgtagatgaagtcctgggccactggctgctggactgaggcagtgagatgactgggctggcatttgttctttctctgcctgtgtgtgacctctaactatgtgcctggaaactgaattacatgtaattaatgctgcaaacaggattttcttattgcctaagcatgaacttggtatgaaaataatagttaataatttactatgtaacttggattcttataacctggactgtaagtttgttttagctccagtgggagtttccttttcaaagtatgatgaaaccatcctcatcttttctacccctggactaatcatttaaaatggatacagacactttaaaactgctgagtttatcttgtgttaagcaattaagacttctctgtctaatcatgctacttgttctgcttttgtcaattgatactctcatagcccttttgaaaaagtatgtttttgtagaaattaagttgtatgccctcaggacgtacaacttggttttttttttttgttttttttgtttttttttgttttttttttagttctgaagcatgtttagatttttctgtacttgtataggtctgattgtttatgtggcttagctaaggtttcctaaagcatcttctagtagctgtcattggtttgtaaaataaaatttgggctgtcaaaatgcaaaaaaaa

SEQ ID NO: 382669 - DNA, 654 bp, Homo sapiens
  misc_feature (65)..(65): n is a, c, g, or t
attcttgaaaagtccctgttctcggatctccaaaagtaaggcaaaattgagcatctaagagggantgggcctcaaagtggtgtgttggatgctactttttagaacccaaatgttcttattctggggaactccacatgtagcccaaagagggggataagcctcaacgacagagcagtccttatctcaaacattactgctggaactgtggaacccctgctatgagcagggtgctatgcataaatgttttcttcacccaggactggaaaacacccctacctgtggaaggagaatctctgtgtcctttcctcactttggggcaggatcactacacctcaacaggctagtcagtcattggatcccatccccttccccccacttccttgcttctttgcagttgggtggtaggagggccctcgtgccgaattcggcacgagagagaactagtctcgagttttttttttttttttttggttttttttttttgttttttttgtttttttttgttttttttttagttctgaagcatgtttagatttttctgtacttgtataggtctgattgtttatgtggcttagctaaggtttcctaaagcatcttctagtagctgtcattggtttgtaaaataaaatttgggctgtcaaaatgcaaaaaaaa

SEQ ID NO: 382670 - DNA, 769 bp, Homo sapiens
gtgacccccagtgcccacccagggttcacggctgcctacgaagccttggccaaaaggaggataaagctcatgccagcagggcggcaggcagcccccggtggtgtctcagttacagggtgacctctgtccaggctaccttctctgagaccccagccttgggggttctggggaagcggcgggcgggtggggggggggcggctcaggaggaagggatttgatgccaaggcgctctgctaagctggcacacctcccttcctcctcacttcctaagagagctggctggcaggagtcccctggggagactgggaccacactccacagatgaaaggaggaagaagaaagtttccctccgggggaggccaggccaggttagacccagaacatcctgatggactatttaggtgtgaaaagcagaggctcaggggctgacctgggaggagaagctgcaggaaacccagcaagaaatgcccagagtctgtctaccagaattccaccatctgaagtccccggggtgcaaatcctgtttgctgttaattcttccagctctcacgtatggtggcttgttgtgtcacgtgttttgcaattttgcattgcgcgttccatctttgtcagagctttatccgtgggaatcggtgtgtctaggctgggagtccgtctctccctggggggtgagcttatacttccacgaggcaccagaagacactccaaacccaagactgcttgaagtttagttcccatcttgcatgtagaataaattcagatccaaaat

SEQ ID NO: 382671 - DNA, 401 bp, Homo sapiens
tctgttttgttttacattctgtcagaacgtagtaggtaaaacatgggtgttagagtgagggagagaggttaagcctatcatgaaatcactggtcaagaacataactcagtaaaatgtttaatgatctttattagaaggcctttgtgtataagcaggtttgagattaattttaaaaaaacagatttccttttaaaatttttgataggcatttttaaatttaagttaatgctaaaatgtatttgttaatcttaagcctcatagttcccttaaagaggcttgagtaaagaagtattttaggttctgggcttaaatatggaaaatggattttaaggcataccccaatgggctaaccaaatataacaattatcattcccagtgcagtgctgtcttcaaactttctc

SEQ ID NO: 382672 - DNA, 350 bp, Homo sapiens
aaaatcccttcgtcccctcccttcttaggaatcaatggagtttacaatctgttccgatttcccccaggtgtcaaagggaggggagtgtttccagcctgctgcgtgtcccctgtggtggggacaggccctggcgtggggtccatggggagctgcagtggtcctgggcctgtacacactggccagcagaaatcacctttttcccacgcccctcccagaaggtttgaggaacagcaacgagactggggctggaacagagactgagtgaaggccagagccatgggaaaaaaggcgggggaagtatggggggctcaggccaggacagccactggagggcgtgggcagaagaatgc

SEQ ID NO: 382673 - DNA, 449 bp, Homo sapiens
tcattcttccaccaacccctaaggtgttaacctggtttgcatgaccaaaaagctgtcatggacatgtctgtttttcagagagagaagaggaaagaggtgaatccaggacaagcaacttcattttagcaagtgaggcagaagttgcacccattacttctgttacattgcaatgatgataacttagtcatgtggtttcttttcatgggaggaggctgggaaatataatttgaagcttgacagtcacatgtccaacaagaagggaaaataattttgtggggacaactagtcatctgccatactgaccaagaaaatgcactctttgaccgcttctgactccctttcactgttgcctttcagtgatatatcccacacggcccctttctgctgtggtccctcatcctgcaggcagctctcttgggcaatatccttcgaagaccattctagctgat

SEQ ID NO: 382674 - DNA, 344 bp, Homo sapiens
cccattttctccaaaccacccatccgtgctcagctgctctcctgtaaaggacacgatgaggtgagcagtgatgcctcattcgggagtccccatccagctgagcaccatcttccctcaggaccacttccttgaaggccacaagggagagggtgggactggcccacgaggaggcacctccaggccatcttccggcctaggcccacggctgtgctctcctgcctccgtccctcgcttggagggagcctcctctgacttgactatggaggagggtgaacaggcttagaaacccactgtgggtcactaatcactgctatgcttcatgcctcagctgtgcaaacagtgac

SEQ ID NO: 382675 - DNA, 362 bp, Homo sapiens
aagaaatcatctgaaggtacaaaactcactgttaatagtaagtacaggccaggcatggtgtaatctcagcattgtgggaggccaagaaaggaggatcacttgagctcaggagtttgagacaagcctgggagacatgaggaaacccatttctacaaaaaatatctctacataaaacacaaaatccatcttactaaaaatacaaaacccatctctaaaaaaaaacacaaaaattagccaggtgtggtggttcacgctacttgggatgctgaggtgggaggattgcttgtgcctgggaggcggaggttgtagtgagccaaaattgagccactccactccagcctggaagagtgagaccctatctc

SEQ ID NO: 382676 - DNA, 372 bp, Homo sapiens
tttttttagacggagtcttgccctgtctcccaggctggagtgcaatggcatgacctcggctcactgcaacctccacctcccgggttcaagcaattctcctgcctcagcctcccgagtagctgggattacaggtatgagccaccacgcccaaccacacatttttttcttttacaaaactaattagttcgctctttttggtactgacccagtttagattggtcctaagtcatatggtaacaggtacattgtgatttatacacacactatcttttagtatttaggcatttagaaagtttgtttaaaattttataaatttgccctccattttgtttacatctccccaaaatcctaaccaacttaaggggtaataat

SEQ ID NO: 382677 - DNA, 4062 bp, Homo sapiens
attcaataagctctctgttgattttttgagcccagtatgcgatttacattgtcagtcgtctgatcttgctgcactttctattacaggccagagaagatgtgatccacatgctgaagacagagaaaaccaagcctgaggttctggaggctcattacgggtctgcggagccagagaaagtgctgcgggtcctgcaccgagatgccattcttgcccaggagaaatccataggagaagatgtctatgagaaaccgatttcagagctggacagacttgaggaaaaacagaaagaaacctaccggcgcatgctagagcagctgttgctggccgagaagtgtcataggcgcaccgtatacgagttagagaacgagaagcataaacacactgactacatgaacaagagcgacgacttcaccaacctgctggagcaggagcgggagaggttaaaaaagctccttgaacaagaaaaggcttatcaagcccgcaaagaaaaggaaaatgctaaacgactcaataaactaagagatgagcttgttaaactcaaatcctttgcactcatgctggtggatgaaagacaaatgcacattgaacaacttggcctgcaaagccagaaagtacaggatcttactcagaagctgagggaagaagaagagaagctcaaagccattacttccaaatccaaagaagacagacagaaattgctcaagttagaagtggactttgaacacaaggcttcgaggttttctcaagagcatgaagagatgaacgctaaactggctaatcaagagtctcacaataggcaacttagactcaagctggttggcttaacccaaagaatcgaggagctagaagagaccaacaaaaatctgcagaaggcagaggaagaacttcaagaattaagagataaaattgccaaaggagaatgtggaaactctagcctcatggcagaagtggaaaatcttcgaaagcgtgtgcttgaaatggaaggtaaagatgaggagatcactaaaactgaatcccagtgtagggaattgaggaagaagctgcaagaggaagaacaccatagtaaggagctcagacttgaagttgagaagctacagaagagaatgtctgaactagagaaattggaagaagcatttagcaagagtaaatctgagtgcacccagctacatttaaatctggagaaagaaaagaacttaaccaaagacctgctaaatgaattggaggtggtcaagagtcgagttaaagaattggaatgttctgaaagtagattggaaaaggctgaattaagcctaaaagatgatcttaccaagttgaagtcatttaccgtgatgctggttgatgaaaggaaaaatatgatggaaaaaataaaacaagaagagagaaaagtggatggactcaataaaaattttaaggtggaacaaggaaaagttatggatgtaactgaaaaactaattgaagaaagtaagaaacttttaaaactaaaatctgaaatggaggaaaaagtatacaacttgacaagagaaagagatgagttgataggcaaattgaaaagtgaagaagaaaaatcctctgaattaagctgcagtgttgacttactaaagaagagacttgatggtatagaggaagtggaaagagaaataacaagaggaaggtcacgaaaagggtctgagctcacctgcccggaagataataagattaaggaactaacacttgaaattgagagactgaagaaacgtctccaacaattggaagtggtcgaaggggatttgatgaagacagaagatgagtatgatcagctggaacagaaatttagaactgagcaggataaggctaacttcctctctcaacaactagaggagatcaagcaccaaattgccaagaataaagcaatagagaagggtgaggttgtgagccaggaagctgaactgagacacagatttcggttggaagaagctaaaagtcgagacttaaaagccgaagtacaagctcttaaagagaagattcacgaattaatgaacaaagaagatcagctttctcagctccaggtagattattctgtacttcaacaaagatttatggaagaagaaaataagaacaaaaacatggggcaggaggttctcaatctgaccaaagagttggagctttccaagcgctacagcagagctcttaggcccagtgtgaatggaagaagaatggtggatgttcctgtgacgtcaactggagtccaaactgatgcagtcagcggtgaagcagcagaggaagaaacgccagctgtattcatacggaaatccttccaggaagaaaatcatattatgagtaatcttcggcaggtgggattgaagaaacccgtggaaagatcttctgttctagacaggtatcctccagcagcaaatgagctcactatgagaaagtcttggattccatggatgagaaagagggaaaacggcccctccatcactcaggagaaagggccccgaacaaattccagtccagggcacccaggagaggtagtcctttcaccaaagcagggccagcccctgcatattcgagtgacaccagaccacgagaacagcactgcgactttggagataacaagcccgacatctgaagaatttttttctagtaccactgtcattcctaccttagggaatcagaaaccaagaataaccattattccatcaccaaacgttatgcctcaaaaacaaaaaagtggagatactactcttggcccagaacgagccatgtccccagtcacaattactacattttccagagagaagactccagaaagtggaagaggcgcatttgcagacaggcccacatcccctattcagataatgacggtgtctacatcagcagcaccagctgagattgcagtttctcccgaatcccaggaaatgcccatgggacggacaatcctcaaagtcaccccagaaaaacagactgttccaactccagtacggaaatacaactccaatgccaatatcataaccacagaggacaataaaattcacattcacttagggtctcagtttaaacggtcccctgggacttcaggtgaaggagtcagtccagttattactgtccgaccagtaaacgtgacagccgaaaaggaggtttccaccggcactgtccttcgctctcccaggaatcacctctcctcacggcctggtgcaagcaaagtgacgagcactatcaccataacaccggtcacaacgtcatctgctcgaggaacccagtcagtgtcaggacaagacgggtcatcccagcggcctacacccacccgcattcctatgtcaaaaggtatgaaagcaggaaagccagtagtggcagccccaggagcaggaaatctgaccaaattcgagcctcgagctgagactcagtctatgaaaatagagctgaagaaatctgcagccagcagcaccacctctctcggaggggggaagggctgagggcagtggctaagggggtatgttgtgcagatgctactgctgccgtgaaagtgaaccttcatctgtttgtgccagttctttacatgtactaatttaagttttaaatattgtgtttataaaataaccaactaataaccatttgtctttcccattttgtgcatttgttttgatgctggggaacaaaattagcaaaactattgcttgctgcctagaagccagggcgtggtttctagttccagttttgcttctagcaagtggacccatcaatagacccatctgagcctgtttcctcatcagttagatgtggggactcaatcacacgctcttcaagtccggctcccatatttcctaattgcaagccaaatttaatgtaccttgttccacaataattttttattaaaaaaatcctattacaaaataagacatactttaactattgtcatttgcctctttcacatcatgaatttgctttatgtgctggaaaaaacatcacatagctatcacagggcctggacctctaaaattttgcaaaaacaaaaggttctaagatgatttcaggaaataatgtgaacatgtaataaaatggaaatgaaatatggaatcctaagaa

SEQ ID NO: 382678 - DNA, 1136 bp, Homo sapiens
tgaaatgatgtagcttgattctcagtttcagtttaattgaaaatgccatgtcttttttctctttatagaaagcatcatcattcaccagttacgaatgaactccagatgaaatggtaaaccaagcacatactgggtgtgtgtacgacctctgaatccctattgaatggacagccctcaatcatgactaaggtcctccatgctactgatcactactggaaatattttactacttccagtgatttttttttaaggatataatgtaaaaagctgaaaatggccttgctgataatatgaaaatatgtagcaagagcaattcaatctatgtgccaaaagaaatttctttttgcaaagctttcaggtctatgggcacatgctgtataacttatattttataatacattttgtaatgtgattttttttgctaaagtgtttccctttttcatagtctctggcacatatatctatggaatacgctgtcagttcttcaaagtactggtattgttgcattcaaaatggtaatctataattattttctttttatcaatttgttaattctgaaaaaaagaaagtacaactatatttcctgaggtaaattcaagaggtaaaacttagaagcaggagactctggaagaggttttactattgcttgtacaatgctatggttctgatcatggttcaatgctaacaaataatgctctgacttaaaagcttaattttaaatactaaaaatcagtttctaaagttgctctttctggtgttctgggccaaaaaccttggatgaaatgatttttatatagaacaaattcataaaaggagatgtaccagtttaaccagtaagggcaataagaacagcttcgactgacagttcaattatacttctgattgcattatttacttgtatgtataagacttataataaggactgtgaaataaagatagttctcacaatctaatccaatcaaaacttgaatataaaaacagacctaaaatgtcaggatcttttttaaaaaataagactgggcatggtgggtcgtgcctgtaatcccagcactttgggaggccaaggcgggagaatcgcttaagcccaggagttcaggatcagcctgggcaacacagtgagagtcttaaaaaaaaaa

SEQ ID NO: 382679 - DNA, 4042 bp, Homo sapiens
gcttaggcccagtgtgaatggaagaagaatggtggatgttcctgtgacgtcaactggagtccaaactgatgcagtcagcggtgaagcagcagaggaagaaacgccagctgtattcatacggaaatccttccaggaagaaaatcatattatgagaaagtgctgcgggtcctgcaccgagatgccattcttgcccaggagaaatccataggagaagatgtctatgagaaaccgatttcagagctggacagacttgaggaaaaacagaaagaaacctaccggcgcatgctagagcagctgttgctggccgagaagtgtcataggcgcaccgtatacgagttagagaacgagaagcataaacacactgactacatgaacaagagcgacgacttcaccaacctgctggagcaggagcgggagaggttaaaaaagctccttgaacaagaaaaggcttatcaagcccgcaaagaaaaggaaaatgctaaacgactcaataaactaagagatgagcttgttaaactcaaatcctttgcactcatgctggtggatgaaagacaaatgcacattgaacaacttggcctgcaaagccagaaagtacaggatcttactcagaagctgagggaagaagaagagaagctcaaagccattacttccaaatccaaagaagacagacagaaattgctcaagttagaagtggactttgaacacaaggcttcgaggttttctcaagagcatgaagagatgaacgctaaactggctaatcaagagtctcacaataggcaacttagactcaagctggttggcttaacccaaagaatcgaggagctagaagagaccaacaaaaatctgcagaaggcagaggaagaacttcaagaattaagagataaaattgccaaaggagaatgtggaaactctagcctcatggcagaagtggaaaatcttcgaaagcgtgtgcttgaaatggaaggtaaagatgaggagatcactaaaactgaatcccagtgtagggaattgaggaagaagctgcaagaggaagaacaccatagtaaggagctcagacttgaagttgagaagctacagaagagaatgtctgaactagagaaattggaagaagcatttagcaagagtaaatctgagtgcacccagctacatttaaatctggagaaagaaaagaacttaaccaaagacctgctaaatgaattggaggtggtcaagagtcgagttaaagaattggaatgttctgaaagtagattggaaaaggctgaattaagcctaaaagatgatcttaccaagttgaagtcatttaccgtgatgctggttgatgaaaggaaaaatatgatggaaaaaataaaacaagaagagagaaaagtggatggactcaataaaaattttaaggtggaacaaggaaaagttatggatgtaactgaaaaactaattgaagaaagtaagaaacttttaaaactaaaatctgaaatggaggaaaaagtatacaacttgacaagagaaagagatgagttgataggcaaattgaaaagtgaagaagaaaaatcctctgaattaagctgcagtgttgacttactaaagaagagacttgatggtatagaggaagtggaaagagaaataacaagaggaaggtcacgaaaagggtctgagctcacctgcccggaagataataagattaaggaactaacacttgaaattgagagactgaagaaacgtctccaacaattggaagtggtcgaaggggatttgatgaagacagaagatgagtatgatcagctggaacagaaatttagaactgagcaggataaggctaacttcctctctcaacaactagaggagatcaagcaccaaattgccaagaataaagcaatagagaagggtgaggttgtgagccaggaagctgaactgagacacagatttcggttggaagaagctaaaagtcgagacttaaaagccgaagtacaagctcttaaagagaagattcacgaattaatgaacaaagaagatcagctttctcagctccaggtagattattctgtacttcaacaaagatttatggaagaagaaaataagaacaaaaacatggggcaggaggttctcaatctgaccaaagagttggagctttccaagcgctacagcagagctcttaggcccagtgtgaatggaagaagaatggtggatgttcctgtgacgtcaactggagtccaaactgatgcagtcagcggtgaagcagcagaggaagaaacgccagctgtattcatacggaaatccttccaggaagaaaatcatattatgagtaatcttcggcaggtgggattgaagaaacccgtggaaagatcttctgttctagacaggtatcctccagcagcaaatgagctcactatgagaaagtcttggattccatggatgagaaagagggaaaacggcccctccatcactcaggagaaagggccccgaacaaattccagtccagggcacccaggagaggtagtcctttcaccaaagcagggccagcccctgcatattcgagtgacaccagaccacgagaacagcactgcgactttggagataacaagcccgacatctgaagaatttttttctagtaccactgtcattcctaccttagggaatcagaaaccaagaataaccattattccatcaccaaacgttatgcctcaaaaacaaaaaagtggagatactactcttggcccagaacgagccatgtccccagtcacaattactacattttccagagagaagactccagaaagtggaagaggcgcatttgcagacaggcccacatcccctattcagataatgacggtgtctacatcagcagcaccagctgagattgcagtttctcccgaatcccaggaaatgcccatgggacggacaatcctcaaagtcaccccagaaaaacagactgttccaactccagtacggaaatacaactccaatgccaatatcataaccacagaggacaataaaattcacattcacttagggtctcagtttaaacggtcccctgggacttcaggtgaaggagtcagtccagttattactgtccgaccagtaaacgtgacagccgaaaaggaggtttccaccggcactgtccttcgctctcccaggaatcacctctcctcacggcctggtgcaagcaaagtgacgagcactatcaccataacaccggtcacaacgtcatctgctcgaggaacccagtcagtgtcaggacaagacgggtcatcccagcggcctacacccacccgcattcctatgtcaaaaggtatgaaagcaggaaagccagtagtggcagccccaggagcaggaaatctgaccaaattcgagcctcgagctgagactcagtctatgaaaatagagctgaagaaatctgcagccagcagcaccacctctctcggaggggggaagggctgagggcagtggctaagggggtatgttgtgcagatgctactgctgccgtgaaagtgaaccttcatctgtttgtgccagttctttacatgtactaatttaagttttaaatattgtgtttataaaataaccaactaataaccatttgtctttcccattttgtgcatttgttttgatgctggggaacaaaattagcaaaactattgcttgctgcctagaagccagggcgtggtttctagttccagttttgcttctagcaagtggacccatcaatagacccatctgagcctgtttcctcatcagttagatgtggggactcaatcacacgctcttcaagtccggctcccatatttcctaattgcaagccaaatttaatgtaccttgttccacaataattttttattaaaaaaatcctattacaaaataagacatactttaactattgtcatttgcctctttcacatcatgaatttgctttatgtgctggaaaaaacatcacatagctatcacagggcctggacctctaaaattttgcaaaaacaaaaggttctaagatgatttcaggaaataatgtgaacatgtaataaaatggaaatgaaatatggaatcctaagaa

SEQ ID NO: 382680 - DNA, 4371 bp, Homo sapiens
attcaataagctctctgttgattttttgagcccagtatgcgatttacattgtcagtcgtctgatcttgctgcactttctattacaggccagagaagatgtgatccacatgctgaagacagagaaaaccaagcctgaggttctggaggctcattacgggtctgcggagccagagaaagtgctgcgggtcctgcaccgagatgccattcttgcccaggagaaatccataggagaagatgtctatgagaaaccgatttcagagctggacagacttgaggaaaaacagaaagaaacctaccggcgcatgctagagcagctgttgctggccgagaagtgtcataggcgcaccgtatacgagttagagaacgagaagcataaacacactgactacatgaacaagagcgacgacttcaccaacctgctggagcaggagcgggagaggttaaaaaagctccttgaacaagaaaaggcttatcaagcccgcaaagaaaaggaaaatgctaaacgactcaataaactaagagatgagcttgttaaactcaaatcctttgcactcatgctggtggatgaaagacaaatgcacattgaacaacttggcctgcaaagccagaaagtacaggatcttactcagaagctgagggaagaagaagagaagctcaaagccattacttccaaatccaaagaagacagacagaaattgctcaagttagaagtggactttgaacacaaggcttcgaggttttctcaagagcatgaagagatgaacgctaaactggctaatcaagagtctcacaataggcaacttagactcaagctggttggcttaacccaaagaatcgaggagctagaagagaccaacaaaaatctgcagaaggcagaggaagaacttcaagaattaagagataaaattgccaaaggagaatgtggaaactctagcctcatggcagaagtggaaaatcttcgaaagcgtgtgcttgaaatggaaggtaaagatgaggagatcactaaaactgaatcccagtgtagggaattgaggaagaagctgcaagaggaagaacaccatagtaaggagctcagacttgaagttgagaagctacagaagagaatgtctgaactagagaaattggaagaagcatttagcaagagtaaatctgagtgcacccagctacatttaaatctggagaaagaaaagaacttaaccaaagacctgctaaatgaattggaggtggtcaagagtcgagttaaagaattggaatgttctgaaagtagattggaaaaggctgaattaagcctaaaagatgatcttaccaagttgaagtcatttaccgtgatgctggttgatgaaaggaaaaatatgatggaaaaaataaaacaagaagagagaaaagtggatggactcaataaaaattttaaggtggaacaaggaaaagttatggatgtaactgaaaaactaattgaagaaagtaagaaacttttaaaactaaaatctgaaatggaggaaaaagtatacaacttgacaagagaaagagatgagttgataggcaaattgaaaagtgaagaagaaaaatcctctgaattaagctgcagtgttgacttactaaagaagagacttgatggtatagaggaagtggaaagagaaataacaagaggaaggtcacgaaaagggtctgagctcacctgcccggaagataataagattaaggaactaacacttgaaattgagagactgaagaaacgtctccaacaattggaagtggtcgaaggggatttgatgaagacagaagatgagtatgatcagctggaacagaaatttagaactgagcaggataaggctaacttcctctctcaacaactagaggagatcaagcaccaaattgccaagaataaagcaatagagaagggtgaggttgtgagccaggaagctgaactgagacacagatttcggttggaagaagctaaaagtcgagacttaaaagccgaagtacaagctcttaaagagaagattcacgaattaatgaacaaagaagatcagctttctcagctccaggtagattattctgtacttcaacaaagatttatggaagaagaaaataagaacaaaaacatggggcaggaggttctcaatctgaccaaagagttggagctttccaagcgctacagcagagctcttaggcccagtgtgaatggaagaagaatggtggatgttcctgtgacgtcaactggagtccaaactgatgcagtcagcggtgaagcagcagaggaagaaacgccagctgtattcatacggaaatccttccaggaagaaaatcatattatgagtaatcttcggcaggtgggattgaagaaacccgtggaaagatcttctgttctagacaggtatcctccagcagcaaatgagctcactatgagaaagtcttggattccatggatgagaaagagggaaaacggcccctccatcactcaggagaaagggccccgaacaaattccagtccagggcacccaggagaggtagtcctttcaccaaagcagggccagcccctgcatattcgagtgacaccagaccacgagaacagcactgcgactttggagataacaagcccgacatctgaagaatttttttctagtaccactgtcattcctaccttagggaatcagaaaccaagaataaccattattccatcaccaaacgttatgcctcaaaaacaaaaaagtggagatactactcttggcccagaacgagccatgtccccagtcacaattactacattttccagagagaagactccagaaagtggaagaggcgcatttgcagacaggcccacatcccctattcagataatgacggtgtctacatcagcagcaccagctgagattgcagtttctcccgaatcccaggaaatgcccatgggacggacaatcctcaaagtcaccccagaaaaacagactgttccaactccagtacggaaatacaactccaatgccaatatcataaccacagaggacaataaaattcacattcacttagggtctcagtttaaacggtcccctgggacttcaggtgaaggagtcagtccagttattactgtccgaccagtaaacgtgacagccgaaaaggaggtttccaccggcactgtccttcgctctcccaggaatcacctctcctcacggcctggtgcaagcaaagtgacgagcactatcaccataacaccggtcacaacgtcatctgctcgaggaacccagtcagtgtcaggacaagacgggtcatcccagcggcctacacccacccgcattcctatgtcaaaagaaagcatcatcattcaccagttacgaatgaactccagatgaaatggtaaaccaagcacatactgggtgtgtgtacgacctctgaatccctattgaatggacagccctcaatcatgactaaggtcctccatgctactgatcactactggaaatattttactacttccagtgatttttttttaaggatataatgtaaaaagctgaaaatggccttgctgataatatgaaaatatgtagcaagagcaattcaatctatgtgccaaaagaaatttctttttgcaaagctttcaggtctatgggcacatgctgtataacttatattttataatacattttgtaatgtgattttttttgctaaagtgtttccctttttcatagtctctggcacatatatctatggaatacgctgtcagttcttcaaagtactggtattgttgcattcaaaatggtaatctataattattttctttttatcaatttgttaattctgaaaaaaagaaagtacaactatatttcctgaggtaaattcaagaggtaaaacttagaagcaggagactctggaagaggttttactattgcttgtacaatgctatggttctgatcatggttcaatgctaacaaataatgctctgacttaaaagcttaattttaaatactaaaaatcagtttctaaagttgctctttctggtgttctgggccaaaaaccttggatgaaatgatttttatatagaacaaattcataaaaggagatgtaccagtttaaccagtaagggcaataagaacagcttcgactgacagttcaattatacttctgattgcattatttacttgtatgtataagacttataataaggactgtgaaataaagatagttctcacaatctaatccaatcaaaacttgaatataaaaacagacctaaaatgtcaggatcttttttaaaaaataagactgggcatggtgggtcgtgcctgtaatcccagcactttgggaggccaaggcgggagaatcgcttaagcccaggagttcaggatcagcctgggcaacacagtgagagtcttaaaaaaaaaa

SEQ ID NO: 382681 - DNA, 3772 bp, Homo sapiens
cattgttctgatgacagggctggaatgtgacggttaattccctgtggagtagggggctgagcaaggcctgctgctgttgaacaaacttcagtacccccttataaaaaaacaaaaacaaaaacaaagctactatgcttcctagtattaaggttaaaaaagctccttgaacaagaaaaggcttatcaagcccgcaaagaaaaggaaaatgctaaacgactcaataaactaagagatgagcttgttaaactcaaatcctttgcactcatgctggtggatgaaagacaaatgcacattgaacaacttggcctgcaaagccagaaagtacaggatcttactcagaagctgagggaagaagaagagaagctcaaagccattacttccaaatccaaagaagacagacagaaattgctcaagttagaagtggactttgaacacaaggcttcgaggttttctcaagagcatgaagagatgaacgctaaactggctaatcaagagtctcacaataggcaacttagactcaagctggttggcttaacccaaagaatcgaggagctagaagagaccaacaaaaatctgcagaaggcagaggaagaacttcaagaattaagagataaaattgccaaaggagaatgtggaaactctagcctcatggcagaagtggaaaatcttcgaaagcgtgtgcttgaaatggaaggtaaagatgaggagatcactaaaactgaatcccagtgtagggaattgaggaagaagctgcaagaggaagaacaccatagtaaggagctcagacttgaagttgagaagctacagaagagaatgtctgaactagagaaattggaagaagcatttagcaagagtaaatctgagtgcacccagctacatttaaatctggagaaagaaaagaacttaaccaaagacctgctaaatgaattggaggtggtcaagagtcgagttaaagaattggaatgttctgaaagtagattggaaaaggctgaattaagcctaaaagatgatcttaccaagttgaagtcatttaccgtgatgctggttgatgaaaggaaaaatatgatggaaaaaataaaacaagaagagagaaaagtggatggactcaataaaaattttaaggtggaacaaggaaaagttatggatgtaactgaaaaactaattgaagaaagtaagaaacttttaaaactaaaatctgaaatggaggaaaaagtatacaacttgacaagagaaagagatgagttgataggcaaattgaaaagtgaagaagaaaaatcctctgaattaagctgcagtgttgacttactaaagaagagacttgatggtatagaggaagtggaaagagaaataacaagaggaaggtcacgaaaagggtctgagctcacctgcccggaagataataagattaaggaactaacacttgaaattgagagactgaagaaacgtctccaacaattggaagtggtcgaaggggatttgatgaagacagaagatgagtatgatcagctggaacagaaatttagaactgagcaggataaggctaacttcctctctcaacaactagaggagatcaagcaccaaattgccaagaataaagcaatagagaagggtgaggttgtgagccaggaagctgaactgagacacagatttcggttggaagaagctaaaagtcgagacttaaaagccgaagtacaagctcttaaagagaagattcacgaattaatgaacaaagaagatcagctttctcagctccaggtagattattctgtacttcaacaaagatttatggaagaagaaaataagaacaaaaacatggggcaggaggttctcaatctgaccaaagagttggagctttccaagcgctacagcagagctcttaggcccagtgtgaatggaagaagaatggtggatgttcctgtgacgtcaactggagtccaaactgatgcagtcagcggtgaagcagcagaggaagaaacgccagctgtattcatacggaaatccttccaggaagaaaatcatattatgagtaatcttcggcaggtgggattgaagaaacccgtggaaagatcttctgttctagacaggtatcctccagcagcaaatgagctcactatgagaaagtcttggattccatggatgagaaagagggaaaacggcccctccatcactcaggagaaagggccccgaacaaattccagtccagggcacccaggagaggtagtcctttcaccaaagcagggccagcccctgcatattcgagtgacaccagaccacgagaacagcactgcgactttggagataacaagcccgacatctgaagaatttttttctagtaccactgtcattcctaccttagggaatcagaaaccaagaataaccattattccatcaccaaacgttatgcctcaaaaacaaaaaagtggagatactactcttggcccagaacgagccatgtccccagtcacaattactacattttccagagagaagactccagaaagtggaagaggcgcatttgcagacaggcccacatcccctattcagataatgacggtgtctacatcagcagcaccagctgagattgcagtttctcccgaatcccaggaaatgcccatgggacggacaatcctcaaagtcaccccagaaaaacagactgttccaactccagtacggaaatacaactccaatgccaatatcataaccacagaggacaataaaattcacattcacttagggtctcagtttaaacggtcccctgggacttcaggtgaaggagtcagtccagttattactgtccgaccagtaaacgtgacagccgaaaaggaggtttccaccggcactgtccttcgctctcccaggaatcacctctcctcacggcctggtgcaagcaaagtgacgagcactatcaccataacaccggtcacaacgtcatctgctcgaggaacccagtcagtgtcaggacaagacgggtcatcccagcggcctacacccacccgcattcctatgtcaaaaggtatgaaagcaggaaagccagtagtggcagccccaggagcaggaaatctgaccaaattcgagcctcgagctgagactcagtctatgaaaatagagctgaagaaatctgcagccagcagcaccacctctctcggaggggggaagggctgagggcagtggctaagggggtatgttgtgcagatgctactgctgccgtgaaagtgaaccttcatctgtttgtgccagttctttacatgtactaatttaagttttaaatattgtgtttataaaataaccaactaataaccatttgtctttcccattttgtgcatttgttttgatgctggggaacaaaattagcaaaactattgcttgctgcctagaagccagggcgtggtttctagttccagttttgcttctagcaagtggacccatcaatagacccatctgagcctgtttcctcatcagttagatgtggggactcaatcacacgctcttcaagtccggctcccatatttcctaattgcaagccaaatttaatgtaccttgttccacaataattttttattaaaaaaatcctattacaaaataagacatactttaactattgtcatttgcctctttcacatcatgaatttgctttatgtgctggaaaaaacatcacatagctatcacagggcctggacctctaaaattttgcaaaaacaaaaggttctaagatgatttcaggaaataatgtgaacatgtaataaaatggaaatgaaatatggaatcctaagaa

SEQ ID NO: 382682 - DNA, 1710 bp, Homo sapiens
attcaataagctctctgttgattttttgagcccagtatgcgatttacattgtcagtcgtctgatcttgctgcactttctattacaggccagagaagatgtgatccacatgctgaagacagagaaaaccaagcctgaggttctggaggctcattacgggtctgcggagccagagaaagtgctgcgggtcctgcaccgagatgccattcttgcccaggagaaatccataggagaagatgtctatgagaaaccgatttcagagctggacagacttgaggaaaaacagaaagaaacctaccggcgcatgctagagcagctgttgctggccgagaagtgtcataggcgcaccgtatacgagttagagaacgagaagcataaacacactgactacatgaacaagagcgacgacttcaccaacctgctggagcaggagcgggagaggttaaaaaagctccttgaacaagaaaaggcttatcaagcccgcaaagaaaaggaaaatgctaaacgactcaataaactaagagatgagcttgttaaactcaaatcctttgcactcatgctggtggatgaaagacaaatgcacattgaacaacttggcctgcaaagccagaaagtacaggatcttactcagaagctgagggaagaagaagagaagctcaaagccattacttccaaatccaaagaagacagacagaaattgctcaagttagaagtggactttgaacacaaggcttcgaggttttctcaagagcatgaagagatgaacgctaaactggctaatcaagagtctcacaataggcaacttagactcaagctggttggcttaacccaaagaatcgaggagctagaagagaccaacaaaaatctgcagaaggcagaggaagaacttcaagaattaagagataaaattgccaaaggagaatgtggaaactctagcctcatggcagaagtggaaaatcttcgaaagcgtgtgcttgaaatggaaggtaaagatgaggagatcactaaaactgaatcccagtgtagggaattgaggaagaagctgcaagaggaagaacaccatagtaaggagctcagacttgaagttgagaagctacagaagagaatgtctgaactagagaaattggaagaagcatttagcaagagtaaatctgagtgcacccagctacatttaaatctggagaaagaaaagaacttaaccaaagacctgctaaatgaattggaggtggtcaagagtcgagttaaagaattggaatgttctgaaagtagattggaaaaggctgaattaagcctaaaagatgatcttaccaagttgaagtcatttaccgtgatgctggttgatgaaaggaaaaatatgatggaaaaaataaaacaagaagagagaaaagtggatggactcaataaaaattttaaggtggaacaaggaaaagttatggatgtaactgaaaaactaattgcaagccaaatttaatgtaccttgttccacaataattttttattaaaaaaatcctattacaaaataagacatactttaactattgtcatttgcctctttcacatcatgaatttgctttatgtgctggaaaaaacatcacatagctatcacagggcctggacctctaaaattttgcaaaaacaaaaggttctaagatgatttcaggaaataatgtgaacatgtaataaaatggaaatgaaatatggaatcctaagaa

SEQ ID NO: 382683 - DNA, 392 bp, Homo sapiens
caccactgcactccagcctgggtgacagagtgagatcctgtctcaaaaaaaaaaaaaaaaagaaatgtacaggcacatttttaacagtcatggtagcaaatgcttgccagccttctccactcaacgcatacacaaaccactgactccttgatgtctacatctgtgaaaaaatatccaatgtcccccaagttgtccttagagtctgggtttcatagcagcagcaaggtctcttcatgttgttctctagggaaggggtcagccacaaaaaggcaatagttatacaactttgtaacaaacccacatcctgtatctatgtacattttagaggaaacaccaaggccttaggttatcattattgcaaaggaaaatgctacagttatcataatttactg

SEQ ID NO: 382684 - DNA, 540 bp, Homo sapiens
atccagcaaggatggggccgctcgactgggaccagagctgtctttgcacaccccatgacacccagaacaggctcaggaaagcaggaagtacctgggggctgcggccggaaatgtcccaaggcctccctgtcgcctgggtgcccacggggctctgactttcccccgttaccagcctcgtggctgtccccggagatgctgagagtgacagcttgagagtttgattcttacataagcgggaagcagtgagaagtcacccgcccaccacgtccctccgttcctgttggcacccccccatcctaccatctgtggcccccgtgggccctgacttgctaaggcgctggcgggcatagccttgggagcactggggtacatacatggccttgtagcacgaaggcccactccaaggttctggccaggctggactgtaacagcagtaccagcaccaggaatggggccaccatgtgatctttgggtagaaatgacctttttgggcttgagtttgtctttctagaatgcacgtgatcccttatcccagggagg

SEQ ID NO: 382685 - DNA, 1023 bp, Homo sapiens
ttaaaaacaaagctctttgcattgaagaaatattaaagcctttaaacatcaaagtttcctggagatttcctgcctgcattagatagagtactcctgtggaaactgcacacctagctcagctgcaatgtgtccacttaatttctgtggaaatacgcagctttataaccataacactggagtccctattgcattccagatttatcttgcactcaccctcttcacttctcaggtcactttagcgttcatagaagaaaagcaaaatctcacattatcaagaaacaggaagaaaattactacattcttaggcaatttggagtttatttgcaatcctttttcttccaagcaaaagaaagcaaggaaatgctgatccagtgttccagtcattttagctaaacaggttaagtagtccctttctgcactcctgcctcgctgagcgtgtaagatacaaggaagaaactcactcagataggctcctattgtcccctcacctgctggttgcctttttctccagagttagcagctgtctggtacgggagggatgctgcatgtggtgagagtttgccctcccaaaagtgccatacgctgcgtttagtagccatcccagaaacccagagagagcaggataaacctcaagtccaaagaggagaaaaggcctgccttaaattagattgaccctaaccctgggggtttctcagccaaaactctcttgacctttggggccagattgcccttgttgtggggctgtcctgtgcgttatggtctgtttagcagcacccctgccctgcccactagatgctggtggcacccacccacacgctcatgacagcccaaagcatctccagacatcgccagatgccccctgggggcacagctgtcccagctgagaaccactgctccaacttgatcaaactcaagattcatcaggagaatgagaaccccgtgttctttcattaattccgactgctctcagtttgcctcatatcagaaaacttacacgctaattccatctgttctttagatttt

SEQ ID NO: 382686 - DNA, 270 bp, Homo sapiens
gagacagcatgcctccatttttctcagtcatctcattcttgttctagggtggcccatttaactccaagccctggcatactctgtagccacaagtgtttgagggcttaggaatcaacaggatcaaaggctatcagccttaggaaaacagatctcagcttccctcagccatctcagctgatttgtttacatgaaaactcagtttaaaaggcattagttttctcctttcttatctctgctctgatgctgtactttctcaaaaaaaaaaaaggg

SEQ ID NO: 382687 - DNA, 524 bp, Homo sapiens
aactggattggaagcaatcattccattataaatttcctttcatacatagcaatcccactgagatgatacctttgtaaaatcaggcaaaaatcaattgttaatattctagagatggacaaaccacagattaagtacctaaataatcatgtttccaatcaccaattaactaagtagaattctcttaattgtatctattaaggcctactaattgacagaaaaagggcagagttgaggacttggagaaagaagacagaagcattcctctgcctgattcataaaggtcagaatcccctgggccgttgttgtaggaacccagccatcaccagtcacaaagaaaaaggcagcagcacactttgagtatccaaagggcctctttactgaggctgcatggctgttgtgggcttagtccaacatgatgatgtaggacaagaacctaccagttcaatcaacatgcaattaaaactcctgatgaaggacggcccagggcagtccattggtttggggcaggggacgcagagaagcaa

SEQ ID NO: 382688 - DNA, 304 bp, Homo sapiens
aagaaaaatagactttcatttagtacccgacttgtcatggagcttaaagataatgaattttaaattatctctctccagcagcccgccagtcacattgcaacatagaatccaatttccattttgcaggtgaatacgctgaggctgaaaacagttttgagtgctccagatcatccagtgaagccatgaccaaagcaaggtcaggttcatcggctcagggttccccattcatttctcagcacagtggctgagaattccagatgtaatctggcatactctccatgtaggggcctaagcacgtcactcc

SEQ ID NO: 382689 - DNA, 886 bp, Homo sapiens
aggccgccagtgcccgccggccgcttccgctcccggcgcaggcgctgcagcttggccagagcggagggggctcgggagaggagtggacgccgctggccaggatggtgctggagagcgtggcccgtatcgtgaaggtgcagctccctgcatatctgaagcggctcccagtccctgaaagcattaccgggttcgctaggctcacagtttcagaatggcttcggttattgcctttccttggtgtactcgcacttcttggctaccttgcagttcgtccattcctcccgaagaagaaacaacagaaggatagcttgattaatcttaaaatacaaaaggaaaatccgaaagtagtgaatgaaataaacattgaagatttgtgtcttactaaagcagcttattgtaggtgttggcgttctaaaacgtttcctgcctgcgatggttcacataataaacacaatgaattgacaggagataatgtgggtccactaatactgaagaagaaagaagtataataataataacaatattttctcattctttgtgtatagaaaattttaaaatggtggtcttaattattactactggttgaacaattatttcttccaatttattttcttcctgcactactgtttgtatttgatcctttgtctattcagtcacttaattagaaattaaattgtcaagcctcttattctgacttcaaagaattaatgtatcttccaacaataaaatcacttctgattttaatctaggaaaaaaaaaaaaaatttgggcggccgccggaagttttaacctcgtgggcggccagggtaggaggcatgtcagggacggggaggcggtcccaaaacgggcgggtgaacgaggttggttgttcgggccccccgcgggc

SEQ ID NO: 382690 - DNA, 360 bp, Homo sapiens
tttggtagagctggctttattgtgttatttattcacagttttatggatccattaaaaaggaattaatgtaaaaagtaacaaagaataagctcaaggatgaaacgacatgctattttgaattcttttccaagagcactgcagattctgacacatctacatgtttagtttcagaatggcttcggttattgcctttccttggtgtactcgcacttcttggctaccttgcagttcgtccattcctcccgaagaagaaacaacagaaggatagcttgattaatctgtactgtagctttgggcatccatgctaaagcaataaatattttctccttaaaactaaaaccagcaaagcacatcaataga

SEQ ID NO: 382691 - DNA, 1648 bp, Homo sapiens
aggccgccagtgcccgccggccgcttccgctcccggcgcaggcgctgcagcttggccagagcggagggggctcgggagaggagtggacgccgctggccaggatggtgctggagagcgtggcccgtatcgtgaaggtgcagctccctgcatatctgaagcggctcccagtccctgaaagcattaccgggttcgctaggctcacagtttcagaatggcttcggttattgcctttccttggtgtactcgcacttcttggctaccttgcagttcgtccattcctcccgaagaagaaacaacagaaggatagcttgattaatcttaaaatacaaaaggaaaatccgaaagtagtgaatgaaataaacattgaagatttgtgtcttactaaagcagcttattgtaggtgttggcgttctaaaacgtttcctgcctgcgatggttcacataataaacacaatgaattgacaggagataatgtgggtccactaatactgaagaagaaagaagtataataataataacaatattttctcattctttgtgtatagaaaattttaaaatggtggtcttaattattactactggttgaacaattatttcttccaatttattttcttcctgcactactgtttgtatttgatcctttgtctattcagtcacttaattagaaattaaattgtcaagcctcttattctgacttcaaagaattaatgtatcttccaacaataaaatcacttctgattttaatctaggaaaacctaaattgtggctatggatccaaagctgtttgtttctttgaatatcaatattttcaacaggatcttgtatttaaaattcccacctacattgttaaatatgttattttttcatatctcttttggttttgataatctgaagtgtttttttctcgttttggccttccaaactgcatttggttaggtgaattaagaaaaatattgccatcaagaattacttgtgttttcacagagatagactctttgctttatagagattgttgtgtatttaatatgaatatcccagctttagaaaagaagtaaactggatacaaaaagttccattgaggaacagttatttacagtataaaagatttgtttactttacaaaaggcttgtgtctgtgtgtgtgtgtgtgtgtgtgtgtgtgtatttaaactgactcagtgacagctggggtggaatggcaagaacacttacaaccaaactcatgggctgctgcaatttgaagatcaattggtaataaacataagacattaattcatattaaaatagttcagtgttcaaaattgtgtttatgtggatatttttctctttttaacactataaaccattaaaatacagtcatcccttgtatacgctagggactggttccagggccacacatataccaaaatctgcccatactcaagtcccacagaaagtcttgcagaacccatatgtagaaaagttggccctccagttgaccctccgtacacatgagtttcacatcccatgcacaaatgctgatctgtgtgacctcacctgcatttgattgaaaaaagtatgcgcgtaagtgtacccacccagttcaaacccgtgtgtaagggtcaactgtacaaaaaagtttgtgaaataaacgtactggagaatcttta

SEQ ID NO: 382692 - DNA, 1739 bp, Homo sapiens
acgcagctgcctggggaacgcctgtgaggcagtctccgggtgcttgatgccccagggtcttttgtcctcggagttgtctccggtgtcattccgtggcaagataccaggtttttgcagagaaggtgctgagttgggaacaggccagtctctttcatctcctgtcctgctcatcgctctcttttcagaatggcttcggttattgcctttccttggtgtactcgcacttcttggctaccttgcagttcgtccattcctcccgaagaagaaacaacagaaggatagcttgattaatcttaaaatacaaaaggaaaatccgaaagtagtgaatgaaataaacattgaagatttgtgtcttactaaagcagcttattgtaggtgttggcgttctaaaacgtttcctgcctgcgatggttcacataataaacacaatgaattgacaggagataatgtgggtccactaatactgaagaagaaagaagtataataataataacaatattttctcattctttgtgtatagaaaattttaaaatggtggtcttaattattactactggttgaacaattatttcttccaatttattttcttcctgcactactgtttgtatttgatcctttgtctattcagtcacttaattagaaattaaattgtcaagcctcttattctgacttcaaagaattaatgtatcttccaacaataaaatcacttctgattttaatctaggaaaacctaaattgtggctatggatccaaagctgtttgtttctttgaatatcaatattttcaacaggatcttgtatttaaaattcccacctacattgttaaatatgttattttttcatatctcttttggttttgataatctgaagtgtttttttctcgttttggccttccaaactgcatttggttaggtgaattaagaaaaatattgccatcaagaattacttgtgttttcacagagatagactctttgctttatagagattgttgtgtatttaatatgaatatcccagctttagaaaagaagtaaactggatacaaaaagttccattgaggaacagttatttacagtataaaagatttgtttactttacaaaaggcttgtgtctgtgtgtgtgtgtgtgtgtgtgtgtgtgtatttaaactgactcagtgacagctggggtggaatggcaagaacacttacaaccaaactcatgggctgctgcaatttgaagatcaattggtaataaacataagacattaattcatattaaaatagttcagtgttcaaaattgtgtttatgtggatatttttctctttttaacactataaaccattaaaatacagtcatcccttgtatacgctagggactggttccagggccacacatataccaaaatctgcccatactcaagtcccacagaaagtcttgcagaacccatatgtagaaaagttggccctccagttgaccctccgtacacatgagtttcacatcccatgcacaaatgctgatctgtgtgacctcacctgcatttgattgaaaaaagtatgcgcgtaagtgtacccacccagttcaaacccgtgtgtaagggtcaactgtacaaaaaagtttgtgaaataaacgtactggagaatctttaaatttttgtgctttttaatcctactattatgaatctttttagtttcatcttacattactactctcataatagctatccttagccaggtgccatggcacaggcctgtagtcccaact

SEQ ID NO: 382693 - DNA, 1867 bp, Homo sapiens
aggccgccagtgcccgccggccgcttccgctcccggcgcaggcgctgcagcttggccagagcggagggggctcgggagaggagtggacgccgctggccaggatggtgctggagagcgtggcccgtatcgtgaaggtgcagctccctgcatatctgaagcggctcccagtccctgaaagcattaccgggttcgctaggctcacagagtcttgctcttgtcacccaggctggagtgcaatggcatgatctcggctcactgcaacccctgcctcctgaattcaagcgattctcctgcctcagcctcccagtttcagaatggcttcggttattgcctttccttggtgtactcgcacttcttggctaccttgcagttcgtccattcctcccgaagaagaaacaacagaaggatagcttgattaatcttaaaatacaaaaggaaaatccgaaagtagtgaatgaaataaacattgaagatttgtgtcttactaaagcagcttattgtaggtgttggcgttctaaaacgtttcctgcctgcgatggttcacataataaacacaatgaattgacaggagataatgtgggtccactaatactgaagaagaaagaagtataataataataacaatattttctcattctttgtgtatagaaaattttaaaatggtggtcttaattattactactggttgaacaattatttcttccaatttattttcttcctgcactactgtttgtatttgatcctttgtctattcagtcacttaattagaaattaaattgtcaagcctcttattctgacttcaaagaattaatgtatcttccaacaataaaatcacttctgattttaatctaggaaaacctaaattgtggctatggatccaaagctgtttgtttctttgaatatcaatattttcaacaggatcttgtatttaaaattcccacctacattgttaaatatgttattttttcatatctcttttggttttgataatctgaagtgtttttttctcgttttggccttccaaactgcatttggttaggtgaattaagaaaaatattgccatcaagaattacttgtgttttcacagagatagactctttgctttatagagattgttgtgtatttaatatgaatatcccagctttagaaaagaagtaaactggatacaaaaagttccattgaggaacagttatttacagtataaaagatttgtttactttacaaaaggcttgtgtctgtgtgtgtgtgtgtgtgtgtgtgtgtgtatttaaactgactcagtgacagctggggtggaatggcaagaacacttacaaccaaactcatgggctgctgcaatttgaagatcaattggtaataaacataagacattaattcatattaaaatagttcagtgttcaaaattgtgtttatgtggatatttttctctttttaacactataaaccattaaaatacagtcatcccttgtatacgctagggactggttccagggccacacatataccaaaatctgcccatactcaagtcccacagaaagtcttgcagaacccatatgtagaaaagttggccctccagttgaccctccgtacacatgagtttcacatcccatgcacaaatgctgatctgtgtgacctcacctgcatttgattgaaaaaagtatgcgcgtaagtgtacccacccagttcaaacccgtgtgtaagggtcaactgtacaaaaaagtttgtgaaataaacgtactggagaatctttaaatttttgtgctttttaatcctactattatgaatctttttagtttcatcttacattactactctcataatagctatccttagccaggtgccatggcacaggcctgtagtcccaact

SEQ ID NO: 382694 - DNA, 1725 bp, Homo sapiens
tttggtagagctggctttattgtgttatttattcacagttttatggatccattaaaaaggaattaatgtaaaaagtaacaaagaataagctcaaggatgaaacgacatgctattttgaattcttttccaagagcactgcagattctgacacatctacatgtttagtttcagaatggcttcggttattgcctttccttggtgtactcgcacttcttggctaccttgcagttcgtccattcctcccgaagaagaaacaacagaaggatagcttgattaatcttaaaatacaaaaggaaaatccgaaagtagtgaatgaaataaacattgaagatttgtgtcttactaaagcagcttattgtaggtgttggcgttctaaaacgtttcctgcctgcgatggttcacataataaacacaatgaattgacaggagataatgtgggtccactaatactgaagaagaaagaagtataataataataacaatattttctcattctttgtgtatagaaaattttaaaatggtggtcttaattattactactggttgaacaattatttcttccaatttattttcttcctgcactactgtttgtatttgatcctttgtctattcagtcacttaattagaaattaaattgtcaagcctcttattctgacttcaaagaattaatgtatcttccaacaataaaatcacttctgattttaatctaggaaaacctaaattgtggctatggatccaaagctgtttgtttctttgaatatcaatattttcaacaggatcttgtatttaaaattcccacctacattgttaaatatgttattttttcatatctcttttggttttgataatctgaagtgtttttttctcgttttggccttccaaactgcatttggttaggtgaattaagaaaaatattgccatcaagaattacttgtgttttcacagagatagactctttgctttatagagattgttgtgtatttaatatgaatatcccagctttagaaaagaagtaaactggatacaaaaagttccattgaggaacagttatttacagtataaaagatttgtttactttacaaaaggcttgtgtctgtgtgtgtgtgtgtgtgtgtgtgtgtgtatttaaactgactcagtgacagctggggtggaatggcaagaacacttacaaccaaactcatgggctgctgcaatttgaagatcaattggtaataaacataagacattaattcatattaaaatagttcagtgttcaaaattgtgtttatgtggatatttttctctttttaacactataaaccattaaaatacagtcatcccttgtatacgctagggactggttccagggccacacatataccaaaatctgcccatactcaagtcccacagaaagtcttgcagaacccatatgtagaaaagttggccctccagttgaccctccgtacacatgagtttcacatcccatgcacaaatgctgatctgtgtgacctcacctgcatttgattgaaaaaagtatgcgcgtaagtgtacccacccagttcaaacccgtgtgtaagggtcaactgtacaaaaaagtttgtgaaataaacgtactggagaatctttaaatttttgtgctttttaatcctactattatgaatctttttagtttcatcttacattactactctcataatagctatccttagccaggtgccatggcacaggcctgtagtcccaact

SEQ ID NO: 382695 - DNA, 1408 bp, Homo sapiens
aaatgtttctacctaatgaatcatattttaaaaataacacttgtaattcttttttctttttagtttcctgcctgcgatggttcacataataaacacaatgaattgacaggagataatgtgggtccactaatactgaagaagaaagaagtataataataataacaatattttctcattctttgtgtatagaaaattttaaaatggtggtcttaattattactactggttgaacaattatttcttccaatttattttcttcctgcactactgtttgtatttgatcctttgtctattcagtcacttaattagaaattaaattgtcaagcctcttattctgacttcaaagaattaatgtatcttccaacaataaaatcacttctgattttaatctaggaaaacctaaattgtggctatggatccaaagctgtttgtttctttgaatatcaatattttcaacaggatcttgtatttaaaattcccacctacattgttaaatatgttattttttcatatctcttttggttttgataatctgaagtgtttttttctcgttttggccttccaaactgcatttggttaggtgaattaagaaaaatattgccatcaagaattacttgtgttttcacagagatagactctttgctttatagagattgttgtgtatttaatatgaatatcccagctttagaaaagaagtaaactggatacaaaaagttccattgaggaacagttatttacagtataaaagatttgtttactttacaaaaggcttgtgtctgtgtgtgtgtgtgtgtgtgtgtgtgtgtatttaaactgactcagtgacagctggggtggaatggcaagaacacttacaaccaaactcatgggctgctgcaatttgaagatcaattggtaataaacataagacattaattcatattaaaatagttcagtgttcaaaattgtgtttatgtggatatttttctctttttaacactataaaccattaaaatacagtcatcccttgtatacgctagggactggttccagggccacacatataccaaaatctgcccatactcaagtcccacagaaagtcttgcagaacccatatgtagaaaagttggccctccagttgaccctccgtacacatgagtttcacatcccatgcacaaatgctgatctgtgtgacctcacctgcatttgattgaaaaaagtatgcgcgtaagtgtacccacccagttcaaacccgtgtgtaagggtcaactgtacaaaaaagtttgtgaaataaacgtactggagaatctttaaatttttgtgctttttaatcctactattatgaatctttttagtttcatcttacattactactctcataatagctatccttagccaggtgccatggcacaggcctgtagtcccaact

SEQ ID NO: 382696 - DNA, 890 bp, Homo sapiens
gtcagtaggccttatttctcttgtcctttcgtacaggtaggaatttgaagtagatgaaaccgacctggattactccggtctgaactcagatcacgtaagacataaccgcggccgcggttatgtcttacgtagagattgttgtgtatttaatatgaatatcccagctttagaaaagaagtaaactggatacaaaaagttccattgaggaacagttatttacagtataaaagatttgtttactttacaaaaggcttgtgtctgtgtgtgtgtgtgtgtgtgtgtgtgtgtatttaaactgactcagtgacagctggggtggaatggcaagaacacttacaaccaaactcatgggctgctgcaatttgaagatcaattggtaataaacataagacattaattcatattaaaatagttcagtgttcaaaattgtgtttatgtggatatttttctctttttaacactataaaccattaaaatacagtcatcccttgtatacgctagggactggttccagggccacacatataccaaaatctgcccatactcaagtcccacagaaagtcttgcagaacccatatgtagaaaagttggccctccagttgaccctccgtacacatgagtttcacatcccatgcacaaatgctgatctgtgtgacctcacctgcatttgattgaaaaaagtatgcgcgtaagtgtacccacccagttcaaacccgtgtgtaagggtcaactgtacaaaaaagtttgtgaaataaacgtactggagaatctttaaatttttgtgctttttaatcctactattatgaatctttttagtttcatcttacattactactctcataatagctatccttagccaggtgccatggcacaggcctgtagtcccaact

SEQ ID NO: 382697 - DNA, 621 bp, Homo sapiens
aggccgccagtgcccgccggccgcttccgctcccggcgcaggcgctgcagcttggccagagcggagggggctcgggagaggagtggacgccgctggccaggatggtgctggagagcgtggcccgtatcgtgaaggtgcagctccctgcatatctgaagcggctcccagtccctgaaagcattaccgggttcgctaggctcacagtttcagaatggcttcggttattgcctttccttggtgtactcgcacttcttggctaccttgcagttcgtccattcctcccgaagaagaaacaacagaaggatagcttgattaatcttaaaatacaaaaggaaaatccgaaagtagtgaatgaaataaacattgaagatttgtgtcttactaaagcagcttattgtaggtgttggcgttctaaaacggtaagatgtctgtttacgtgtacactaaaattttgcagtgctaggattgtttcgcctcttaaatccccagttttgaagttctttaagatgagagaattttctgtaatatttggtattgaaagaccatattcctaaattgaagttttcatgtcatgatagatactacctacattagaaaagttggagcagcaaagaagaataa

SEQ ID NO: 382698 - DNA, 1764 bp, Homo sapiens
aggccgccagtgcccgccggccgcttccgctcccggcgcaggcgctgcagcttggccagagcggagggggctcgggagaggagtggacgccgctggccaggatggtgctggagagcgtggcccgtatcgtgaaggtgcagctccctgcatatctgaagcggctcccagtccctgaaagcattaccgggttcgctaggctcacagtttcagaatggcttcggttattgcctttccttggtgtactcgcacttcttggctaccttgcagttcgtccattcctcccgaagaagaaacaacagaaggatagcttgattaatcttaaaatacaaaaggaaaatccgaaagtagtgaatgaaataaacattgaagatttgtgtcttactaaagcagcttattgtaggtgttggcgttctaaaacgtttcctgcctgcgatggttcacataataaacacaatgaattgacaggagataatgtgggtccactaatactgaagaagaaagaagtataataataataacaatattttctcattctttgtgtatagaaaattttaaaatggtggtcttaattattactactggttgaacaattatttcttccaatttattttcttcctgcactactgtttgtatttgatcctttgtctattcagtcacttaattagaaattaaattgtcaagcctcttattctgacttcaaagaattaatgtatcttccaacaataaaatcacttctgattttaatctaggaaaacctaaattgtggctatggatccaaagctgtttgtttctttgaatatcaatattttcaacaggatcttgtatttaaaattcccacctacattgttaaatatgttattttttcatatctcttttggttttgataatctgaagtgtttttttctcgttttggccttccaaactgcatttggttaggtgaattaagaaaaatattgccatcaagaattacttgtgttttcacagagatagactctttgctttatagagattgttgtgtatttaatatgaatatcccagctttagaaaagaagtaaactggatacaaaaagttccattgaggaacagttatttacagtataaaagatttgtttactttacaaaaggcttgtgtctgtgtgtgtgtgtgtgtgtgtgtgtgtgtatttaaactgactcagtgacagctggggtggaatggcaagaacacttacaaccaaactcatgggctgctgcaatttgaagatcaattggtaataaacataagacattaattcatattaaaatagttcagtgttcaaaattgtgtttatgtggatatttttctctttttaacactataaaccattaaaatacagtcatcccttgtatacgctagggactggttccagggccacacatataccaaaatctgcccatactcaagtcccacagaaagtcttgcagaacccatatgtagaaaagttggccctccagttgaccctccgtacacatgagtttcacatcccatgcacaaatgctgatctgtgtgacctcacctgcatttgattgaaaaaagtatgcgcgtaagtgtacccacccagttcaaacccgtgtgtaagggtcaactgtacaaaaaagtttgtgaaataaacgtactggagaatctttaaatttttgtgctttttaatcctactattatgaatctttttagtttcatcttacattactactctcataatagctatccttagccaggtgccatggcacaggcctgtagtcccaact

SEQ ID NO: 382699 - DNA, 1416 bp, Homo sapiens
  misc_feature (1281)..(1281): n is a, c, g, or t
aggccgccagtgcccgccggccgcttccgctcccggcgcaggcgctgcagcttggccagagcggagggggctcgggagaggagtggacgccgctggccaggatggtgctggagagcgtggcccgtatcgtgaaggtgcagctccctgcatatctgaagcggctcccagtccctgaaagcattaccgggttcgctaggctcacagtttcagaatggcttcggttattgcctttccttggtgtactcgcacttcttggctaccttgcagttcgtccattcctcccgaagaagaaacaacagaaggatagcttgattaatcttaaaatacaaaaggaaaatccgaaagtagtgaatgaaataaacattgaagatttgtgtcttactaaagcagcttattgtaggtgttggcgttctaaaacgtttcctgcctgcgatggttcacataataaacacaatgaattgacaggagataatgtgggtccactaatactgaagaagaaagaagtataataataataacaatattttctcattctttgtgtatagaaaattttaaaatggtggtcttaattattactactggttgaacaattatttcttccaatttattttcttcctgcactactgtttgtatttgatcctttgtctattcagtcacttaattagaaattaaattgtcaagcctcttattctgacttcaaagaattaatgtatcttccaacaataaaatcacttctgattttaatctaggaaaacctaaattgtggctatggatccaaagctgtttgtttctttgaatatcaatattttcaacaggatcttgtatttaaaattcccacctacattgttaaatatgttattttttcatatctcttttggttttgataatctgaagtgtttttttctcgttttggccttccaaactgcatttggttaggtgaattaagaaaaatattgccatcaagaattacttgtgttttcacagagatagactctttgctttatagagattgttgtgtatttaatatgaatatcccagctttagaaaagaagtaaactggatacaaaaagttccattgaggaacagttatttacagtataaaagatttgtttactttacaaaaggcttgtgtctgtgtgtgtgtgtgtgtgtgtgtgtgtgtatttaaactgactcagtgacagctggggtggaatggcaagaacacttacaaccaaactcatgggctgcattgagatatggtataacttagacttatctttaaattgtcgtgtcaaaaanaaaaaggggggcaaattacccaggcagttcgctccgttttacaagggcttaggctaaaagacgggtaaacgaggaaccctggctggacctctgggcaggcccccaaaccggaaattgcatctccgtgttaatctt

SEQ ID NO: 382700 - DNA, 1277 bp, Homo sapiens
aggccgccagtgcccgccggccgcttccgctcccggcgcaggcgctgcagcttggccagagcggagggggctcgggagaggagtggacgccgctggccaggatggtgctggagagcgtggcccgtatcgtgaaggtgcagctccctgcatatctgaagcggctcccagtccctgaaagcattaccgggttcgctaggctcacagtttcagaatggcttcggttattgcctttccttggtgtactcgcacttcttggctaccttgcagttcgtccattcctcccgaagaagaaacaacagaaggatagcttgattaatcttaaaatacaaaaggaaaatccgaaagtagtgaatgaaataaacattgaagatttgtgtcttactaaagcagcttattgtaggtgttggcgttctaaaacgtttcctgcctgcgatggttcacataataaacacaatgaattgacaggagataatgtgggtccactaatactgaagaagaaagaagtataataataataacaatattttctcattctttgtgtatagaaaattttaaaatggtggtcttaattattactactggttgaacaattatttcttccaatttattttcttcctgcactactgtttgtatttgatcctttgtctattcagtcacttaattagaaattaaattgtcaagcctcttattctgacttcaaagaattaatgtatcttccaacaataaaatcacttctgattttaatctaggaaaacctaaattgtggctatggatccaaagctgtttgtttctttgaatatcaatattttcaacaggatcttgtatttaaaattcccacctacattgttaaatatgttattttttcatatctcttttggttttgataatctgaagtgtttttttctcgttttggccttccaaactgcatttggttaggtgaattaagaaaaatattgccatcaagaattacttgtgttttcacagagatagactctttgctttatagagattgttgtgtatttaatatgaatatcccagctttagaaagagtactgctccacagtccctgaggaccgctcttacggctcccgattgttccttacaacgccggtctgctgcgcgccgcgggctggcgcggctttacaccgcccgccaccgcgggaggccaactcacccaacctggctggccgcaattgaccacacacctcacttcaacggccaaagtgggctccaaacaaaaaccctcacggaggcaaaacgccacgaataaaaccaca

SEQ ID NO: 382701 - DNA, 1616 bp, Homo sapiens
gtgaatctctggggccaggaagaccctgctgcccggaagagcctcatgttccgtgggggctgggcggacatacatatacgggctccaggctgaacggctcgggccacttacacaccactgcctgataaccatgctggctgccacagtcctgaccctggccctgctgggcaatgcccatgcctgctccaaaggcacctcgcacgaggcaggcatcgtgtgccgcatcaccaagcctgccctcctggtgttgaaccacgagactgccaaggtgatccagaccgccttccagcgagccagctacccagatatcacgggcgagaaggccatgatgctccttggccaagtcaagtatgggttgcacaacatccagatcagccacttgtccatcgccagcagccaggtggagctggtggaagccaagtccattgatgtctccattcagaacgtgtctgtggtcttcaaggggaccctgaagtatggctacaccactgcctggtggctgggtattgatcagtccattgacttcgagatcgactctgccattgacctccagatcaacacacagctgacctgtgactctggtagagtgcggaccgatgcccctgactgctacctgtctttccataagctgctcctgcatctccaaggggagcgagagcctgggtggatcaagcagctgttcacaaatttcatctccttcaccctgaagctggtcctgaagggacagatctgcaaagagatcaacgtcatctctaacatcatggccgattttgtccagacaagggctgccagcatcctttcagatggagacattggggtggacatttccctgacaggtgatcccgtcatcacagcctcctacctggagtcccatcacaaggcagtgctggagacctggggcttcaacaccaaccaggaaatcttccaagaggttgtcggcggcttccccagccaggcccaagtcaccgtccactgcctcaagatgcccaagatctcctgccaaaacaagggagtcgtggtcaattcttcagtgatggtgaaattcctctttccacgcccagaccagcaacattctgtagcttacacatttgaagaggatatcgtgactaccgtccaggcctcctattctaagaaaaagctcttcttaagcctcttggatttccagattacaccaaagactgtttccaacttgactgagagcagctccgagtccgtccagagcttcctgcagtcaatgatcaccgctgtgggcatccctgaggtcatgtctcggctcgaggtagtgtttacagccctcatgaacagcaaaggcgtgagcctcttcgacatcatcaaccctgagattatcactcgagatggcttcctgctgctgcagatggactttggcttccctgagcacctgctggtggatttcctccagagcttgagctagaagtctccaaggaggtcgggatggggcttgtagcagaaggcaagcaccaggctcacagctggaaccctggtgtctcctccagcgtggtggaagttgggttaggagtacggagatggagattggctcccaactcctccctatcctaaaggcccactggcattaaagtgctgtatccaagaaaagc

SEQ ID NO: 382702 - DNA, 375 bp, Homo sapiens
ggaagagacttgtgcgaggtcacacagcatgtgtggggcacagtggggagcagaagccaggcctccagccgggacaggggttccctgttccacaccctgcccagagcatctcacatgttgtctgggaggttgggagttgcgtctgaggaggggtccagtccttgaaactgcccttggtccctgcgaagttttcttctgaggagtggactttactccacccaccctccaacttcctcatttcttttcaggcagtgctggagacctggggcttcaacaccaaccaggaaatcttccaagaggtaactgccccctgcccctgtgtggggtttatctcacgtaccccaatcctgctctggcttcaagagcccccacaca

SEQ ID NO: 382703 - DNA, 472 bp, Homo sapiens
caattcttcagtgatggtgaaattcctctttccacgcccagaccagcaacattctgtagcttacacatttgaagaggtgaggcgggtgcagggagaggtggtggtgggggaacctgactcacatatgggccgcagagggcaggggcctgggggtctctgaagcctccagatccttctcaccacctctgctggcactggttgtctcttgcacatggctccttacaatcaaaatcacatcatgcaagtaacgagggggtacacacgtggtttccacagcttaggtaatattttctctcttttcttatttttattttttttagagacagggtctcactctgtcatccaggctggagtgcagcctcacactcatagctcactgcagcctcgaatcctgggctcgagtgatcctcccacctcagccctcctgagtagctgggaccacagacaaacaccaccacacctggctaattta

SEQ ID NO: 382704 - DNA, 1796 bp, Homo sapiens
gtgaatctctggggccaggaagaccctgctgcccggaagagcctcatgttccgtgggggctgggcggacatacatatacgggctccaggctgaacggctcgggccacttacacaccactgcctgataaccatgctggctgccacagtcctgaccctggccctgctgggcaatgcccatgcctgctccaaaggcacctcgcacgaggcaggcatcgtgtgccgcatcaccaagcctgccctcctggtgttgaaccacgagactgccaaggtgatccagaccgccttccagcgagccagctacccagatatcacgggcgagaaggccatgatgctccttggccaagtcaagtatgggttgcacaacatccagatcagccacttgtccatcgccagcagccaggtggagctggtggaagccaagtccattgatgtctccattcagaacgtgtctgtggtcttcaaggggaccctgaagtatggctacaccactgcctggtggctgggtattgatcagtccattgacttcgagatcgactctgccattgacctccagatcaacacacagctgacctgtgactctggtagagtgcggaccgatgcccctgactgctacctgtctttccataagctgctcctgcatctccaaggggagcgagagcctgggtggatcaagcagctgttcacaaatttcatctccttcaccctgaagctggtcctgaagggacagatctgcaaagagatcaacgtcatctctaacatcatggccgattttgtccagacaagggctgccagcatcctttcagatggagacattggggtggacatttccctgacaggtgatcccgtcatcacagcctcctacctggagtcccatcacaagggtcatttcatctacaagaatgtctcagaggacctccccctccccaccttctcgcccacactgctgggggactcccgcatgctgtacttctggttctctgagcgagtcttccactcgctggccaaggtagctttccaggatggccgcctcatgctcagcctgatgggagacgagttcaaggcagtgctggagacctggggcttcaacaccaaccaggaaatcttccaagaggttgtcggcggcttccccagccaggcccaagtcaccgtccactgcctcaagatgcccaagatctcctgccaaaacaagggagtcgtggtcaattcttcagtgatggtgaaattcctctttccacgcccagaccagcaacattctgtagcttacacatttgaagaggatatcgtgactaccgtccaggcctcctattctaagaaaaagctcttcttaagcctcttggatttccagattacaccaaagactgtttccaacttgactgagagcagctccgagtccgtccagagcttcctgcagtcaatgatcaccgctgtgggcatccctgaggtcatgtctcggctcgaggtagtgtttacagccctcatgaacagcaaaggcgtgagcctcttcgacatcatcaaccctgagattatcactcgagatggcttcctgctgctgcagatggactttggcttccctgagcacctgctggtggatttcctccagagcttgagctagaagtctccaaggaggtcgggatggggcttgtagcagaaggcaagcaccaggctcacagctggaaccctggtgtctcctccagcgtggtggaagttgggttaggagtacggagatggagattggctcccaactcctccctatcctaaaggcccactggcattaaagtgctgtatccaagaaaagc

SEQ ID NO: 382705 - DNA, 869 bp, Homo sapiens
gtgaatctctggggccaggaagaccctgctgcccggaagagcctcatgttccgtgggggctgggcggacatacatatacgggctccaggctgaacggctcgggccacttacacaccactgcctgataaccatgctggctgccacagtcctgaccctggccctgctgggcaatgcccatgcctgctccaaaggcacctcgcacgaggcaggcatcgtgtgccgcatcaccaagcctgccctcctggtgttgaaccacgagactgccaaggtgatccagaccgccttccagcgagccagctacccagatatcacgggcgagaaggccatgatgctccttggccaagtcaagtatgggttgcacaacatccagatcagccacttgtccatcgccagcagccaggtggagctggtggaagccaagtccattgatgtctccattcagaacgtgtctgtggtcttcaaggggaccctgaagtatggctacaccactgcctggtggctgggtattgatcagtccattgacttcgagatcgactctgccattgacctccagatcaacacacagctgacctgtgactctggtagagtgcggaccgatgcccctgactgctacctgtctttccataagctgctcctgcatctccaaggggagcgagaagcctgggttggatccaaggcagctgttcacaaaatttcatcttccttcaacccctgaaagctgggtccctgaacagggaccggaatcctgccaagggagaattcaacgctcacttcttcttaaaccattcatgggcgccggaatttttgggctcccaggacccaggtgtcctggcccaggcattcccttttccacgcaatcggcacgcaca

SEQ ID NO: 382706 - DNA, 434 bp, Homo sapiens
tacccctaaggccaagctcagcaaatagtagactcctgttgtagatggaatcttatacatcatctagaatagatattttatagaaggcaactgatgacgaatgattgttttatgaagttttaaaatgtaaaaaaatcttacaacctgtggctgtttcacaggcccatgcgatcttatcagaacagtggcatcatattttcttcctacataataacaacaatataatcagattacattggagtagtaaaaaaatgtgctggatatatctgttaatatttcttcctagttatgaagtatagaaataaaacaattatgttattaaagagaagattttggctaaaatagaaaataaagatctgtataattctatatacatatagattgatgtaaataaataattttatttactaagaataaaagtactctctaattag

SEQ ID NO: 382707 - DNA, 385 bp, Homo sapiens
agcagagtctcctgtgggtttgcaatcttcagtccagaatttggccatgggggtagagacggcctggaatcacacaagttattgattggcttatgcctcaccttctgtgcttgcataaagccaggtgtaagaactgcagggctggctactgggaaatgacagggtgtgcctgtctttcaaatgagtgcccatctgggtgagcagactgttttcaacagcttgatagcagcatcacaatttttccatctatattacattcggcagagaagagttgtatatataaaacaaaaaccaaaatcctacagattcttattttctctatctcccagattaactcagaaatctttttgcccaaacttaaataaagccatgtttaataatcata

SEQ ID NO: 382708 - DNA, 331 bp, Homo sapiens
gatactattatgtttgacttcagctacaaatcctgtcaatcctaagtgctattggatttcagaggagggagaagtgttaagatgtccagcgcccttctctttacctaagctctttaaaggtcagtttgagcagaacattgagcatcacggagattactaatattcctttcattagaaacaaagagattctgaggtcaggtaattagaatcatgaacaacccatgtgaattcttctgtgtttatgtgtctgtgtttgctcacacgtgtgcacacactcacatgtgcacatgttccatacattcattcaggaatcaaatattaggcaactact

SEQ ID NO: 382709 - DNA, 3621 bp, Homo sapiens
cccacagggggaccggccctgtgacccctcaccggggccgtgggcccgagccccggacttccctaagccggcaatgaccgcctgcgcccgccgagcgggtgggcttccggaccccgggctctgcggtcccgcgtggtgggctccgtccctgccccgcctcccccgggccctgccccggctcccgctcctgctgctcctgcttctgctgcagccccccgccctctccgccgtgttcacggtgggggtcctgggcccctgggcttgcgaccccatcttctctcgggctcgcccggacctggccgcccgcctggccgccgcccgcctgaaccgcgaccccggcctggcaggcggtccccgcttcgaggtagcgctgctgcccgagccttgccggacgccgggctcgctgggggccgtgtcctccgcgctggcccgcgtgtcgggcctcgtgggtccggtgaaccctgcggcctgccggccagccgagctgctcgccgaagaagccgggatcgcgctggtgccctggggctgcccctggacgcaggcggagggcaccacggcccctgccgtgacccccgccgcggatgccctctacgccctgcttcgcgcattcggctgggcgcgcgtggccctggtcaccgccccccaggacctgtgggtggaggcgggacgctcactgtccacggcactcagggcccgggggctgcctgtcgcctccgtgacttccatggagcccttggacctgtctggagcccgggaggccctgaggaaggttcgggacgggcccagggtcacagcagtgatcatggtgatgcactcggtgctgctgggtggcgaggagcagcgctacctcctggaggccgcagaggagctgggcctgaccgatggctccctggtcttcctgcccttcgacacgatccactacgccttgtccccaggcccggaggccttggccgcactcgccaacagctcccagcttcgcagggcccacgatgccgtgctcaccctcacgcgccactgtccctctgaaggcagcgtgctggacagcctgcgcagggctcaagagcgccgcgagctgccctctgacctcaatctgcagcaggtctccccactctttggcaccatctatgacgcggtcttcttgctggcaaggggcgtggcagaagcgcgggctgccgcaggtggcagatgggtgtccggagcagctgtggcccgccacatccgggatgcgcaggtccctggcttctgcggggacctaggaggagacgaggagcccccattcgtgctgctagacacggacgcggcgggagaccggctttttgccacatacatgctggatcctgcccggggctccttcctctccgccggtacccggatgcacttcccgcgtgggggatcagcacccggacctgacccctcgtgctggttcgatccaaacaacatctgcggtggaggactggagccgggcctcgtctttcttggcttcctcctggtggttgggatggggctggctggggccttcctggcccattatgtgaggcaccggctacttcacatgcaaatggtctccggccccaacaagatcatcctgaccgtggacgacatcacctttctccacccacatgggggcacctctcgaaaggtggcccaggggagtcgatcaagtctgggtgcccgcagcatgtcagacattcgcagcggccccagccaacacttggacagccccaacattggtgtctatgagggagacagggtttggctgaagaaattcccaggggatcagcacatagctatccgcccagcaaccaagacggccttctccaagctccaggagctccggcatgagaacgtggccctctacctggggcttttcctggctcggggagcagaaggccctgcggccctctgggagggcaacctggctgtggtctcagagcactgcacgcggggctctcttcaggacctcctcgctcagagagaaataaagctggactggatgttcaagtcctccctcctgctggaccttatcaagggaataaggtatctgcaccatcgaggcgtggctcatgggcggctgaagtcacggaactgcatagtggatggcagattcgtactcaagatcactgaccacggccacgggagactgctggaagcacagaaggtgctaccggagcctcccagagcggaggaccagctgtggacagccccggagctgcttagggacccagccctggagcgccggggaacgctggccggcgacgtctttagcttggccatcatcatgcaagaagtagtgtgccgcagtgccccttatgccatgctggagctcactcccgaggaagtggtgcagagggtgcggagcccccctccactgtgtcggcccttggtgtccatggaccaggcacctgtcgagtgtatcctcctgatgaagcagtgctgggcagagcagccggaacttcggccctccatggaccacaccttcgacctgttcaagaacatcaacaagggccggaagacgaacatcattgactcgatgcttcggatgctggagcagtactctagtaacctggaggatctgatccgggagcgcacggaggagctggagctggaaaagcagaagacagaccggctgcttacacagatgctgcctccgtctgtggctgaggccttgaagacggggacaccagtggagcccgagtactttgagcaagtgacactgtactttagtgacattgtgggcttcaccaccatctctgccatgagtgagcccattgaggttgtggacctgctcaacgatctctacacactctttgatgccatcattggttcccacgatgtctacaaggtggagacaataggggacgcctatatggtggcctcggggctgccccagcggaatgggcagcgacacgcggcagagatcgccaacatgtcactggacatcctcagtgccgtgggcactttccgcatgcgccatatgcctgaggttcccgtgcgcatccgcataggcctgcactcgggtccatgcgtggcaggcgtggtgggcctcaccatgccgcggtactgcctgtttggggacacggtcaacaccgcctcgcgcatggagtccaccgggctgccttaccgcatccacgtgaacttgagcactgtggggattctccgtgctctggactcgggctaccaggtggagctgcgaggccgcacggagctgaagggcaagggcgccgaggacactttctggctagtgggcagacgcggcttcaacaagcccatccccaaaccgcctgacctgcaaccggggtccagcaaccacggcatcagcctgcaggagatcccacccgagcggcgacggaagctggagaaggcgcggccgggccagttctcttgagaagtgaggcccggccccggacagggtctgggccctgctccctgtcccatctgcagtggaccccaggcacccccctttgaggaggtggggtgaactgctccttggcagggatttgtgacactgcattgctgggctgtgttcctcgggctcttctggaccttgcaccgtggataccaggccatgtgccatggtatttgggtcctgggagggtgggtgaaataaaggcatactgtctt

SEQ ID NO: 382710 - DNA, 550 bp, Homo sapiens
tgcattgacctctacctgctaggtggcccaggggagtcgatcaagtctgggtgcccgcagcatgtcagacattcgcagcggccccagccaacacttggacagccccaacattggtgtctatgaggtgagcctgaccccagccagacagagagacagtgggggaagaatgctcaggccctgggcagaggggaggcgcactctcaggaggacatgtagtcatgtcaaatcctgcaggctccaggagatgggggatgggagcccagacaggatctagggaaaggtcatggatccctcaaagggaagcacctaggaatcttccctccccaaggatttttctctagccactatctgggtaagggctcctcaaaagctaaccacagtgacccagagactggaggctggagctgccagggagcatgctgggaccagcaggtaacatggtgtggccactgagaccatctccggcctggtcagagcctctggccctgcccctcagcattccacccaattcagaccagactcaggaatagcaacccctagagggggaaaa

SEQ ID NO: 382711 - DNA, 2025 bp, Homo sapiens
taaaccatactcagtatccaaacagtggcctttgactatattgttttttccaaaaataggactatgtgtagaagagagcccccgtacatactttatcaaccatttcatccaccatttgtaaaaatctcatcttctgggtctggatactcaaaaacagatcttgattaacagccccttccccacattgccctgggcagaaaatgcaagtcaactctccccctctcagctccaggagctccggcatgagaacgtggccctctacctggggcttttcctggctcggggagcagaaggccctgcggccctctgggagggcaacctggctgtggtctcagagcactgcacgcggggctctcttcaggacctcctcgctcagagagaaataaagctggactggatgttcaagtcctccctcctgctggaccttatcaagggaataaggtatctgcaccatcgaggcgtggctcatgggcggctgaagtcacggaactgcatagtggatggcagattcgtactcaagatcactgaccacggccacgggagactgctggaagcacagaaggtgctaccggagcctcccagagcggaggaccagctgtggacagccccggagctgcttagggacccagccctggagcgccggggaacgctggccggcgacgtctttagcttggccatcatcatgcaagaagtagtgtgccgcagtgccccttatgccatgctggagctcactcccgaggaagtggtgcagagggtgcggagcccccctccactgtgtcggcccttggtgtccatggaccaggcacctgtcgagtgtatcctcctgatgaagcagtgctgggcagagcagccggaacttcggccctccatggaccacaccttcgacctgttcaagaacatcaacaagggccggaagacgaacatcattgactcgatgcttcggatgctggagcagtactctagtaacctggaggatctgatccgggagcgcacggaggagctggagctggaaaagcagaagacagaccggctgcttacacagatgctgcctccgtctgtggctgaggccttgaagacggggacaccagtggagcccgagtactttgagcaagtgacactgtactttagtgacattgtgggcttcaccaccatctctgccatgagtgagcccattgaggttgtggacctgctcaacgatctctacacactctttgatgccatcattggttcccacgatgtctacaaggtggagacaataggggacgcctatatggtggcctcggggctgccccagcggaatgggcagcgacacgcggcagagatcgccaacatgtcactggacatcctcagtgccgtgggcactttccgcatgcgccatatgcctgaggttcccgtgcgcatccgcataggcctgcactcgggtccatgcgtggcaggcgtggtgggcctcaccatgccgcggtactgcctgtttggggacacggtcaacaccgcctcgcgcatggagtccaccgggctgccttaccgcatccacgtgaacttgagcactgtggggattctccgtgctctggactcgggctaccaggtggagctgcgaggccgcacggagctgaagggcaagggcgccgaggacactttctggctagtgggcagacgcggcttcaacaagcccatccccaaaccgcctgacctgcaaccggggtccagcaaccacggcatcagcctgcaggagatcccacccgagcggcgacggaagctggagaaggcgcggccgggccagttctcttgagaagtgaggcccggccccggacagggtctgggccctgctccctgtcccatctgcagtggaccccaggcacccccctttgaggaggtggggtgaactgctccttggcagggatttgtgacactgcattgctgggctgtgttcctcgggctcttctggaccttgcaccgtggataccaggccatgtgccatggtatttgggtcctgggagggtgggtgaaataaaggcatactgtctt

SEQ ID NO: 382712 - DNA, 538 bp, Homo sapiens
gcatgcactgggggctgggcttggatggtcaggtgagttccaagtggcaggttttctgggtgcagctgggctcgggccttcagctcgctgtccagcccctgaagggagtgaggactaacctcccaccttgatctagagcctcggacaggtgtgcgtcccagatgggtgacagctgagtgccgcaggagctcggtaggtgcaggggtggggactggcatgtccaagcagcaggacagcgtataaaaaggcctggaagccaagagaacgagctctgcagcgtagggttctcacgggaggtcctgtgcggtcagccttttgcaccctgtggactccgggccagggagggcacacagggctggcaggcccgcggtggctggtgttgaggcatgaacaaattgtaccgggtatcccccaccccactctgaccaccagttcctccttggatatcactccccctgacaggcagcccacccaggcctggatttgtccctgtctcccccttttgcttttcccccatgactaatgggcaccaggtctt

SEQ ID NO: 382713 - DNA, 352 bp, Homo sapiens
acgtttttcttacgtggattgttgtaaccatcctgcgggatctctaacagccttgtcacatcagctttgtccgatcctcctaggagaggatgtactcatcattcccttagctcagcccagttgtacccttgagatctccacatactgcaacatcaaagctaatttttcccccttcttaccacatgaccaaactaaaagacacctgcatgattccccaggtttaaagcaaagaaacccttggtccctgggtggaaaacttggaaaggtaccatcagtcaaggccaagtagcttttcttacatgaggagctgcactggcaggtgagccccgagttggtgtggaggttggcacct

SEQ ID NO: 382714 - DNA, 1492 bp, Homo sapiens
aacatatagtaacatagtgtggtactttgtcttgaggagatgtcctggactcacacggaaacttagggctacggaatgaagacgccaaggatggtggtcatggcgccccgaaccctcttcctgctgctctcgggggccctgaccctgaccgagacctgggcgggctcccactccatgaggtatttcagcgccgccgtgtcccggcccggccgcggggagccccgcttcatcgccatgggctacgtggacgacacgcagttcgtgcggttcgacagcgactcggcgtgtccgaggatggagccgcgggcgccgtgggtggagcaggaggggccagagtattgggaagaggagacacggaacaccaaggcccacgcacagactgacagaatgaacctgcagaccctgcgcggctactacaaccagagcgaggccagttctcacaccctccagtggatgattggctgcgacctggggtccgacggacgcctcctccgcgggtatgaacagtatgcctacgatggcaaggattacctcgccctgaacgaggacctgcgctcctggaccgcagcggacactgcggctcagatctccaagcgcaagtgtgaggcggccaatgtggctgaacaaaggagagcctacctggagggcacgtgcgtggagtggctccacagatacctggagaacgggaaggagatgctgcagcgcgcggacccccccaagacacacgtgacccaccaccctgtctttgactatgaggccaccctgaggtgctgggccctgggcttctaccctgcggagatcatactgacctggcagcgggatggggaggaccagacccaggacgtggagctcgtggagaccaggcctgcaggggatggaaccttccagaagtgggcagctgtggtggtgccttctggagaggagcagagatacacgtgccatgtgcagcatgaggggctgccggagcccctcatgctgagatggaagcagtcttccctgcccaccatccccatcatgggtatcgttgctggcctggttgtccttgcagctgtagtcactggagctgcggtcgctgctgtgctgtggaggaagaagagctcagattgaaaaggagggagctactctcaggctgcaatgtgaaacagctgccctgtgtgggactgagtggcaagtccctttgtgacttcaagaaccctgacttctctttgtgcagagaccagcccacccctgtgcccaccatgaccctcttcctcatgctgaactgcattccttccccaatcacctttcctgttccagaaaaggggctgggatgtctccgtctctgtctcaaatttgtggtccactgagctataacttacttctgtattaaaattagaatctgagtgtaaatttactttttcaaattatttccaagagagattgatgggttaattaaaggagaagattcctgaaatttgagagacaaaataaatggaagacatgagaactttcc

SEQ ID NO: 382715 - DNA, 1615 bp, Homo sapiens
  misc_feature (1069)..(1069): n is a, c, g, or t
aacatatagtaacatagtgtggtactttgtcttgaggagatgtcctggactcacacggaaacttagggctacggaatgaagacgccaaggatggtggtcatggcgccccgaaccctcttcctgctgctctcgggggccctgaccctgaccgagacctgggcgggctcccactccatgaggtatttcagcgccgccgtgtcccggcccggccgcggggagccccgcttcatcgccatgggctacgtggacgacacgcagttcgtgcggttcgacagcgactcggcgtgtccgaggatggagccgcgggcgccgtgggtggagcaggaggggccagagtattgggaagaggagacacggaacaccaaggcccacgcacagactgacagaatgaacctgcagaccctgcgcggctactacaaccagagcgaggccagttctcacaccctccagtggatgattggctgcgacctggggtccgacggacgcctcctccgcgggtatgaacagtatgcctacgatggcaaggattacctcgccctgaacgaggacctgcgctcctggaccgcagcggacactgcggctcagatctccaagcgcaagtgtgaggcggccaatgtggctgaacaaaggagagcctacctggagggcacgtgcgtggagtggctccacagatacctggagaacgggaaggagatgctgcagcgcgcggacccccccaagacacacgtgacccaccaccctgtctttgactatgaggccaccctgaggtgctgggccctgggcttctaccctgcggagatcatactgacctggcagcgggatggggaggaccagacccaggacgtggagctcgtggagaccaggcctgcaggggatggaaccttccagaagtgggcagctgtggtggtgccttctggagaggagcagagatacacgtgccatgtgcagcatgaggggctgccggagcccctcatgctgagatggaagtaaggagggagatggaggcatcatgtctgttagggaaagcaggagcctctctgaagacctttaacagggtcggtggtgaggnctgggggtcagagaccctcaccttcacctcctttcccagagcagtcttccctgcccaccatccccatcatgggtatcgttgctggcctggttgtccttgcagctgtagtcactggagctgcggtcgctgctgtgctgtggaggaagaagagctcagattgaaaaggagggagctactctcaggctgcaatgtgaaacagctgccctgtgtgggactgagtggcaagtccctttgtgacttcaagaaccctgacttctctttgtgcagagaccagcccacccctgtgcccaccatgaccctcttcctcatgctgaactgcattccttccccaatcacctttcctgttccagaaaaggggctgggatgtctccgtctctgtctcaaatttgtggtccactgagctataacttacttctgtattaaaattagaatctgagtgtaaatttactttttcaaattatttccaagagagattgatgggttaattaaaggagaagattcctgaaatttgagagacaaaataaatggaagacatgagaactttcc

SEQ ID NO: 382716 - DNA, 1414 bp, Homo sapiens
aacatatagtaacatagtgtggtactttgtcttgaggagatgtcctggactcacacggaaacttagggctacggaatgaagacgccaaggatggtggtcatggcgccccgaaccctcttcctgctgctctcgggggccctgaccctgaccgagacctgggcgggctcccactccatgaggtatttcagcgccgccgtgtcccggcccggccgcggggagccccgcttcatcgccatgggctacgtggacgacacgcagttcgtgcggttcgacagcgactcggcgtgtccgaggatggagccgcgggcgccgtgggtggagcaggaggggccagagtattgggaagaggagacacggaacaccaaggcccacgcacagactgacagaatgaacctgcagaccctgcgcggctactacaaccagagcgaggccagttctcacaccctccagtggatgattggctgcgacctggggtccgacggacgcctcctccgcgggtatgaacagtatgcctacgatggcaaggattacctcgccctgaacgaggacctgcgctcctggaccgcagcggacactgcggctcagatctccaagcgcaagtgtgaggcggccaatgtggctgaacaaaggagagcctacctggagggcacgtgcgtggagtggctccacagatacctggagaacgggaaggagatgctgcagcgcgcggacccccccaagacacacgtgacccaccaccctgtctttgactatgaggccaccctgaggtgctgggccctgggcttctaccctgcggagatcatactgacctggcagcgggatggggaggaccagacccaggacgtggagctcgtggagaccaggcctgcaggggatggaaccttccagaagtgggcagctgtggtggtgccttctggagaggagcagagatacacgtgccatgtgcagcatgaggggctgccggagcccctcatgctgagatggaagcagtcttccctgcccaccatccccatcatgggtatcgttgctggcctggttgtccttgcagctgtagtcactggagctgcggtcgctgctgtgctgtggaggaagaagagctcagattgaaaaggagggagctactctcaggctgcaaagaccagcccacccctgtgcccaccatgaccctcttcctcatgctgaactgcattccttccccaatcacctttcctgttccagaaaaggggctgggatgtctccgtctctgtctcaaatttgtggtccactgagctataacttacttctgtattaaaattagaatctgagtgtaaatttactttttcaaattatttccaagagagattgatgggttaattaaaggagaagattcctgaaatttgagagacaaaataaatggaagacatgagaactttcc

SEQ ID NO: 382717 - DNA, 940 bp, Homo sapiens
aacatatagtaacatagtgtggtactttgtcttgaggagatgtcctggactcacacggaaacttagggctacggaatgaagacgccaaggatggtggtcatggcgccccgaaccctcttcctgctgctctcgggggccctgaccctgaccgagacctgggcgggctcccactccatgaggtatttcagcgccgccgtgtcccggcccggccgcggggagccccgcttcatcgccatgggctacgtggacgacacgcagttcgtgcggttcgacagcgactcggcgtgtccgaggatggagccgcgggcgccgtgggtggagcaggaggggccagagtattgggaagaggagacacggaacaccaaggcccacgcacagactgacagaatgaacctgcagaccctgcgcggctactacaaccagagcgaggccaagcagtcttccctgcccaccatccccatcatgggtatcgttgctggcctggttgtccttgcagctgtagtcactggagctgcggtcgctgctgtgctgtggaggaagaagagctcagattgaaaaggagggagctactctcaggctgcaatgtgaaacagctgccctgtgtgggactgagtggcaagtccctttgtgacttcaagaaccctgacttctctttgtgcagagaccagcccacccctgtgcccaccatgaccctcttcctcatgctgaactgcattccttccccaatcacctttcctgttccagaaaaggggctgggatgtctccgtctctgtctcaaatttgtggtccactgagctataacttacttctgtattaaaattagaatctgagtgtaaatttactttttcaaattatttccaagagagattgatgggttaattaaaggagaagattcctgaaatttgagagacaaaataaatggaagacatgagaactttcc

SEQ ID NO: 382718 - DNA, 1384 bp, Homo sapiens
aacatatagtaacatagtgtggtactttgtcttgaggagatgtcctggactcacacggaaacttagggctacggaatgaagacgccaaggatggtggtcatggcgccccgaaccctcttcctgctgctctcgggggccctgaccctgaccgagacctgggcgggctcccactccatgaggtatttcagcgccgccgtgtcccggcccggccgcggggagccccgcttcatcgccatgggctacgtggacgacacgcagttcgtgcggttcgacagcgactcggcgtgtccgaggatggagccgcgggcgccgtgggtggagcaggaggggccagagtattgggaagaggagacacggaacaccaaggcccacgcacagactgacagaatgaacctgcagaccctgcgcggctactacaaccagagcgaggccagttctcacaccctccagtggatgattggctgcgacctggggtccgacggacgcctcctccgcgggtatgaacagtatgcctacgatggcaaggattacctcgccctgaacgaggacctgcgctcctggaccgcagcggacactgcggctcagatctccaagcgcaagtgtgaggcggccaatgtggctgaacaaaggagagcctacctggagggcacgtgcgtggagtggctccacagatacctggagaacgggaaggagatgctgcagcgcgcggacccccccaagacacacgtgacccaccaccctgtctttgactatgaggccaccctgaggtgctgggccctgggcttctaccctgcggagatcatactgacctggcagcgggatggggaggaccagacccaggacgtggagctcgtggagaccaggcctgcaggggatggaaccttccagaagtgggcagctgtggtggtgccttctggagaggagcagagatacacgtgccatgtgcagcatgaggggctgccggagcccctcatgctgagatggaagcagtcttccctgcccaccatccccatcatgggtatcgttgctggcctggttgtccttgcagctgtagtcactggagctgcggtcgctgctgtgctgtggaggaagaagagctcagattgaaaaggagggagctactctcaggctgcaatgtgaaacagctgccctgtgtgggactgagtggcaagtccctttgtgacttcaagaaccctgacttctctttgtgcagagaccagcccacccctgtgcccaccatgaccctcttcctcatgctgaactgcattccttccccaatcacctttcctgttccagaaaaggggctgggatgtctccgtctctgtctcaaatttgtggtccactgagctataacttacttctgtattaaaattagaatctgagt

SEQ ID NO: 382719 - DNA, 1315 bp, Homo sapiens
aacatatagtaacatagtgtggtactttgtcttgaggagatgtcctggactcacacggaaacttagggctacggaatgaagacgccaaggatggtggtcatggcgccccgaaccctcttcctgctgctctcgggggccctgaccctgaccgagacctgggcgggctcccactccatgaggtatttcagcgccgccgtgtcccggcccggccgcggggagccccgcttcatcgccatgggctacgtggacgacacgcagttcgtgcggttcgacagcgactcggcgtgtccgaggatggagccgcgggcgccgtgggtggagcaggaggggccagagtattgggaagaggagacacggaacaccaaggcccacgcacagactgacagaatgaacctgcagaccctgcgcggctactacaaccagagcgaggccagttctcacaccctccagtggatgattggctgcgacctggggtccgacggacgcctcctccgcgggtatgaacagtatgcctacgatggcaaggattacctcgccctgaacgaggacctgcgctcctggaccgcagcggacactgcggctcagatctccaagcgcaagtgtgaggcggccaatgtggctgaacaaaggagagcctacctggagggcacgtgcgtggagtggctccacagatacctggagaacgggaaggagatgctgcagcgcgcggacccccccaagacacacgtgacccaccaccctgtctttgactatgaggccaccctgaggtgctgggccctgggcttctaccctgcggagatcatactgacctggcagcgggatggggaggaccagacccaggacgtggagctcgtggagaccaggcctgcaggggatggaaccttccagaagtgggcagctgtggtggtgccttctggagaggagcagagatacacgtgccatgtgcagcatgaggggctgccggagcccctcatgctgagatggagagccatcttcccagcctttctttaccccaatgtagtcttcgtcgtcctgcatactagttctagatgtcctagctgacctaggtgctgtgttggctgttgtgatgtgttggacggtagagctcagttggaaaaggtcgggtgctgctctcaggctgcgtccagcaacagtgcccagggctctgatgagtctctcatcgcttgtaaagcctgagacagctgcctgtgtgggactaagatgcaggatttctccacacctctcctttgtagcaagagatgcagaggctcttgaagtcacgtcgaccgttgccaatttagtagtagtagtaggc

SEQ ID NO: 382720 - DNA, 1264 bp, Homo sapiens
aacatatagtaacatagtgtggtactttgtcttgaggagatgtcctggactcacacggaaacttagggctacggaatgaagacgccaaggatggtggtcatggcgccccgaaccctcttcctgctgctctcgggggccctgaccctgaccgagacctgggcgggctcccactccatgaggtatttcagcgccgccgtgtcccggcccggccgcggggagccccgcttcatcgccatgggctacgtggacgacacgcagttcgtgcggttcgacagcgactcggcgtgtccgaggatggagccgcgggcgccgtgggtggagcaggaggggccagagtattgggaagaggagacacggaacaccaaggcccacgcacagactgacagaatgaacctgcagaccctgcgcggctactacaaccagagcgaggccaacccccccaagacacacgtgacccaccaccctgtctttgactatgaggccaccctgaggtgctgggccctgggcttctaccctgcggagatcatactgacctggcagcgggatggggaggaccagacccaggacgtggagctcgtggagaccaggcctgcaggggatggaaccttccagaagtgggcagctgtggtggtgccttctggagaggagcagagatacacgtgccatgtgcagcatgaggggctgccggagcccctcatgctgagatggaagcagtcttccctgcccaccatccccatcatgggtatcgttgctggcctggttgtccttgcagctgtagtcactggagctgcggtcgctgctgtgctgtggaggaagaagagctcagattgaaaaggagggagctactctcaggctgcaagcagtgacagtgcccagggctctaatgtgtctctcacggcttgtaaattgtgaaacagctgccctgtgtgggactgagtggcaagtccctttgtgacttcaagaaccctgacttctctttgtgcagagaccagcccacccctgtgcccaccatgaccctcttcctcatgctgaactgcattccttccccaatcacctttcctgttccagaaaaggggctgggatgtctccgtctctgtctcaaatttgtggtccactgagctataacttacttctgtattaaaattagaatctgagtgtaaatttactttttcaaattatttccaagagagattgatgggttaattaaaggagaagattcctgaaatttgagagacaaaataaatggaagacatgagaactttcc

SEQ ID NO: 382721 - DNA, 392 bp, Homo sapiens
cataaataaatttgtctgtgtttgaatatacaactacagtcagccctctgtatcaatgggttccatatccatgaatataatcaaccacggatcaaaaacatttggataaaaaaaggatggttgtgtctgtactgaacatgtacagaccttttcatgtcattattccctcaataatatagtgtgtcaactgtttacatagtatttatattgtattaggtattataagtaatctagaaatgatttaaagcatatgtaggatgtgcataaattatatgcaaatactacaccattttatagcagggacttgagtatctgtgaattttggtatcaggagtcccagtaccaatcccctgcagatactaagggatgactgaatatagcttaaaaatggg

SEQ ID NO: 382722 - DNA, 614 bp, Homo sapiens
  misc_feature (22)..(22): n is a, c, g, or t
tgtaatcccaactacctggaangctgaggcagaagaatctctgcctcccaggttcaggcggttctcatgacttagcctcctgagtatctgggattacaggcgtgcaccaccatgcccagctaatttttatatttttaatagacacggggtttcgccatgttggccaggatggtctcgaactcctggcctcgagtgatcttcccactttgacctcccaaattgctggcctttgggaggccaagttgggaagattataggcctggccgacttgtttttttaaagctacctcattgagaatgggcaaagaagttatgttggcatgtggtctcattttccaggactttcccgtgaaatattttaccctgggggcctttgactcaccccattgtaaagtttggcagttttgaaagttcagagggtactttatgggctataaatgcagaaaaacagaaaaactttacctagggtaaatgacataggacctcactgctgtgatcgctctgtctgggtggattgccccttttaaagaaatcttaaacataattagacaaatcttttctgattatcaaaggaacatgctcattattttgatattggaaaatacagaaaattac

SEQ ID NO: 382723 - DNA, 206 bp, Homo sapiens
tctccaaggtcgtacaaaaaccaaagctacaggtctgagagtcttgcttgtgtaccattgagcagatgatagatctaatgtttctaaaattaagtaaaagactaattgagcatatttgtttaaggatttttggtattttataaaataaacttatatgttctctaatctctgaaacgtggtcagatgcagatgctattttaaagacc

SEQ ID NO: 382724 - DNA, 447 bp, Homo sapiens
attaaggttaaaaaaagaaacacccctaaactatgaaactatctttttgctaaggcacttgaataggagcagcaaaaaattaacaaaaaatactgctactgacagttctccatattgagaattttcttcttgacttagtacttttaatttttatagtagctgccactgccattagtggcagttatattttttgtgtttattgaagttgacagtagattgagtttgtgtatttattttgttcctaaagctgattattattaagtgtattttttaaagcatggtttgctcttctataaaccttctggggacaccaccactctcactttcttaagtacaggattatcaacaatgttgctacttactagtttggtctagtccttatgccatagagcattcattgcccaaagcaggaggtaccataaggtcaataaaaaacatggctggtct

SEQ ID NO: 382725 - DNA, 761 bp, Homo sapiens
aaatcatatgatcatgccaatagatacgaagaaagcatttgaaaaaaaccaacgcccatttatgaaaaaaccctaaacaaagtagaaatagaaaagaacatcttcaacctaacgaaggacatctataaagagccaaagataacatcatatttaatggtaaaagaatgaatactttctccctaagatctggaacaaggcaaggacgttgtttttaccacttctagtcaacacggagggtgtttagccagtgcaatgaagcaagaaagagaagctaaaggtgtcaagattggaaagaaagagtaatactgccttgattcacagatgacctaatcctgcatgtaaaaaacactaaagaacacatacacattcattcattcattcattctctctctcctctctctctctctctgtctactggaactaataaattagttttgaaaggtcaccaaatacaaggtcaacattatttctatatgctggcagcaaatgatctaaaaataaaattaagaaaacaatttcatttacaactgcatcaaaaagaaaagatacttagaaataaattttagaagtgcaagtatagtataccaaaaactacaaaacattgctgatagaaattaaagatctaaataaattgagagagattctttgttcatggatttgaagactcaatattgtcaaaattgcaattatattcaaatctataaagtgaacactatacctatcaaaaccattgtagggttttttggtggaaacttacaggc

SEQ ID NO: 382726 - DNA, 434 bp, Homo sapiens
ttcaattacctcccactgtgtcccttctacgacacatagggattacgggagctacaattcaagatgagatttgggtggggacacagccaaaccatatcaattatccagcaaactcaccccgaacacagtcagtcactgctccagccaaactggccttactaagcactcaatctctgcctaacttcattttgccaaatgggtgactaaggccagcaaagtagctcacgagttctgccaactgggaaactcatcccagtgcttcatggaaagcccccaatatgtccatcaggtcagaggagactggtctaatttagggagattcggctggtgctgctgtgctgccctctccccctcacccgctccaccgtcagcactcctgtgcaactcaaaaagccatttgaaaacccccactccggaccactggctcctccaca

SEQ ID NO: 382727 - DNA, 590 bp, Homo sapiens
catatctagattatgcaagaacctctgaattaatctcccaatttccagtcctcttcagtcttcagtcttctcctctagatgcttagatcttggtcctatccttgaccactctctttctttcagaccccttatggaatccaccagaaaatcctgttaccctgtcttcagactaaatctggaatccagcccctgttcaccatgggtcaccactgattgaagcctccagcatctctctgcttaatgcctgcagcagcctcctggctggtctcctctttccctttagcgcctctcatttattctcaacacaatggccagggtgatttttttttaaaactaagtttcaacatgtcactctttgcttaaaacctggccacatccaagtcttcatgatgcctttcatattgatgctctctaacttcatctcttgctactcttctctgcctcactcactgccccaaccccattggcctcctcagtcagttgtgctcctacccagactttgcactgactgatcctccttcctagagcacaccacccctccatagccacatagttaactccctccctttttcaaagtttctcactttctc

SEQ ID NO: 382728 - DNA, 393 bp, Homo sapiens
gaccaatctccatccagtccacactccatccagtccacaccccatcaagatcactactccatccagtccacactccatcctgtctacaccccatccagtccacaccccgtccagtccacaccctgtccagtacacaccccatccagtccacaccccatccagaccacaccccatccagtacacaccccatccagtacacaccccttctagtctacactccatccagaccacaccccattcagtccacgttgcatccagtccacaccccatccagaccacacctcacccagaccacaccccatccagtccacaccccatccagtccacaccccatccagaccacactgtatccagtccacgccccatacagaccataccccatccagaccacac

SEQ ID NO: 382729 - DNA, 2026 bp, Homo sapiens
cgcacggttcccagctaattccccgctaccgggttgcggccggaagccgggcgccgcggctctgcttccctcggggatctggcgacatggccagaaaggctctcaagcttgcttcgtggaccagcatggctcttgctgcctctggcatctacttctacagtaacaagtacttggaccctaatgactttggcgctgtcagggtgggcagagcagttgctacgacggctgtcatcagttacgactacctcacttccctgaagagtgtcccttatggctcagaggagtacttgcagctgagatctaagatccatgatttgttccagagcttcgatgacacccctctggggacggcctccctggcccaggtccacaaggcagtgctgcatgatgggcggacggtggccgtgaaggtccagcacccaaaggtgcgggctcagagctcgaaggacattctcctgatggaggtgctcgttctggctgtgaagcagctgttcccagagtttgagtttatgtggcttgtggatgaagccaagaagaacctgcctttggagctggatttcctcaatgaagggaggaatgctgagaaggtgtcccagatgctcaggcattttgacttcttgaaggtcccccgaatccactgggacctgtccacggagcgggtcctcctgatggagtttgtggatggcgggcaggtcaatgacagagactacatggagaggaacaagatcgacgtcaatgagatctcacgccacctgggcaagatgtatagtgagatgatcttcgtcaatggcttcgtgcactgcgatccccaccccggcaatgtactggtgcggaagcaccccggcacgggaaaggcggagattgtcctgttggaccatgggctttaccagatgctcacggaagaattccgcctgaattactgccacctctggcagtctctgatctggactgacatgaagagagtgaaggagtacagccagcgactgggagccggggatctctaccccttgtttgcctgcatgctgacggcgcgatcgtgggactcggtcaacagaggcatcagccaagctcccgtcactgccactgaggacttagagattcgcaacaacgcggccaactacctcccccagatcagccatctcctcaaccacgtgccgcgccagatgctgctcatcttgaagaccaacgacctgctgcgtggcattgaggccgccctgggcacccgcgccagcgccagctcctttctcaacatgtcacgttgctgcatcagagcgctagctgagcacaagaagaagaatacctgttcattcttcagaaggacccagatctctttcagcgaggccttcaacttatggcagatcaacctccatgagctcatcctgcgtgtgaaggggttgaagctggctgaccgggtcttggccctaatatgctggctgttccctgctccactctgagtggaattgctctccctgccccattctggtgtctttccactcctcagcccctcatcttgcctccacccagctgctccatttttgccacatcgtggcccgcagccccagagtcactgtccatgtcaccatccttctcctcctttggaatcctctccgcacactgtggcccttgtctcagggcccacaagctgaactgtggcatagctctctcttcttctccaagaagactcagcagcctacattcccattcctggtatgtgccattgggttggatgtccccactacttccgttaacccttcccattgtcaagatgtgccacgggtgccactgggggcacactgaacttgtagggagtgtgattttgttggaggtgcacatggtctctgaatttgacagagaacaccttccctttccttgccatgtcaccctccagaggaagtcacacctcagcgaggtggtttggcatctggggccaactccattacagctatgagctcactgctgtcagtgacgtttggtgttttctgtactgtgtttcaataaaaactccttcaaggttgcaggatttgtc

SEQ ID NO: 382730 - DNA, 2230 bp, Homo sapiens
cgcacggttcccagctaattccccgctaccgggttgcggccggaagccgggcgccgcggctctgcttccctcggggatctggcgacatggccagaaaggctctcaagcttgcttcgtggaccagcatggctcttgctgcctctggcatctacttctacagtaacaagtacttggaccctaatgactttggcgctgtcagggtgggcagagcagttgctacgacggctgtcatcagttacgactacctcacttccctgaagagtgtcccttatggctcagaggagtacttgcagctgagatctaaggtgcaccttcgctctgccaggcgtctctgtgagctctgctgtgccaaccggggcaccttcatcaaggtgggccagcacctgggggctctggactacctgttgccagaggagtacaccagcacgctgaaggtactgcacagccaggctccacagagcagcatgcaagagatccgccaggtcatccgagaagatctgggcaaggagatccatgatttgttccagagcttcgatgacacccctctggggacggcctccctggcccaggtccacaaggcagtgctgcatgatgggcggacggtggccgtgaaggtccagcacccaaaggtgcgggctcagagctcgaaggacattctcctgatggaggtgctcgttctggctgtgaagcagctgttcccagagtttgagtttatgtggcttgtggatgaagccaagaagaacctgcctttggagctggatttcctcaatgaagggaggaatgctgagaaggtgtcccagatgctcaggcattttgacttcttgaaggtcccccgaatccactgggacctgtccacggagcgggtcctcctgatggagtttgtggatggcgggcaggtcaatgacagagactacatggagaggaacaagatcgacgtcaatgagatctcacgccacctgggcaagatgtatagtgagatgatcttcgtcaatggcttcgtgcactgcgatccccaccccggcaatgtactggtgcggaagcaccccggcacgggaaaggcggagattgtcctgttggaccatgggctttaccagatgctcacggaagaattccgcctgaattactgccacctctggcagtctctgatctggactgacatgaagagagtgaaggagtacagccagcgactgggagccggggatctctaccccttgtttgcctgcatgctgacggcgcgatcgtgggactcggtcaacagaggcatcagccaagctcccgtcactgccactgaggacttagagattcgcaacaacgcggccaactacctcccccagatcagccatctcctcaaccacgtgccgcgccagatgctgctcatcttgaagaccaacgacctgctgcgtggcattgaggccgccctgggcacccgcgccagcgccagctcctttctcaacatgtcacgttgctgcatcagagcgctagctgagcacaagaagaagaatacctgttcattcttcagaaggacccagatctctttcagcgaggccttcaacttatggcagatcaacctccatgagctcatcctgcgtgtgaaggggttgaagctggctgaccgggtcttggccctaatatgctggctgttccctgctccactctgagtggaattgctctccctgccccattctggtgtctttccactcctcagcccctcatcttgcctccacccagctgctccatttttgccacatcgtggcccgcagccccagagtcactgtccatgtcaccatccttctcctcctttggaatcctctccgcacactgtggcccttgtctcagggcccacaagctgaactgtggcatagctctctcttcttctccaagaagactcagcagcctacattcccattcctggtatgtgccattgggttggatgtccccactacttccgttaacccttcccattgtcaagatgtgccacgggtgccactgggggcacactgaacttgtagggagtgtgattttgttggaggtgcacatggtctctgaatttgacagagaacaccttccctttccttgccatgtcaccctccagaggaagtcacacctcagcgaggtggtttggcatctggggccaactccattacagctatgagctcactgctgtcagtgacgtttggtgttttctgtactgtgtttcaataaaaactccttcaaggttgcaggatttgtc

SEQ ID NO: 382731 - DNA, 1338 bp, Homo sapiens
tcggatagatgtgagtggagaggagctcccacctgcccctcttctctttcagatctcacgccacctgggcaagatgtatagtgagatgatcttcgtcaatggcttcgtgcactgcgatccccaccccggcaatgtactggtgcggaagcaccccggcacgggaaaggcggagattgtcctgttggaccatgggctttaccagatgctcacggaagaattccgcctgaattactgccacctctggcagtctctgatctggactgacatgaagagagtgaaggagtacagccagcgactgggagccggggatctctaccccttgtttgcctgcatgctgacggcgcgatcgtgggactcggtcaacagaggcatcagccaagctcccgtcactgccactgaggacttagagattcgcaacaacgcggccaactacctcccccagatcagccatctcctcaaccacgtgccgcgccagatgctgctcatcttgaagaccaacgacctgctgcgtggcattgaggccgccctgggcacccgcgccagcgccagctcctttctcaacatgtcacgttgctgcatcagagcgctagctgagcacaagaagaagaatacctgttcattcttcagaaggacccagatctctttcagcgaggccttcaacttatggcagatcaacctccatgagctcatcctgcgtgtgaaggggttgaagctggctgaccgggtcttggccctaatatgctggctgttccctgctccactctgagtggaattgctctccctgccccattctggtgtctttccactcctcagcccctcatcttgcctccacccagctgctccatttttgccacatcgtggcccgcagccccagagtcactgtccatgtcaccatccttctcctcctttggaatcctctccgcacactgtggcccttgtctcagggcccacaagctgaactgtggcatagctctctcttcttctccaagaagactcagcagcctacattcccattcctggtatgtgccattgggttggatgtccccactacttccgttaacccttcccattgtcaagatgtgccacgggtgccactgggggcacactgaacttgtagggagtgtgattttgttggaggtgcacatggtctctgaatttgacagagaacaccttccctttccttgccatgtcaccctccagaggaagtcacacctcagcgaggtggtttggcatctggggccaactccattacagctatgagctcactgctgtcagtgacgtttggtgttttctgtactgtgtttcaataaaaactccttcaaggttgcaggatttgtc

SEQ ID NO: 382732 - DNA, 1505 bp, Homo sapiens
cgagactgcgtctcaaggaacaacaacaacaacaaaaaagaaatgggacagaaagttgtaaggccagatgtgggtgactcaccgactcgcagcgatgtcgaggtcccccgaatccactgggacctgtccacggagcgggtcctcctgatggagtttgtggatggcgggcaggtcaatgacagagactacatggagaggaacaagatcgacgtcaatgagatctcacgccacctgggcaagatgtatagtgagatgatcttcgtcaatggcttcgtgcactgcgatccccaccccggcaatgtactggtgcggaagcaccccggcacgggaaaggcggagattgtcctgttggaccatgggctttaccagatgctcacggaagaattccgcctgaattactgccacctctggcagtctctgatctggactgacatgaagagagtgaaggagtacagccagcgactgggagccggggatctctaccccttgtttgcctgcatgctgacggcgcgatcgtgggactcggtcaacagaggcatcagccaagctcccgtcactgccactgaggacttagagattcgcaacaacgcggccaactacctcccccagatcagccatctcctcaaccacgtgccgcgccagatgctgctcatcttgaagaccaacgacctgctgcgtggcattgaggccgccctgggcacccgcgccagcgccagctcctttctcaacatgtcacgttgctgcatcagagcgctagctgagcacaagaagaagaatacctgttcattcttcagaaggacccagatctctttcagcgaggccttcaacttatggcagatcaacctccatgagctcatcctgcgtgtgaaggggttgaagctggctgaccgggtcttggccctaatatgctggctgttccctgctccactctgagtggaattgctctccctgccccattctggtgtctttccactcctcagcccctcatcttgcctccacccagctgctccatttttgccacatcgtggcccgcagccccagagtcactgtccatgtcaccatccttctcctcctttggaatcctctccgcacactgtggcccttgtctcagggcccacaagctgaactgtggcatagctctctcttcttctccaagaagactcagcagcctacattcccattcctggtatgtgccattgggttggatgtccccactacttccgttaacccttcccattgtcaagatgtgccacgggtgccactgggggcacactgaacttgtagggagtgtgattttgttggaggtgcacatggtctctgaatttgacagagaacaccttccctttccttgccatgtcaccctccagaggaagtcacacctcagcgaggtggtttggcatctggggccaactccattacagctatgagctcactgctgtcagtgacgtttggtgttttctgtactgtgtttcaataaaaactccttcaaggttgcaggatttgtc

SEQ ID NO: 382733 - DNA, 1044 bp, Homo sapiens
cgcacggttcccagctaattccccgctaccgggttgcggccggaagccgggcgccgcggctctgcttccctcggggatctggcgacatggccagaaaggctctcaagcttgcttcgtggaccagcatggctcttgctgcctctggcatctacttctacagtaacaagtacttggaccctaatgactttggcgctgtcagggtgggcagagcagttgctacgacggctgtcatcagttacgactacctcacttccctgaagagtgtcccttatggctcagaggagtacttgcagctgagatctaagagtcttgctgtatctcccaggctggagtgcattggcgtgatctcggctcactgcaacctctacctcctgggttcaagtgattctcctgcctcagcctcccaagtagctgggactacagaaatcatggcatgtcacctgtaatttcagtgtgcatctctaaaaactgatatttttctaagttatcatgtgattatctcagctaatgatattaacaggagttctttaatttcatctaatttctatgtgtgttcacttgtccgccaaatgtgctgcctgttggtcttcacattgtccctgagctttgtgcctattttagctgtctctctgaggttagagtgaggccttcttccctgtatctttcagggtatttttttttccttccttccttccttccttccttccttccttccttccttccttccttccttccttccttccttcatttcctccctccctccttcccttcctcccttccttcctttctatttttttttgtttgtttgtgatggagtctcactctgtcacccaggctggagtgcagtggcacaatcttgcaatctccgtctcctgggttcaagcaaatctcctgcctcagcctccagagcagctgggattacaggcatgcaccaccacgcccagctaatttttgtatttttagtagagacaggtttcaccatgttggccaggcttgtcttgaactgctgacctcaagtgatccacctgccttggcctcccaaag

SEQ ID NO: 382734 - DNA, 2348 bp, Homo sapiens
cgcacggttcccagctaattccccgctaccgggttgcggccggaagccgggcgccgcggctctgcttccctcggggatctggcgacatggccagaaaggctctcaagcttgcttcgtggaccagcatggctcttgctgcctctggcatctacttctacagtaacaagtacttggaccctaatgactttggcgctgtcagggtgggcagagcagttgctacgacggctgtcatcagttacgactacctcacttccctgaagagtgtcccttatggctcagaggagtacttgcagctgagatctaagagtcttgctgtatctcccaggctggagtgcattggcgtgatctcggctcactgcaacctctacctcctgggttcaagtgattctcctgcctcagcctcccaagtagctgggactacaggtgcaccttcgctctgccaggcgtctctgtgagctctgctgtgccaaccggggcaccttcatcaaggtgggccagcacctgggggctctggactacctgttgccagaggagtacaccagcacgctgaaggtactgcacagccaggctccacagagcagcatgcaagagatccgccaggtcatccgagaagatctgggcaaggagatccatgatttgttccagagcttcgatgacacccctctggggacggcctccctggcccaggtccacaaggcagtgctgcatgatgggcggacggtggccgtgaaggtccagcacccaaaggtgcgggctcagagctcgaaggacattctcctgatggaggtgctcgttctggctgtgaagcagctgttcccagagtttgagtttatgtggcttgtggatgaagccaagaagaacctgcctttggagctggatttcctcaatgaagggaggaatgctgagaaggtgtcccagatgctcaggcattttgacttcttgaaggtcccccgaatccactgggacctgtccacggagcgggtcctcctgatggagtttgtggatggcgggcaggtcaatgacagagactacatggagaggaacaagatcgacgtcaatgagatctcacgccacctgggcaagatgtatagtgagatgatcttcgtcaatggcttcgtgcactgcgatccccaccccggcaatgtactggtgcggaagcaccccggcacgggaaaggcggagattgtcctgttggaccatgggctttaccagatgctcacggaagaattccgcctgaattactgccacctctggcagtctctgatctggactgacatgaagagagtgaaggagtacagccagcgactgggagccggggatctctaccccttgtttgcctgcatgctgacggcgcgatcgtgggactcggtcaacagaggcatcagccaagctcccgtcactgccactgaggacttagagattcgcaacaacgcggccaactacctcccccagatcagccatctcctcaaccacgtgccgcgccagatgctgctcatcttgaagaccaacgacctgctgcgtggcattgaggccgccctgggcacccgcgccagcgccagctcctttctcaacatgtcacgttgctgcatcagagcgctagctgagcacaagaagaagaatacctgttcattcttcagaaggacccagatctctttcagcgaggccttcaacttatggcagatcaacctccatgagctcatcctgcgtgtgaaggggttgaagctggctgaccgggtcttggccctaatatgctggctgttccctgctccactctgagtggaattgctctccctgccccattctggtgtctttccactcctcagcccctcatcttgcctccacccagctgctccatttttgccacatcgtggcccgcagccccagagtcactgtccatgtcaccatccttctcctcctttggaatcctctccgcacactgtggcccttgtctcagggcccacaagctgaactgtggcatagctctctcttcttctccaagaagactcagcagcctacattcccattcctggtatgtgccattgggttggatgtccccactacttccgttaacccttcccattgtcaagatgtgccacgggtgccactgggggcacactgaacttgtagggagtgtgattttgttggaggtgcacatggtctctgaatttgacagagaacaccttccctttccttgccatgtcaccctccagaggaagtcacacctcagcgaggtggtttggcatctggggccaactccattacagctatgagctcactgctgtcagtgacgtttggtgttttctgtactgtgtttcaataaaaactccttcaaggttgcaggatttgtc

SEQ ID NO: 382735 - DNA, 2032 bp, Homo sapiens
cgcacggttcccagctaattccccgctaccgggttgcggccggaagccgggcgccgcggctctgcttccctcggggatctggcgacatggccagaaaggctctcaagcttgcttcgtggaccagcatggctcttgctgcctctggcatctacttctacagtaacaagtacttggaccctaatgactttggcgctgtcagggtgggcagagcagttgctacgacggctgtcatcagttacgactacctcacttccctgaagagtgtcccttatggctcagaggagtacttgcagctgagatctaaggtgcaccttcgctctgccaggcgtctctgtgagctctgctgtgccaaccggggcaccttcatcaaggtgggccagcacctgggggctctggactacctgttgccagaggagtacaccagcacgctgaaggtactgcacagccaggctccacagagcagcatgcaagagatccgccaggtcatccgagaagatctgggcaaggagatccatgatttgttccagagcttcgatgacacccctctggggacggcctccctggcccaggtccacaaggcagtgctgcatgatgggcggacggtggccgtgaaggtccagcacccaaaggtgcgggctcagagctcgaaggacattctcctgatggaggtgctcgttctggctgtgaagcagctgttcccagagtttgagtttatgtggcttgtggatgaagccaagaagaacctgcctttggagctggatttcctcaatgaagggaggaatgctgagaaggtgtcccagatgctcaggcattttgacttcttgaaggtcccccgaatccactgggacctgtccacggagcgggtcctcctgatggagtttgtggatggcgggcaggtcaatgacagagactacatggagaggaacaagatcgacgtcaatgagatctcacgccacctgggcaagatgtatagtgagatgatcttcgtcaatggcttcgtgcactgcgatccccaccccggcaatgtactggtgcggaagcaccccggcacgggaaaggcggagattgtcctgttggaccatgggctttaccaggacttagagattcgcaacaacgcggccaactacctcccccagatcagccatctcctcaaccacgtgccgcgccagatgctgctcatcttgaagaccaacgacctgctgcgtggcattgaggccgccctgggcacccgcgccagcgccagctcctttctcaacatgtcacgttgctgcatcagagcgctagctgagcacaagaagaagaatacctgttcattcttcagaaggacccagatctctttcagcgaggccttcaacttatggcagatcaacctccatgagctcatcctgcgtgtgaaggggttgaagctggctgaccgggtcttggccctaatatgctggctgttccctgctccactctgagtggaattgctctccctgccccattctggtgtctttccactcctcagcccctcatcttgcctccacccagctgctccatttttgccacatcgtggcccgcagccccagagtcactgtccatgtcaccatccttctcctcctttggaatcctctccgcacactgtggcccttgtctcagggcccacaagctgaactgtggcatagctctctcttcttctccaagaagactcagcagcctacattcccattcctggtatgtgccattgggttggatgtccccactacttccgttaacccttcccattgtcaagatgtgccacgggtgccactgggggcacactgaacttgtagggagtgtgattttgttggaggtgcacatggtctctgaatttgacagagaacaccttccctttccttgccatgtcaccctccagaggaagtcacacctcagcgaggtggtttggcatctggggccaactccattacagctatgagctcactgctgtcagtgacgtttggtgttttctgtactgtgtttcaataaaaactccttcaaggttgcaggatttgtc

SEQ ID NO: 382736 - DNA, 1655 bp, Homo sapiens
atctatggagactgaaaaggggtcagaaccacacttatatttaggattttgctgggggcatttatctgcttagagctgtgaagagtgtagggacagggatcgtggggaggccagaccccaaacttaaagaccaggtaggtcaagggctgtggcgatgaccagcatgaagggctaatcctggatcctaggccagggcatcagaccttgggccacaggtgggatgagactggctctcatgcgaggacagtggtaagcaatggagcgtgagcagcagcatggtctggcagggtgcaggctatggggcaggactttggagttgggttgaagtcaggtcagcctgagctaggcttggaggggtaggagaccagactcagctggtactggcttctgggggtccttccagacctgatctaaaattgcggccagtgaaaaagccatggagaataacctggtctctcgcaatgtatactgtgtcacatccaacgctttcctagaagtttggctgagatatccccttccgggtttgtcaggctatacagtgccttgtgctagacttctctatggggagtgctcctagcagtgccaagacagcggtgcctgaagctccctcctggggcttctttgcagccctctggtcacagcctgccagacccctgccacccctggccccactgcccataccaaccatctgtttctgttgccccattgctgcttcaggacttagagattcgcaacaacgcggccaactacctcccccagatcagccatctcctcaaccacgtgccgcgccagatgctgctcatcttgaagaccaacgacctgctgcgtggcattgaggccgccctgggcacccgcgccagcgccagctcctttctcaacatgtcacgttgctgcatcagagcgctagctgagcacaagaagaagaatacctgttcattcttcagaaggacccagatctctttcagcgaggccttcaacttatggcagatcaacctccatgagctcatcctgcgtgtgaaggggttgaagctggctgaccgggtcttggccctaatatgctggctgttccctgctccactctgagtggaattgctctccctgccccattctggtgtctttccactcctcagcccctcatcttgcctccacccagctgctccatttttgccacatcgtggcccgcagccccagagtcactgtccatgtcaccatccttctcctcctttggaatcctctccgcacactgtggcccttgtctcagggcccacaagctgaactgtggcatagctctctcttcttctccaagaagactcagcagcctacattcccattcctggtatgtgccattgggttggatgtccccactacttccgttaacccttcccattgtcaagatgtgccacgggtgccactgggggcacactgaacttgtagggagtgtgattttgttggaggtgcacatggtctctgaatttgacagagaacaccttccctttccttgccatgtcaccctccagaggaagtcacacctcagcgaggtggtttggcatctggggccaactccattacagctatgagctcactgctgtcagtgacgtttggtgttttctgtactgtgtttcaataaaaactccttcaaggttgcaggatttgtc

SEQ ID NO: 382737 - DNA, 533 bp, Homo sapiens
caatagagcaagactcagactcaaaaaaaaaaaaaaaaaaaaaaatcttcaaatggcacctgatatcctgcagctgtacatcccaaacacagaatctaagattaacgctgatgaaatgagtacggaacaaggacaactttgtgaattttttctaaagttaaagtattcaatggattgtttattgtgagattttgcttcctgcttttttggtgttaaaatatccttttgtttatgaaaagatagatgagtaaatgatagtttttaagaaacatctccacctagtaaacagaaaagttggcagaactacagcagctgagttttattttatattgtaatggctcaatacaaaaatgtcagggaaacactgaatgaccggaaatccaagaaatccaaaaggcaaacaaggccctcactgatttatttcctctcactttcccagacgttttgctccagcaatataagagtgcaaggatgtccagcatacaacctactaattatttccctttcctcatgctttcccatgaatggaatga

SEQ ID NO: 382738 - DNA, 585 bp, Homo sapiens
  misc_feature (297)..(297): n is a, c, g, or t
  misc_feature (312)..(313): n is a, c, g, or t
  misc_feature (316)..(316): n is a, c, g, or t
aaacaaatgtggaatgattaatgcaatctaatgcatatccctctacctcaattacttatcttttttttgtggtgaaacatttgaagtttattctcctagttttttcaaatatacgttattattgactgtagtcatcctgctgtgctataggtctcaaaacttatttctcctgtctgtctgaaactttgtatcttttgaccagtaactccctattccctcccctcaatgtcctcctttaaaagtaatttgtataatagtcaatgctgatacacttttttcagctttaagaattgtttntcggccgggcgcggnngcnacgctgtaatcccaatgctgggattacaggcatgagccaccacacccagccactgcttcatattctttatcttcaacatcaagtagcttctgggattatcatgataacctacattatactctagcttataatacattgtcagtttttaaggtcacttaatttaaattaaccatttcatgaaacaagagtaaattaatgttaaattatttcaggaggaaggatttaaattttggtatgttttacctatattaaaccactcacagttgtgt

SEQ ID NO: 382739 - DNA, 155 bp, Homo sapiens
caccaccccgaatagcttcaggggccagaggaaatgctgccaaagcgttattggaaaactttggttttgaactggtcattcagtataacgaaaacaggcagaaggtacagaagaagggcaaaagtggtgaaggcgaaaacactgacaaactagaa

SEQ ID NO: 382740 - DNA, 811 bp, Homo sapiens
gcctgatatctccgctctattttacagttactcccctgctggtgcctccctccttggcgcgcttcccacctgcgatcggcgccctcttcgcagtcacgaactcgccagcagctagcagcactgactagtaggagggcccgccggaggagaggacatgctctggagtcagaagacagcgaaaagagaagcagaagccccggtggcaagagtctgaagcaggaaggatgactgtagcctgtggattgtactgcagtaggaaactgtcctagcaaggctccactttgccccagcttcaagcatctctcccctcagccctgtctcctcttctgcagttgggatctgcacatttaagcctgaaattgtcctgtgaagtgaagtatgatcggacagcctcttttcagcttttatgacaatggagacagaggaattgtggctcttgccaaggtcacaggattggaatacagagccaagccaccccaggacatgcaagagcctcagaagggaaaaaagcccagcaggaagggagaacaagtagcctctgtcctgaagttgtaacagccaggggccaggatggaggaggaggaccccataatctgcccatctgggacttggcaggggacctgggaaaatgtaccccaacccatcccttaagggcctttgtctttggcccattggcctagcatctccttcttcaccgtgtctgttcttgtcacacctagtcaggtctgtttgggtctgaggtgcatggaacattctgggtaggcctccagcaaacggaagctcttcaccgtgtttccagcctgggaccaag

SEQ ID NO: 382741 - DNA, 1764 bp, Homo sapiens
acacacgggcgggcggaggggacccggggcgagtcatcaagggcgcgtggttcggcgtgccaggcgcgctgctctgcctgctctcttggcttctgtctcccttcgaccgatcgccccctatcctgaagctttccaatgtcatcttggagccccaaagtttcctggggcctccgcgttgtgcgtcccagaaccccttgcctgcccctgagggaaacgcggaccataggcagcgggacgtcgggagccagcccaggggaggccagattcagcatttggacagcggctctggggcgcagtcggcccagcgagtttgccggtgaacagcctcgggcagatggcgggtaggagggccgcaggctgctctgggtcttggagaagcaggacccagcctagagggcatccccagctccgaatgggacacgttttcccgagataaaagatcccttctgagctcacacgggagccccgggaccagccaatccagcgtggatatccccagcctaaccaacacctatgctggggggaaagataagacgccccctttcagccaggaggtggacgaccctcatgccctcagctctccattcttcccaaagcagctcggatccctaagtctggagctgccagcgaggcttccaacccgctgcttgccatcacctcccaggtcgttggtggctccgattactcccctgctggtgcctccctccttggcgcgcttcccacctgcgatcggcgccctcttcgcagtcacgaactcgccagcagctagcagcactgactagtaggagggcccgccggaggagagccgcgcggcccacagaagcggaacgcgcgtcgagagcgccctgtccgctcgccccagacagatgcccggttattcattaccgcgaggcctagaggaaagagtggctgccgtcttcctgcccacagcccgccggaccctccgtcgcggctgcccggtccccggagccgcagccgccgagcccggctgtgcgtgtcgtggctgctggggagaaagaggcttccggacatgctctggagtcagaagacagcgaaaagagaagcagaagccccggtggcaagagtctgaagcaggaaggatgactgtagcctgtggattgtactgcagtaggaaactgtcctagcaaggctccactttgccccagcttcaagctggaaaggaggagaacatgaaacattgcttgaagacaatggccgagacagcaggtcccaccctgcacagccaccagcatctctcccctcagccctgtctcctcttctgcagttgggatctgcacatttaagcctgaaattgtcctgtgaagtgaagtatgatcggacagcctcttttcagcttttatgacaatggagacagaggaattgtggctcttgccaaggtcacaggattggaatacagagccaagccaccccaggacatgcaagagcctcagaagggaaaaaagcccagcaggaagggagaacaagtagcctctgtcctgaagttgtaacagccaggggccaggatggaggaggaggaccccataatctgcccatctgggacttggcaggggacctgggaaaatgtaccccaacccatcccttaagggcctttgtctttggcccattggcctagcatctccttcttcaccgtgtctgttcttgtcacacctagtcaggtctgtttgggtctgaggtgcatggaacattctgggtaggcctccagcaaacggaagctcttcaccgtgtttccagcctgggaccaag

SEQ ID NO: 382742 - DNA, 1687 bp, Homo sapiens
acacacgggcgggcggaggggacccggggcgagtcatcaagggcgcgtggttcggcgtgccaggcgcgctgctctgcctgctctcttggcttctgtctcccttcgaccgatcgccccctatcctgaagctttccaatgtcatcttggagccccaaagtttcctggggcctccgcgttgtgcgtcccagaaccccttgcctgcccctgagggaaacgcggaccataggcagcgggacgtcgggagccagcccaggggaggccagattcagcatttggacagcggctctggggcgcagtcggcccagcgagtttgccggtgaacagcctcgggcagatggcgggtaggagggccgcaggctgctctgggtcttggagaagcaggacccagcctagagggcatccccagctccgaatgggacacgttttcccgagataaaagatcccttctgagctcacacgggagccccgggaccagccaatccagcgtggatatccccagcctaaccaacacctatgctggggggaaagataagacgccccctttcagccaggaggtggacgaccctcatgccctcagctctccattcttcccaaagcagctcggatccctaagtctggagctgccagcgaggcttccaacccgctgcttgccatcacctcccaggtcgttggtggctccgattactcccctgctggtgcctccctccttggcgcgcttcccacctgcgatcggcgccctcttcgcagtcacgaactcgccagcagctagcagcactgactagtaggagggcccgccggaggagagccgcgcggcccacagaagcggaacgcgcgtcgagagcgccctgtccgctcgccccagacagatgcccggttattcattaccgcgaggcctagaggaaagagtggctgccgtcttcctgcccacagcccgccggaccctccgtcgcggctgcccggtccccggagccgcagccgccgagcccggctgtgcgtgtcgtggctgctggggagaaagaggcttccggacatgctctggagtcagaagacagcgaaaagagaagcagaagccccggtggcaagagtctgaagcaggaaggatgactgtagcctgtggattgtactgcagtaggaaactgtcctagcaaggctccactttgccccagcttcaagcatctctcccctcagccctgtctcctcttctgcagttgggatctgcacatttaagcctgaaattgtcctgtgaagtgaagtatgatcggacagcctcttttcagcttttatgacaatggagacagaggaattgtggctcttgccaaggtcacaggattggaatacagagccaagccaccccaggacatgcaagagcctcagaagggaaaaaagcccagcaggaagggagaacaagtagcctctgtcctgaagttgtaacagccaggggccaggatggaggaggaggaccccataatctgcccatctgggacttggcaggggacctgggaaaatgtaccccaacccatcccttaagggcctttgtctttggcccattggcctagcatctccttcttcaccgtgtctgttcttgtcacacctagtcaggtctgtttgggtctgaggtgcatggaacattctgggtaggcctccagcaaacggaagctcttcaccgtgtttccagcctgggaccaag

SEQ ID NO: 382743 - DNA, 1223 bp, Homo sapiens
acgacttgttcttgccttctaaagcagagaggagcttttgtgggtagttcctacagggatacatggtagaaaattcaccaaacccagtgctggagtgtttctcttcctcagaagaaatcagatgctgttcagagcacgaaggctagaattttaccctggttctcatgctaccttgcacccaggttggatcctgagtacagtttttggcaggaagccccagagagattggtgagggtgatttcccaggaagacgcagtgtgctctgacttctgtgacagtgagcaacgggaccagtggatgtccagatgctggcaatgagacatgctctggagtcagaagacagcgaaaagagaagcagaagccccggtggcaagagtctgaagcaggaaggatgactgtagcctgtggattgtactgcagtaggaaactgtcctagcaaggctccactttgccccagcttcaagaaggtatatcgtctcaaaatgcaggggacttcagatgagttttgagcaccctttcttttattataaaaaaaattccagacagttcagccaatactgactaagggctgagaccagttccatgcttttctgtctccagaggaatttgcttccatctggatgcctgaaacgctggaaaggaggagaacatgaaacattgcttgaagacaatggccgagacagcaggtcccaccctgcacagccaccagcatctctcccctcagccctgtctcctcttctgcagttgggatctgcacatttaagcctgaaattgtcctgtgaagtgaagtatgatcggacagcctcttttcagcttttatgacaatggagacagaggaattgtggctcttgccaaggtcacaggattggaatacagagccaagccaccccaggacatgcaagagcctcagaagggaaaaaagcccagcaggaagggagaacaagtagcctctgtcctgaagttgtaacagccaggggccaggatggaggaggaggaccccataatctgcccatctgggacttggcaggggacctgggaaaatgtaccccaacccatcccttaagggcctttgtctttggcccattggcctagcatctccttcttcaccgtgtctgttcttgtcacacctagtcaggtctgtttgggtctgaggtgcatggaacattctgggtaggcctccagcaaacggaagctcttcaccgtgtttccagcctgggaccaag

SEQ ID NO: 382744 - DNA, 1446 bp, Homo sapiens
agctgggagtggcgcggctgcttcccgcccgcgcaggatcaggccggcccccgcgggcctggagctggatccagagctagggaaactggaaaaacaggcacaaactcggaagccgcggtacggcaagagcctaagcaaagaatcctttccaagattcacacctcgtctacaccagggcaccgcctgggcctacggccttccgaacccgaagcgcccgcagcccagagctggcatcaggccatcaggccgggaaggtcgtcgcaggccccagagtgcgggcgcggggggcgcgcgcccacaggacgcccggggttgggtaggcaggagagaagggcgccagcaggcccgcggctgtttcccctcggtccgcacagcgggcccgggaggccattttgagagcgcgaagaggggcggcaagatggctgcgtgggcacccggaaggtcgccgcgccaagggcccgctgagcccctcctcccattcgtccagccgcgcggcccacagaagcggaacgcgcgtcgagagcgccctgtccgctcgccccagacagatgcccggttattcattaccgcgaggcctagaggaaagagtggctgccgtcttcctgcccacagcccgccggaccctccgtcgcggctgcccggtccccggagccgcagccgccgagcccggctgtgcgtgtcgtggctgctggggagaaagaggcttccggacatgctctggagtcagaagacagcgaaaagagaagcagaagccccggtggcaagagtctgaagcaggaaggatgactgtagcctgtggattgtactgcagtaggaaactgtcctagcaaggctccactttgccccagcttcaagctggaaaggaggagaacatgaaacattgcttgaagacaatggccgagacagcaggtcccaccctgcacagccaccagcatctctcccctcagccctgtctcctcttctgcagttgggatctgcacatttaagcctgaaattgtcctgtgaagtgaagtatgatcggacagcctcttttcagcttttatgacaatggagacagaggaattgtggctcttgccaaggtcacaggattggaatacagagccaagccaccccaggacatgcaagagcctcagaagggaaaaaagcccagcaggaagggagaacaagtagcctctgtcctgaagttgtaacagccaggggccaggatggaggaggaggaccccataatctgcccatctgggacttggcaggggacctgggaaaatgtaccccaacccatcccttaagggcctttgtctttggcccattggcctagcatctccttcttcaccgtgtctgttcttgtcacacctagtcaggtctgtttgggtctgaggtgcatggaacattctgggtaggcctccagcaaacggaagctcttcaccgtgtttccagcctgggaccaag

SEQ ID NO: 382745 - DNA, 401 bp, Homo sapiens
gcctagaaagctctagattgtccttgaagatcattaaggtgaggttagtgtgagtcaagaatgggccaagcccatggttccctgaatatcttcttaataccagtaacctataatacagtacaagggggaatggatcatgcctttccagctatctcagaggtgagaaatagtttaggggcagggaagggaaaagattttcatgtggccatctgaaaggagatgggaatgggctgggggcagaaaaacaagctgcattaagaacaaatgactctggtccaggcgcagtgtcacgcctgtaatcccaccagttaaggaggccaaggcagacagattgcctgagcccaggaggtcaaggctacagtgagccatgattgtgccactgcactccagtctgagccata

SEQ ID NO: 382746 - DNA, 370 bp, Homo sapiens
ctaaccagtaagataaaagtgctgtgttcaatttcaagggtctgtcaggatgaactggcagtctagatataattggttctagggctgggcacggtggctcacacctgtaactcaagcactttaagaggctgaggtgggcagatcacttgaggtcaggagttcgagaccagcctggccaacgtggcaaaaccccatctctactaaaaatacaaaaattggccaggtgttgtgacagacctgtaattccagctactcaggaggctgaggcaggagaatcgcttgaacccgagaggtggaggttgcagtgagccgagatgctgccactgcatccagcctgagtgacagagcgagactccatctcaaaaaaaaa

SEQ ID NO: 382747 - DNA, 459 bp, Homo sapiens
  misc_feature (1)..(1): n is a, c, g, or t
  misc_feature (4)..(4): n is a, c, g, or t
  misc_feature (9)..(9): n is a, c, g, or t
  misc_feature (24)..(24): n is a, c, g, or t
  misc_feature (28)..(28): n is a, c, g, or t
  misc_feature (31)..(31): n is a, c, g, or t
  misc_feature (412)..(412): n is a, c, g, or t
  misc_feature (417)..(417): n is a, c, g, or t
ncancgtantggtaggtctccagncagnggnttctctggcagggtcaatgggtcaaatggactggggaaatcactggggtccatgagtatggctggatatgtactgaggcagggttagtgcaaaggctacaagcctagaactgcagacagcgacggccccggcgctctcctcgcatgtccctacgctcaagtgtgtcacaaagggccgggcgctctgcagtgggcaccaagatgacttgtgcacattgccggacaccactgcagaaggggcagactgcctatcagcgcaaggggctgcctcagctcttctgctcgtcatcctgcctcaccactttctccaagaagccctcgggcaaaaagacctgtaccttctgcaagaaggagatcttggaacaacaaggatcggttggtnggggnaggctttgttcttggagggttcccttcccatgaagttccttg

SEQ ID NO: 382748 - DNA, 6207 bp, Homo sapiens
  misc_feature (457)..(457): n is a, c, g, or t
cagacaaggacagaaagggggctggaggagaaagagagagagagatacagagagagagagagagagagagagagagagagagagagagatcagccctggtgagggaggaaaactccatagataatacagggagctcctgcaggaagactcagggagaagatcccagaacttaccctaagactgttgagagagtagggggtagctttgcaggacctggtttgggggtcatcaagcagtaacggttactgcacaggcgttgccactgagccagagccatttaacccgacctgtgtggctggggatcaagcttcagataccccataactctgactctcagactgttttgggggccccgtggctgcagacaagggaaggaggggcacgtgagggctgggtccctgcctccccccgtcctccgctgtcactcactaccccaacagtcgcccagggggcgggncccggagaggtggggatgggggagggtaatcttggcaggcgcctgctgcatggcgtaggtagggactattgaggggggcggacgccgagggggtgaacacgagtgggaagctaagagagacacggggagggggaggggaccgggaaccatttgaatgagaggaggggatcacgggtagagtgggctccaggaggtagggcgagcagggtgtgacgggggccagactcttgagccagtacatatccagccatactcatggaccccagtgatttccccagtccatttgacccattgaccctgccagagaagcccctggctggagacctaccagtagacatggaatttggagaggatctactggaatcccagactgccccaactcgaggatgggccccccctggcccttctccatcctcgggagccctggacctgcttgatacccctgctggcctggaaaaagaccctggagtcctggatggagccactgagttgctggggctgggggggctgctctataaagccccctctcccccggaggtggaccacggtcctgagggaaccctggcatgggatgcaggagatcagaccctagagcctggaccagggggccagacccctgaggtggtaccacctgatccaggggctggggcaaattcctgttcacctgaggggctactagagcctttggctccagattctccaataacactgcagtccccacatattgaagaggaggagaccacctccatagctactgcaagaaggggctcccctgggcaggaggaggagcttccccaagggcagccacagagcccaaatgccccgcctagcccttcagtgggagagactctgggggatggaatcaacagttctcagaccaaacctgggggctctagcccccctgcacatccttccttgccaggagatggcctgactgcgaaggcgagtgagaagccgcctgaacggaagagaagcgagcgcgttaggagagcagaacctccaaaacctgaggttgtagattccactgagagcattccagtgtcagatgaggattctgatgccatggtagatgaccccaatgatgaggactttgtgccattccggccccggcgctctcctcgcatgtccctacgctcaagtgtgtcacaaagggccgggcgctctgcagtgggcaccaagatgacttgtgcacattgccggacaccactgcagaaggggcagactgcctatcagcgcaaggggctgcctcagctcttctgctcgtcatcctgcctcaccactttctccaagaagccctcgggcaaaaagacctgtaccttctgcaagaaggagatctggaacaccaaggactcggttgtggcgcagactggttctggaggctccttccatgagttctgcacatccgtctgtctctccctgtatgaggcccagcagcagcgcccgatcccccagtctggggatcccgccgacgctactcgctgcagcatatgccagaagactggagaggtcctgcacgaggtcagcaatggcagcgtggtacaccggctctgcagcgattcttgcttctccaaattccgggccaacaagggactgaaaaccaactgttgtgaccagtgtggggcttacatctacaccaagaccgggagtcctggccctgagctcctcttccacgagggccaacaaaagcggttctgcaacacaacctgcttgggggcgtacaagaagaaaaacacacgtgtgtacccatgtgtctggtgcaagaccctgtgtaagaactttgagatgctatcacatgtggatcgtaatggcaagaccagcttgttctgttccctgtgctgtaccacttcttacaaagtgaagcaggcagggctcactggccctccccgaccctgcagcttctgccgccgcagcctctctgacccctgttactacaacaaggttgaccgcacagtctaccagttctgcagccccagctgctggaccaagttccagcgcacaagccctgaggggggcattcacctgagctgtcactactgtcacagcctcttcagtggcaagcctgaggtcttggactggcaggaccaagtgttccagttctgctgccgtgattgctgtgaggacttcaagcggcttcggggtgtggtgtcccagtgtgagcactgtcggcaggagaaactcttgcatgagaaactccgattcagcggagtggagaaaagcttctgcagcgaaggctgtgtgctgctgtacaaacaggacttcactaagaagctgggcttgtgctgtatcacttgtacttactgctcccagacctgccagcgcggagtcaccgagcaactggatggcagcacctgggacttctgcagtgaggactgtaagagcaagtacctgctgtggtactgcaaggctgcccggtgccatgcgtgtaagcgccaggggaagctgctggagaccatccactggcgtgggcagatccgtcatttctgcaaccagcagtgtcttctgcgtttctatagccagcagaaccaacccaacctggatacccagagtgggcccgagagcctcctgaacagtcagtctcctgagtcaaaaccccagacaccctctcaaaccaaagtggagaacagcaacacaatccctgtgaagacccgatcagctcccactgctcccacccctccacccccaccacccccagcaacaccccgcaaaaacaaggctgccatgtgtaagccactgatgcagaatcggggcgtctcctgcaaggtggagatgaagtccaaaggaagtcaaacagaagagtggaagccacaggtgatcgtgctgcccatcccagtgcccatcttcgtgccagtgcctatgcatctgtactgccagaaagtcccggtgcctttctcgatgcctatcccggtgcctgtgcccatgttcttgcccactaccttggagagcacagacaagattgtagagaccattgaggagctgaaggtgaagatcccttccaaccccttggaggccgacatcctggctatggcagaaatgattgcagaggctgaggagttagacaaggcctcatctgacctttgtgatcttgtgagcaaccagagtgcagagggactcctggaagactgtgacctgtttgggcctgctcgagatgatgtcctggccatggcagtcaagatggccaatgtcttggatgagcctgggcaagacttggaggcagacttccctaagaatcctctggacattaatcccagtgtagacttcctctttgattgtggcctggtagggcctgaggatgtgtctactgaacaagaccttccccgaaccatgaggaagggtcaaaagcggctggtgctttccgaaagctgctcccgggactccatgagcagtcagcctagttgtaccgggctcaactattcatatggtgtcaatgcttggaagtgctgggtgcagtcaaaatatgccaatggagaaaccagcaagggtgatgagctgcgctttggccccaaacccatgcgtatcaaagaggatattctcgcctgctcagctgctgagctcaactacggtctggcccagtttgtgagagaaatcactcggcccaatggtgaacgatatgaacctgacagtatctactatttgtgtcttggcatccagcagtacttgctggaaaataaccggatggtgaacattttcacggacctttactacctgacttttgttcaagaactcaacaagtctctgagtacctggcagcccacactcctccccaacaatacggtgttctctcgagtggaggaggagcacctctgggagtgtaagcaactgggggtctactcgccctttgtcctcctcaacaccctcatgttcttcaacactaagttttttgggctgcagacagctgaggaacacatgcaactctccttcaccaatgtggtgcggcagtcccgcaagtgtaccacccctcggggcaccaccaaggtggtgagcatccgctactatgccccagtccgccagaggaaagggcgagacacgggtcctggaaaacggaagagagaagatgaagcccctatcttagagcagcgtgagaaccgcatgaatcccctccgctgccctgtcaagttctatgaattctatctctcaaaatgtcctgaaagcctccggactcgcaacgatgtgttctacctgcaacctgaacggtcctgcatcgccgagtcacctctctggtattctgtgatccccatggaccgcagcatgttggagagcatgctcaatcgcatcctggctgtgcgcgagatttatgaggaactgggtcgtcctggggaggaagacctggactgagctcgtgtgccatccatatccatctttcacatcaatgtctgtcctgtggccatgtccctcagggtgacaggcccaggaaccaatgctactcattctgaagggccctgactgctcctttccgctcacccattccctgccttctctaggaaccctggcttttatcttcttccgtaccacttgacaaccatggggccctggtcttctgtactcaggggctggtctcccagtgatgggcaaaagccagcttgcccgttttctttatgcttcagagtaaacccctccttctgggtccagactctgggtggagtgttaatagctctggtgatcctgttggctttgggtttcctgacccatcccgcataggtagagcctcttgttcctaggcatgacctagggaaaaacccagctgccttctctgccctgtgcccactcccttctctactcttccccagcaccatgccaaaaggtcttatctgaaaggtaagaaataaacaatgaaagcgatgaggggaccatttacataaaacacagagcttagacactcttcccctcctatgaaataattggttgttggcaccatctcaccaccgcatatccctcaccccctcggcaagcaccaatccttggtgctgccgtttttaaaatcttccaaatgcctttttttcctcagaggcagagaatgactaagtacggggagcagactcctgttgtgcagactcctgtccccttggtttctgtgtttgtctctctgccatcttaggttgccatgagccatggtgtcaacatgcttagccccctctgtaactgcctccctttagttcaatggacagacctcccaaggcaaaaactaccttctgacttgggttgaggctgggttcccctctattgttcccctatcataagagctaggccaagcctatgggaccttgagtcatgcaggatgggatctgtggtcaaaggacaggcgaggagctgtgggcgcagggcctgccgccactgcctacatcttctctcttccccatcttgcattggaggtcccagaaaacaattagcttctggcaaagggggtacccacttctttccctgttgactttgctgtttcccaggctcctttttgtgtttttataactgtcaccagttagccactgtttaaattgtatatattgttctgaggcgcctggcctgtcccttcagtgagccatgcccacccttgtgttgtagtgagaagctgttgtcacgactaaccttctgtctctgaaattgtttgtttcaaataaagagttaaaattgtcaaaaaaaccccaaacacttgtggggcccgccccaaaacatctcacccacctgggggcgggccccgtttgacatggccccgtcccgaacccgcagaacgggggttcccaaaccgggccggttgcaac

SEQ ID NO: 382749 - DNA, 4080 bp, Homo sapiens
cgcccgcctggtgcagagcgctgggcgctgcgagcggcgctgccatttaaaggggccgcgacccctgtcccggctgctagggagggaggtagagaaggagcgcggggccgtcgctgtctgcagttctaggcttgtagcctttgcactaaccctgccgcagtacatatccagccatactcatggaccccagtgatttccccagtccatttgtgacccctgttactacaacaaggttgaccgcacagtctaccagttctgcagccccagctgctggaccaagttccagcgcacaagccctgaggggggcattcacctgagctgtcactactgtcacagcctcttcagtggcaagcctgaggtcttggactggcaggaccaagtgttccagttctgctgccgtgattgctgtgaggacttcaagcggcttcggggtgtggtgtcccagtgtgagcactgtcggcaggagaaactcttgcatgagaaactccgattcagcggagtggagaaaagcttctgcagcgaaggctgtgtgctgctgtacaaacaggacttcactaagaagctgggcttgtgctgtatcacttgtacttactgctcccagacctgccagcgcggagtcaccgagcaactggatggcagcacctgggacttctgcagtgaggactgtaagagcaagtacctgctgtggtactgcaaggctgcccggtgccatgcgtgtaagcgccaggggaagctgctggagaccatccactggcgtgggcagatccgtcatttctgcaaccagcagtgtcttctgcgtttctatagccagcagaaccaacccaacctggatacccagagtgggcccgagagcctcctgaacagtcagtctcctgagtcaaaaccccagacaccctctcaaaccaaagtggagaacagcaacacagtgaggaccccagaggaaaatgggaatttgggcaagatccctgtgaagacccgatcagctcccactgctcccacccctccacccccaccacccccagcaacaccccgcaaaaacaaggctgccatgtgtaagccactgatgcagaatcggggcgtctcctgcaaggtggagatgaagtccaaaggaagtcaaacagaagagtggaagccacaggtgatcgtgctgcccatcccagtgcccatcttcgtgccagtgcctatgcatctgtactgccagaaagtcccggtgcctttctcgatgcctatcccggtgcctgtgcccatgttcttgcccactaccttggagagcacagacaagattgtagagaccattgaggagctgaaggtgaagatcccttccaaccccttggaggccgacatcctggctatggcagaaatgattgcagaggctgaggagttagacaaggcctcatctgacctttgtgatcttgtgagcaaccagagtgcagagggactcctggaagactgtgacctgtttgggcctgctcgagatgatgtcctggccatggcagtcaagatggccaatgtcttggatgagcctgggcaagacttggaggcagacttccctaagaatcctctggacattaatcccagtgtagacttcctctttgattgtggcctggtagggcctgaggatgtgtctactgaacaagaccttccccgaaccatgaggaagggtcaaaagcggctggtgctttccgaaagctgctcccgggactccatgagcagtcagcctagttgtaccgggctcaactattcatatggtgtcaatgcttggaagtgctgggtgcagtcaaaatatgccaatggagaaaccagcaagggtgatgagctgcgctttggccccaaacccatgcgtatcaaagaggatattctcgcctgctcagctgctgagctcaactacggtctggcccagtttgtgagagaaatcactcggcccaatggtgaacgatatgaacctgacagtatctactatttgtgtcttggcatccagcagtacttgctggaaaataaccggatggtgaacattttcacggacctttactacctgacttttgttcaagaactcaacaagtctctgagtacctggcagcccacactcctccccaacaatacggtgttctctcgagtggaggaggagcacctctgggagtgtaagcaactgggggtctactcgccctttgtcctcctcaacaccctcatgttcttcaacactaagttttttgggctgcagacagctgaggaacacatgcaactctccttcaccaatgtggtgcggcagtcccgcaagtgtaccacccctcggggcaccaccaaggtggtgagcatccgctactatgccccagtccgccagaggaaagggcgagacacgggtcctggaaaacggaagagagaagatgaagcccctatcttagagcagcgtgagaaccgcatgaatcccctccgctgccctgtcaagttctatgaattctatctctcaaaatgtcctgaaagcctccggactcgcaacgatgtgttctacctgcaacctgaacggtcctgcatcgccgagtcacctctctggtattctgtgatccccatggaccgcagcatgttggagagcatgctcaatcgcatcctggctgtgcgcgagatttatgaggaactgggtcgtcctggggaggaagacctggactgagctcgtgtgccatccatatccatctttcacatcaatgtctgtcctgtggccatgtccctcagggtgacaggcccaggaaccaatgctactcattctgaagggccctgactgctcctttccgctcacccattccctgccttctctaggaaccctggcttttatcttcttccgtaccacttgacaaccatggggccctggtcttctgtactcaggggctggtctcccagtgatgggcaaaagccagcttgcccgttttctttatgcttcagagtaaacccctccttctgggtccagactctgggtggagtgttaatagctctggtgatcctgttggctttgggtttcctgacccatcccgcataggtagagcctcttgttcctaggcatgacctagggaaaaacccagctgccttctctgccctgtgcccactcccttctctactcttccccagcaccatgccaaaaggtcttatctgaaaggtaagaaataaacaatgaaagcgatgaggggaccatttacataaaacacagagcttagacactcttcccctcctatgaaataattggttgttggcaccatctcaccaccgcatatccctcaccccctcggcaagcaccaatccttggtgctgccgtttttaaaatcttccaaatgcctttttttcctcagaggcagagaatgactaagtacggggagcagactcctgttgtgcagactcctgtccccttggtttctgtgtttgtctctctgccatcttaggttgccatgagccatggtgtcaacatgcttagccccctctgtaactgcctccctttagttcaatggacagacctcccaaggcaaaaactaccttctgacttgggttgaggctgggttcccctctattgttcccctatcataagagctaggccaagcctatgggaccttgagtcatgcaggatgggatctgtggtcaaaggacaggcgaggagctgtgggcgcagggcctgccgccactgcctacatcttctctcttccccatcttgcattggaggtcccagaaaacaattagcttctggcaaagggggtacccacttctttccctgttgactttgctgtttcccaggctcctttttgtgtttttataactgtcaccagttagccactgtttaaattgtatatattgttctgaggcgcctggcctgtcccttcagtgagccatgcccacccttgtgttgtagtgagaagctgttgtcacgactaaccttctgtctctgaaattgtttgtttcaaataaagagttaaaattgtcaaaaaaaccccaaacacttgtggggcccgccccaaaacatctcacccacctgggggcgggccccgtttgacatggccccgtcccgaacccgcagaacgggggttcccaaaccgggccggttgcaac

SEQ ID NO: 382750 - DNA, 1375 bp, Homo sapiens
ctcctgcctgaactcattcctgaccagtcatcctgccctaactcatccctgaacggtcctcctgaccgaactcctccctgaacggtcctcctgccttctctaggaaccctggcttttatcttcttccgtaccacttgacaaccatggggccctggtcttctgtactcaggggctggtctcccagtgatgggcaaaagccagcttgcccgttttctttatgcttcagagtaaacccctccttctgggtccagactctgggtggagtgttaatagctctggtgatcctgttggctttgggtttcctgacccatcccgcataggtagagcctcttgttcctaggcatgacctagggaaaaacccagctgccttctctgccctgtgcccactcccttctctactcttccccagcaccatgccaaaaggtcttatctgaaaggtaagaaataaacaatgaaagcgatgaggggaccatttacataaaacacagagcttagacactcttcccctcctatgaaataattggttgttggcaccatctcaccaccgcatatccctcaccccctcggcaagcaccaatccttggtgctgccgtttttaaaatcttccaaatgcctttttttcctcagaggcagagaatgactaagtacggggagcagactcctgttgtgcagactcctgtccccttggtttctgtgtttgtctctctgccatcttaggttgccatgagccatggtgtcaacatgcttagccccctctgtaactgcctccctttagttcaatggacagacctcccaaggcaaaaactaccttctgacttgggttgaggctgggttcccctctattgttcccctatcataagagctaggccaagcctatgggaccttgagtcatgcaggatgggatctgtggtcaaaggacaggcgaggagctgtgggcgcagggcctgccgccactgcctacatcttctctcttccccatcttgcattggaggtcccagaaaacaattagcttctggcaaagggggtacccacttctttccctgttgactttgctgtttcccaggctcctttttgtgtttttataactgtcaccagttagccactgtttaaattgtatatattgttctgaggcgcctggcctgtcccttcagtgagccatgcccacccttgtgttgtagtgagaagctgttgtcacgactaaccttctgtctctgaaattgtttgtttcaaataaagagttaaaattgtcaaaaaaaccccaaacacttgtggggcccgccccaaaacatctcacccacctgggggcgggccccgtttgacatggccccgtcccgaacccgcagaacgggggttcccaaaccgggccggttgcaac

SEQ ID NO: 382751 - DNA, 5137 bp, Homo sapiens
cgcccgcctggtgcagagcgctgggcgctgcgagcggcgctgccatttaaaggggccgcgacccctgtcccggctgctagggagggaggtagagaaggagcgcggggccgtcgctgtctgcagttctaggcttgtagcctttgcactaaccctgccgcagtacatatccagccatactcatggaccccagtgatttccccagtccatttgacccattgaccctgccagagaagcccctggctggagacctaccagtagacatggaatttggagaggatctactggaatcccagactgccccaactcgaggatgggccccccctggcccttctccatcctcgggagccctggacctgcttgatacccctgctggcctggaaaaagaccctggagtcctggatggagccactgagttgctggggctgggggggctgctctataaagccccctctcccccggaggtggaccacggtcctgagggaaccctggcatgggatgcaggagatcagaccctagagcctggaccagggggccagacccctgaggtggtaccacctgatccaggggctggggcaaattcctgttcacctgaggggctactagagcctttggctccagattctccaataacactgcagtccccacatattgaagaggaggagaccacctccatagctactgcaagaaggggctcccctgggcaggaggaggagcttccccaagggcagccacagagcccaaatgccccgcctagcccttcagtgggagagactctgggggatggaatcaacagttctcagaccaaacctgggggctctagcccccctgcacatccttccttgccaggagatggcctgactgcgaaggcgagtgagaagccgcctgaacggaagagaagcgagcgcgttaggagagcagaacctccaaaacctgaggttgtagattccactgagagcattccagtgtcagatgaggattctgatgccatggtagatgaccccaatgatgaggactttgtgccattccggccccggcgctctcctcgcatgtccctacgctcaagtgtgtcacaaagggccgggcgctctgcagtgggcaccaagatgacttgtgcacattgccggacaccactgcagaaggggcagactgcctatcagcgcaaggggctgcctcagctcttctgctcgtcatcctgcctcaccactttctccaagaagccctcgggcaaaaagacctgtaccttctgcaagaaggagatctggaacaccaaggactcggttgtggcgcagactggttctggaggctccttccatgagttctgcacatccgtctgtctctccctgtatgaggcccagcagcagcgcccgatcccccagtctggggatcccgccgacgctactcgctgcagcatatgccagaagactggagaggtcctgcacgaggtcagcaatggcagcgtggtacaccggctctgcagcgattcttgcttctccaaattccgggccaacaagggactgaaaaccaactgttgtgaccagtgtggggcttacatctacaccaagaccgggagtcctggccctgagctcctcttccacgagggccaacaaaagcggttctgcaacacaacctgcttgggggcgtacaagaagaaaaacacacgtgtgtacccatgtgtctggtgcaagaccctgtgtaagaactttgagatgctatcacatgtggatcgtaatggcaagaccagcttgttctgttccctgtgctgtaccacttcttacaaagtgaagcaggcagggctcactggccctccccgaccctgcagcttctgccgccgcagcctctctgacccctgttactacaacaaggttgaccgcacagtctaccagttctgcagccccagctgctggaccaagttccagcgcacaagccctgaggggggcattcacctgagctgtcactactgtcacagcctcttcagtggcaagcctgaggtcttggactggcaggaccaagtgttccagttctgctgccgtgattgctgtgaggacttcaagcggcttcggggtgtggtgtcccagtgtgagcactgtcggcaggagaaactcttgcatgagaaactccgattcagcggagtggagaaaagcttctgcagcgaaggctgtgtgctgctgtacaaacaggacttcactaagaagctgggcttgtgctgtatcacttgtacttactgctcccagacctgccagcgcggagtcaccgagcaactggatggcagcacctgggacttctgcagtgaggactgtaagagcaagtacctgctgtggtactgcaaggctgcccggtgccatgcgtgtaagcgccaggggaagctgctggagaccatccactggcgtgggcagatccgtcatttctgcaaccagcagtgtcttctgcgtttctatagccagcagaaccaacccaacctggatacccagagtgggcccgagagcctcctgaacagtcagtctcctgagtcaaaaccccagacaccctctcaaaccaaagtggagaacagcaacacagtgaggaccccagaggaaaatgggaatttgggcaagatccctgtgaagacccgatcagctcccactgctcccacccctccacccccaccacccccagcaacaccccgcaaaaacaaggctgccatgtgtaagccactgatgcagaatcggggcgtctcctgcaaggtggagatgaagtccaaaggaagtcaaacagaagagtggaagccacaggtgatcgtgctgcccatcccagtgcccatcttcgtgccagtgcctatgcatctgtactgccagaaagtcccggtgcctttctcgatgcctatcccggtgcctgtgcccatgttcttgcccactaccttggagagcacagacaagattgtagagaccattgaggagctgaaggtgaagatcccttccaaccccttggaggccgacatcctggctatggcagaaatgattgcagaggctgaggagttagacaaggcctcatctgacctttgtgatcttgtgagcaaccagagtgcagagggactcctggaagactgtgacctgtttgggcctgctcgagatgatgtcctggccatggcagtcaagatggccaatgtcttggatgagcctgggcaagacttggaggcagacttccctaagaatcctctggacattaatcccagtgtagacttcctctttgattgtggcctggtagggcctgaggatgtgtctactgaacaagaccttccccgaaccatgaggaagggtcaaaagcggctggtgctttccgaaagctgctcccgggactccatgagcagtcagcctagttgtaccgggctcaactattcatatggtgtcaatgcttggaagtgctgggtgcagtcaaaatatgccaatggagaaaccagcaagggtgatgagctgcgctttggccccaaacccatgcgtatcaaagaggatattctcgcctgctcagctgctgagctcaactacggtctggcccagtttgtgagagaaatcactcggcccaatggtgaacgatatgaacctgacagtatctactatttgtgtcttggcatccagcagtacttgctggaaaataaccggatggtgaacattttcacggacctttactacctgacttttgttcaagaactcaacaagtctctgagtacctggcagcccacactcctccccaacaatacggtgttctctcgagtggaggaggagcacctctgggagtgtaagcaactgggggtctactcgccctttgtcctcctcaacaccctcatgttcttcaacactaagttttttgggctgcagacagctgaggaacacatgcaactctccttcaccaatgtggtgcggcagtcccgcaagtgtaccacccctcggggcaccaccaaggtggtgagcatccgctactatgccccagtccgccagaggaaagggcgagacacgggtcctggaaaacggaagagagaagatgaagcccctatcttagagcagcgtgagaaccgcatgaatcccctccgctgccctgtcaagttctatgaattctatctctcaaaatgtcctgaaagcctccggactcgcaacgatgtgttctacctgcaacctgaacggtcctgcatcgccgagtcacctctctggtattctgtgatccccatggaccgcagcatgttggagagcatgctcaatcgcatcctggctgtgcgcgagatttatgaggaactgggtcgtcctggggaggaagacctggactgagctcgtgtgccatccatatccatctttcacatcaatgtctgtcctgtggccatgtccctcagggtgacaggcccaggaaccaatgctactcattctgaagggccctgactgctcctttccgctcacccattccctgccttctctaggaaccctggcttttatcttcttccgtaccacttgacaaccatggggccctggtcttctgtactcaggggctggtctcccagtgatgggcaaaagccagcttgcccgttttctttatgcttcagagtaaacccctccttctgggtccagactctgggtggagtgttaatagctctggtgatcctgttggctttgggtttcctgacccatcccgcataggtagagcctcttgttcctaggcatgacctagggaaaaacccagctgccttctctgccctgtgcccactcccttctctcttccccatcttgcattggaggtcccagaaaacaattagcttctggcaaagggggtacccacttctttccctgttgactttgctgtttcccaggctcctttttgtgtttttataactgtcaccagttagccactgtttaaattgtatatattgttctgaggcgcctggcctgtcccttcagtgagccatgcccacccttgtgttgtagtgagaagctgttgtcacgactaaccttctgtctctgaaattgtttgtttcaaataaagagttaaaattgtcaaaaaaaccccaaacacttgtggggcccgccccaaaacatctcacccacctgggggcgggccccgtttgacatggccccgtcccgaacccgcagaacgggggttcccaaaccgggccggttgcaac

SEQ ID NO: 382752 - DNA, 4188 bp, Homo sapiens
cgcccgcctggtgcagagcgctgggcgctgcgagcggcgctgccatttaaaggggccgcgacccctgtcccggctgctagggagggaggtagagaaggagcgcggggccgtcgctgtctgcagttctaggcttgtagcctttgcactaaccctgccgcagtacatatccagccatactcatggaccccagtgatttccccagtccatttgacccattgaccctgccagagaagcccctggctggagacctaccagtagacatggaatttggagaggatctactggaatcccagactgccccaactcgaggatgggccccccctggcccttctccatcctcgggagccctggacctgcttgatacccctgctggcctggaaaaagaccctggagtcctggatggagccactgagttgctggggctgggggggctgctctataaagccccctctcccccggaggtggaccacggtcctgagggaaccctggcatgggatgcaggagatcagaccctagagcctggaccagggggccagacccctgaggtggtaccacctgatccaggggctggggcaaattcctgttcacctgaggggctactagagcctttggctccagattctccaataacactgcagtccccacatattgaagaggaggagaccacctccatagctactgcaagaaggggctcccctgggcaggaggaggagcttccccaagggcagccacagagcccaaatgccccgcctagcccttcagtgggagagactctgggggatggaatcaacagttctcagaccaaacctgggggctctagcccccctgcacatccttccttgccaggagatggcctgactgcgaaggcgagtgagaagccgcctgaacggaagagaagcgagcgcgttaggagagcagaacctccaaaacctgaggttgtagattccactgagagcattccagtgtcagatgaggattctgatgccatggtagatgaccccaatgatgaggactttgtgccattccggccccggcgctctcctcgcatgtccctacgctcaagtgtgtcacaaagggccgggcgctctgcagtgggcaccaagatgacttgtgcacattgccggacaccactgcagaaggggcagactgcctatcagcgcaaggggctgcctcagctcttctgctcgtcatcctgcctcaccactttctccaagaagccctcgggcaaaaagacctgtaccttctgcaagaaggagatctggaacaccaaggactcggttgtggcgcagactggttctggaggctccttccatgagttctgcacatccgtctgtctctccctgtatgaggcccagcagcagcgcccgatcccccagtctggggatcccgccgacgctactcgctgcagcatatgccagaagactggagaggtcctgcacgaggtcagcaatggcagcgtggtacaccggctctgcagcgattcttgcttctccaaattccgggccaacaagggactgaaaaccaactgttgtgaccagtgtggggcttacatctacaccaagaccgggagtcctggccctgagctcctcttccacgagggccaacaaaagcggttctgcaacacaacctgcttgggggcgtacaagaagaaaaacacacgtgtgtacccatgtgtctggtgcaagaccctgtgtaagaactttgagatgctatcacatgtggatcgtaatggcaagaccagcttgttctgttccctgtgctgtaccacttcttacaaagtgaagcaggcagggctcactggccctccccgaccctgcagcttctgccgccgcagcctctctgacccctgttactacaacaaggttgaccgcacagtctaccagttctgcagccccagctgctggaccaagttccagcgcacaagccctgaggggggcattcacctgagctgtcactactgtcacagcctcttcagtggcaagcctgaggtcttggactggcaggaccaagtgttccagttctgctgccgtgattgctgtgaggacttcaagcggcttcggggtgtggtgtcccagtgtgagcactgtcggcaggagaaactcttgcatgagaaactccgattcagcggagtggagaaaagcttctgcagcgaaggctgtgtgctgctgtacaaacaggacttcactaagaagctgggcttgtgctgtatcacttgtacttactgctcccagacctgccagcgcggagtcaccgagcaactggatggcagcacctgggacttctgcagtgaggactgtaagagcaagtacctgctgtggtactgcaaggctgcccggtgccatgcgtgtaagcgccaggggaagctgctggagaccatccactggcgtgggcagatccgtcatttctgcaaccagcagtgtcttctgcgtttctatagccagcagaaccaacccaacctggatacccagagtgggcccgagagcctcctgaacagtcagtctcctgagtcaaaaccccagacaccctctcaaaccaaagtggagaacagcaacacagtgaggaccccagaggaaaatgggaatttgggcaagatccctgtgaagacccgatcagctcccactgctcccacccctccacccccaccacccccagcaacaccccgcaaaaacaaggctgccatgtgtaagccactgatgcagaatcggggcgtctcctgcaaggtggagatgaagtccaaaggaagtcaaacagaagagtggaagccacaggtgatcgtgctgcccatcccagtgcccatcttcgtgccagtgcctatgcatctgtactgccagaaagtcccggtgcctttctcgatgcctatcccggtgcctgtgcccatgttcttgcccactaccttggagagcacagacaagattgtagagaccattgaggagctgaaggtgaagatcccttccaaccccttggaggccgacatcctggctatggcagaaatgattgcagaggctgaggagttagacaaggcctcatctgacctttgtgatcttgtgagcaaccagagtgcagagggactcctggaagactgtgacctgtttgggcctgctcgagatgatgtcctggccatggcagtcaagatggccaatgtcttggatgagcctgggcaagacttggaggcagacttccctaagaatcctctggacattaatcccagtgtagacttcctctttgattgtggcctggtagggcctgaggatgtgtctactgaacaagaccttccccgaaccatgaggaagggtcaaaagcggctggtgctttccgaaagctgctcccgggactccatgagcagtcagcctagttgtaccgggctcaactattcatatggtgtcaatgcttggaagtgctgggtgcagtcaaaatatgccaatggagaaaccagcaagggtgatgagctgcgctttggccccaaacccatgcgtatcaaagaggatattctcgcctgctcagctgctgagctcaactacggtctggcccagtttgtgagagaaatcactcggcccaatggtgaacgatatgaacctgacagtatctactatttgtgtcttggcatccagcaggtacctcttgtgcaccacctcacttcctgtcactcttaacacagcaggcagggtctaaacagaaatgattctgggttaggcacggtggctcacgcctgtaatcccaacactttgggaggctgaggcaggaggatcgcttcaagccaggagtttgagaccagcctgggcaacaaagtgatacccatctaccccaaaaatatttttttaatgaaaaaaaaaagcagttattctgttgcactccctgttcctcatcttgtcccctacctgaagcaggcagcttgcctttaatctcctactccaaatagaacatgagatatcaatactcttctaaaatcaaaactgcattccaggaccgttggccaaggagcagtcttcattgctatccaggtcccctttgtaatctttaagcccattctaggaggggagggatgggtggagctgggatccttgagtgctggggtaatgtttagttccccctgggagaagtcaaccatgtattacctgagaaggaggtgtgggcttctaaagaacatctcctccaagcctcctcctcttcgagcaaagcctgagtagcgca

SEQ ID NO: 382753 - DNA, 305 bp, Homo sapiens
aaaggggagatgatgcgagagccaagccagcaaccatagtttgaccttccctaacctcctttctccaacactagaagtactgagataaagccaaactttgctctccccccatctcacaaggtcatcaaagctgttcctggggctctgtgctatggaagcttgctgtgtgcttacatcagcccctgccccggccagcagtaaatatggtgctgactagctttcaccttgcctctggccttacctctgccatgcccctgctttctcttcccctccagggtcaaaagcggctggtgctttccgaaagc

SEQ ID NO: 382754 - DNA, 5710 bp, Homo sapiens
cgcccgcctggtgcagagcgctgggcgctgcgagcggcgctgccatttaaaggggccgcgacccctgtcccggctgctagggagggaggtagagaaggagcgcggggccgtcgctgtctgcagttctaggcttgtagcctttgcactaaccctgccgcagtacatatccagccatactcatggaccccagtgatttccccagtccatttgacccattgaccctgccagagaagcccctggctggagacctaccagtagacatggaatttggagaggatctactggaatcccagactgccccaactcgaggatgggccccccctggcccttctccatcctcgggagccctggacctgcttgatacccctgctggcctggaaaaagaccctggagtcctggatggagccactgagttgctggggctgggggggctgctctataaagccccctctcccccggaggtggaccacggtcctgagggaaccctggcatgggatgcaggagatcagaccctagagcctggaccagggggccagacccctgaggtggtaccacctgatccaggggctggggcaaattcctgttcacctgaggggctactagagcctttggctccagattctccaataacactgcagtccccacatattgaagaggaggagaccacctccatagctactgcaagaaggggctcccctgggcaggaggaggagcttccccaagggcagccacagagcccaaatgccccgcctagcccttcagtgggagagactctgggggatggaatcaacagttctcagaccaaacctgggggctctagcccccctgcacatccttccttgccaggagatggcctgactgcgaaggcgagtgagaagccgcctgaacggaagagaagcgagcgcgttaggagagcagaacctccaaaacctgaggttgtagattccactgagagcattccagtgtcagatgaggattctgatgccatggtagatgaccccaatgatgaggactttgtgccattccggccccggcgctctcctcgcatgtccctacgctcaagtgtgtcacaaagggccgggcgctctgcagtgggcaccaagatgacttgtgcacattgccggacaccactgcagaaggggcagactgcctatcagcgcaaggggctgcctcagctcttctgctcgtcatcctgcctcaccactttctccaagaagccctcgggcaaaaagacctgtaccttctgcaagaaggagatctggaacaccaaggactcggttgtggcgcagactggttctggaggctccttccatgagttctgcacatccgtctgtctctccctgtatgaggcccagcagcagcgcccgatcccccagtctggggatcccgccgacgctactcgctgcagcatatgccagaagactggagaggtcctgcacgaggtcagcaatggcagcgtggtacaccggctctgcagcgattcttgcttctccaaattccgggccaacaagggactgaaaaccaactgttgtgaccagtgtggggcttacatctacaccaagaccgggagtcctggccctgagctcctcttccacgagggccaacaaaagcggttctgcaacacaacctgcttgggggcgtacaagaagaaaaacacacgtgtgtacccatgtgtctggtgcaagaccctgtgtaagaactttgagatgctatcacatgtggatcgtaatggcaagaccagcttgttctgttccctgtgctgtaccacttcttacaaagtgaagcaggcagggctcactggccctccccgaccctgcagcttctgccgccgcagcctctctgacccctgttactacaacaaggttgaccgcacagtctaccagttctgcagccccagctgctggaccaagttccagcgcacaagccctgaggggggcattcacctgagctgtcactactgtcacagcctcttcagtggcaagcctgaggtcttggactggcaggaccaagtgttccagttctgctgccgtgattgctgtgaggacttcaagcggcttcggggtgtggtgtcccagtgtgagcactgtcggcaggagaaactcttgcatgagaaactccgattcagcggagtggagaaaagcttctgcagcgaaggctgtgtgctgctgtacaaacaggacttcactaagaagctgggcttgtgctgtatcacttgtacttactgctcccagacctgccagcgcggagtcaccgagcaactggatggcagcacctgggacttctgcagtgaggactgtaagagcaagtacctgctgtggtactgcaaggctgcccggtgccatgcgtgtaagcgccaggggaagctgctggagaccatccactggcgtgggcagatccgtcatttctgcaaccagcagtgtcttctgcgtttctatagccagcagaaccaacccaacctggatacccagagtgggcccgagagcctcctgaacagtcagtctcctgagtcaaaaccccagacaccctctcaaaccaaagtggagaacagcaacacagtgaggaccccagaggaaaatgggaatttgggcaagatccctgtgaagacccgatcagctcccactgctcccacccctccacccccaccacccccagcaacaccccgcaaaaacaaggctgccatgtgtaagccactgatgcagaatcggggcgtctcctgcaaggtggagatgaagtccaaaggaagtcaaacagaagagtggaagccacaggtgatcgtgctgcccatcccagtgcccatcttcgtgccagtgcctatgcatctgtactgccagaaagtcccggtgcctttctcgatgcctatcccggtgcctgtgcccatgttcttgcccactaccttggagagcacagacaagattgtagagaccattgaggagctgaaggtgaagatcccttccaaccccttggaggccgacatcctggctatggcagaaatgattgcagaggctgaggagttagacaaggcctcatctgacctttgtgatcttgtgagcaaccagagtgcagagggactcctggaagactgtgacctgtttgggcctgctcgagatgatgtcctggccatggcagtcaagatggccaatgtcttggatgagcctgggcaagacttggaggcagacttccctaagaatcctctggacattaatcccagtgtagacttcctctttgattgtggcctggtagggcctgaggatgtgtctactgaacaagaccttccccgaaccatgaggaagggtcaaaagcggctggtgctttccgaaagctgctcccgggactccatgagcagtcagcctagttgtaccgggctcaactattcatatggtgtcaatgcttggaagtgctgggtgcagtcaaaatatgccaatggagaaaccagcaagggtgatgagctgcgctttggccccaaacccatgcgtatcaaagaggatattctcgcctgctcagctgctgagctcaactacggtctggcccagtttgtgagagaaatcactcggcccaatggtgaacgatatgaacctgacagtatctactatttgtgtcttggcatccagcagtacttgctggaaaataaccggatggtgaacattttcacggacctttactacctgacttttgttcaagaactcaacaagtctctgagtacctggcagcccacactcctccccaacaatacggtgttctctcgagtggaggaggagcacctctgggagtgtaagcaactgggggtctactcgccctttgtcctcctcaacaccctcatgttcttcaacactaagttttttgggctgcagacagctgaggaacacatgcaactctccttcaccaatgtggtgcggcagtcccgcaagtgtaccacccctcggggcaccaccaaggtggtgagcatccgctactatgccccagtccgccagaggaaagggcgagacacgggtcctggaaaacggaagagagaagatgaagcccctatcttagagcagcgtgagaaccgcatgaatcccctccgctgccctgtcaagttctatgaattctatctctcaaaatgtcctgaaagcctccggactcgcaacgatgtgttctacctgcaacctgaacggtcctgcatcgccgagtcacctctctggtattctgtgatccccatggaccgcagcatgttggagagcatgctcaatcgcatcctggctgtgcgcgagatttatgaggaactgggtcgtcctggggaggaagacctggactgagctcgtgtgccatccatatccatctttcacatcaatgtctgtcctgtggccatgtccctcagggtgacaggcccaggaaccaatgctactcattctgaagggccctgactgctcctttccgctcacccattccctgccttctctaggaaccctggcttttatcttcttccgtaccacttgacaaccatggggccctggtcttctgtactcaggggctggtctcccagtgatgggcaaaagccagcttgcccgttttctttatgcttcagagtaaacccctccttctgggtccagactctgggtggagtgttaatagctctggtgatcctgttggctttgggtttcctgacccatcccgcataggtagagcctcttgttcctaggcatgacctagggaaaaacccagctgccttctctgccctgtgcccactcccttctctactcttccccagcaccatgccaaaaggtcttatctgaaaggtaagaaataaacaatgaaagcgatgaggggaccatttacataaaacacagagcttagacactcttcccctcctatgaaataattggttgttggcaccatctcaccaccgcatatccctcaccccctcggcaagcaccaatccttggtgctgccgtttttaaaatcttccaaatgcctttttttcctcagaggcagagaatgactaagtacggggagcagactcctgttgtgcagactcctgtccccttggtttctgtgtttgtctctctgccatcttaggttgccatgagccatggtgtcaacatgcttagccccctctgtaactgcctccctttagttcaatggacagacctcccaaggcaaaaactaccttctgacttgggttgaggctgggttcccctctattgttcccctatcataagagctaggccaagcctatgggaccttgagtcatgcaggatgggatctgtggtcaaaggacaggcgaggagctgtgggcgcagggcctgccgccactgcctacatcttctctcttccccatcttgcattggaggtcccagaaaacaattagcttctggcaaagggggtacccacttctttccctgttgactttgctgtttcccaggctcctttttgtgtttttataactgtcaccagttagccactgtttaaattgtatatattgttctgaggcgcctggcctgtcccttcagtgagccatgcccacccttgtgttgtagtgagaagctgttgtcacgactaaccttctgtctctgaaattgtttgtttcaaataaagagttaaaattgtcaaaaaaaccccaaacacttgtggggcccgccccaaaacatctcacccacctgggggcgggccccgtttgacatggccccgtcccgaacccgcagaacgggggttcccaaaccgggccggttgcaac

SEQ ID NO: 382755 - DNA, 1671 bp, Homo sapiens
  misc_feature (6)..(6): n is a, c, g, or t
aacggngtgatgcgttgagcatgctctccaacatgctgcggtccatggggatcacagaataccagagaggtgactcggcgatgcaggaccgttcaggttgcaggtagaacacatcgttgcgagtccggaggctctctggtattctgtgatccccatggaccgcagcatgttggagagcatgctcaatcgcatcctggctgtgcgcgagatttatgaggaactgggtcgtcctggggaggaagacctggactgagctcgtgtgccatccatatccatctttcacatcaatgtctgtcctgtggccatgtccctcagggtgacaggcccaggaaccaatgctactcattctgaagggccctgactgctcctttccgctcacccattccctgccttctctaggaaccctggcttttatcttcttccgtaccacttgacaaccatggggccctggtcttctgtactcaggggctggtctcccagtgatgggcaaaagccagcttgcccgttttctttatgcttcagagtaaacccctccttctgggtccagactctgggtggagtgttaatagctctggtgatcctgttggctttgggtttcctgacccatcccgcataggtagagcctcttgttcctaggcatgacctagggaaaaacccagctgccttctctgccctgtgcccactcccttctctactcttccccagcaccatgccaaaaggtcttatctgaaaggtaagaaataaacaatgaaagcgatgaggggaccatttacataaaacacagagcttagacactcttcccctcctatgaaataattggttgttggcaccatctcaccaccgcatatccctcaccccctcggcaagcaccaatccttggtgctgccgtttttaaaatcttccaaatgcctttttttcctcagaggcagagaatgactaagtacggggagcagactcctgttgtgcagactcctgtccccttggtttctgtgtttgtctctctgccatcttaggttgccatgagccatggtgtcaacatgcttagccccctctgtaactgcctccctttagttcaatggacagacctcccaaggcaaaaactaccttctgacttgggttgaggctgggttcccctctattgttcccctatcataagagctaggccaagcctatgggaccttgagtcatgcaggatgggatctgtggtcaaaggacaggcgaggagctgtgggcgcagggcctgccgccactgcctacatcttctctcttccccatcttgcattggaggtcccagaaaacaattagcttctggcaaagggggtacccacttctttccctgttgactttgctgtttcccaggctcctttttgtgtttttataactgtcaccagttagccactgtttaaattgtatatattgttctgaggcgcctggcctgtcccttcagtgagccatgcccacccttgtgttgtagtgagaagctgttgtcacgactaaccttctgtctctgaaattgtttgtttcaaataaagagttaaaattgtcaaaaaaaccccaaacacttgtggggcccgccccaaaacatctcacccacctgggggcgggccccgtttgacatggccccgtcccgaacccgcagaacgggggttcccaaaccgggccggttgcaac

SEQ ID NO: 382756 - DNA, 2437 bp, Homo sapiens
  misc_feature (457)..(457): n is a, c, g, or t
cagacaaggacagaaagggggctggaggagaaagagagagagagatacagagagagagagagagagagagagagagagagagagagagatcagccctggtgagggaggaaaactccatagataatacagggagctcctgcaggaagactcagggagaagatcccagaacttaccctaagactgttgagagagtagggggtagctttgcaggacctggtttgggggtcatcaagcagtaacggttactgcacaggcgttgccactgagccagagccatttaacccgacctgtgtggctggggatcaagcttcagataccccataactctgactctcagactgttttgggggccccgtggctgcagacaagggaaggaggggcacgtgagggctgggtccctgcctccccccgtcctccgctgtcactcactaccccaacagtcgcccagggggcgggncccggagaggtggggatgggggagggtaatcttggcaggcgcctgctgcatggcgtaggtagggactattgaggggggcggacgccgagggggtgaacacgagtgggaagctaagagagacacggggagggggaggggaccgggaaccatttgaatgagaggaggggatcacgggtagagtgggctccaggaggtagggcgagcagggtgtgacgggggccagactcttgagccagtacatatccagccatactcatggaccccagtgatttccccagtccatttgacccattgaccctgccagagaagcccctggctggagacctaccagtagacatggaatttggagaggatctactggaatcccagactgccccaactcgaggatgggccccccctggcccttctccatcctcgggagccctggacctgcttgatacccctgctggcctggaaaaagaccctggagtcctggatggagccactgagttgctggggctgggggggctgctctataaagccccctctcccccggaggtggaccacggtcctgagggaaccctggcatgggatgcaggagatcagaccctagagcctggaccagggggccagacccctgaggtggtaccacctgatccaggggctggggcaaattcctgttcacctgaggggctactagagcctttggctccagattctccaataacactgcagtccccacatattgaagaggaggagaccacctccatagctactgcaagaaggggctcccctgggcaggaggaggagcttccccaagggcagccacagagcccaaatgccccgcctagcccttcagtgggagagactctgggggatggaatcaacagttctcagaccaaacctgggggctctagcccccctgcacatccttccttgccaggagatggcctgactgcgaaggcgagtgagaagccgcctgaacggaagagaagcgagcgcgttaggagagcagaacctccaaaacctgaggttgtagattccactgagagcattccagtgtcagatgaggattctgatgccatggtagatgaccccaatgatgaggactttgtgccattccggccccggcgctctcctcgcatgtccctacgctcaagtgtgtcacaaagggccgggcgctctgcagtgggcaccaagatgacttgtgcacattgccggacaccactgcagaaggggcagactgcctatcagcgcaaggggctgcctcagctcttctgctcgtcatcctgcctcaccactttctccaagaagccctcgggcaaaaagacctgtaccttctgcaagaaggagatctggaacaccaaggactcggttgtggcgcagactggttctggaggctccttccatgagttctgcacatccgtctgtctctccctgtatgaggcccagcagcagcgcccgatcccccagtctggggatcccgccgacgctactcgctgcagcatatgccagaagactggagaggtcctgcacgaggtcagcaatggcagcgtggtacaccggctctgcagcgattcttgcttctccaaattccgggccaacaagggactgaaaaccaactgttgtgaccagtgtggggcttacatctacaccaagaccgggagtcctggccctgagctcctcttccacgagggccaacaaaagcggttctgcaacacaacctgcttgggggcgtacaagaaggtggggccgagggagtagtgcattagagggctgtggaagggggtgtggttcttgggttataaataaaggtggctgatgggtcaagggctgggagaaataaaacaaataaagggggtttcaattgtatctgttatgttttatttttgaagctggctggtggatacacaggtctttgttacatcatcatctatactttttttgtatgcctgaaatatttcatgtttaaaacatttaaaaaataaaagtgaagggaca

SEQ ID NO: 382757 - DNA, 3492 bp, Homo sapiens
cgcccgcctggtgcagagcgctgggcgctgcgagcggcgctgccatttaaaggggccgcgacccctgtcccggctgctagggagggaggtagagaaggagcgcggggccgtcgctgtctgcagttctaggcttgtagcctttgcactaaccctgccgcagtacatatccagccatactcatggaccccagtgatttccccagtccatttgacccattgaccctgccagagaagcccctggctggagacctaccagtagacatggaatttggagaggatctactggaatcccagactgccccaactcgaggatgggccccccctggcccttctccatcctcgggagccctggacctgcttgatacccctgctggcctggaaaaagaccctggagtcctggatggagccactgagttgctggggctgggggggctgctctataaagccccctctcccccggaggtggaccacggtcctgagggaaccctggcatgggatgcaggagatcagaccctagagcctggaccagggggccagacccctgaggtggtaccacctgatccaggggctggggcaaattcctgttcacctgaggggctactagagcctttggctccagattctccaataacactgcagtccccacatattgaagaggaggagaccacctccatagctactgcaagaaggggctcccctgggcaggaggaggagcttccccaagggcagccacagagcccaaatgccccgcctagcccttcagtgggagagactctgggggatggaatcaacagttctcagaccaaacctgggggctctagcccccctgcacatccttccttgccaggagatggcctgactgcgaaggcgagtgagaagccgcctgaacggaagagaagcgagcgcgttaggagagcagaacctccaaaacctgaggttgtagattccactgagagcattccagtgtcagatgaggattctgatgccatggtagatgaccccaatgatgaggactttgtgccattccggccccggcgctctcctcgcatgtccctacgctcaagtgtgtcacaaagggccgggcgctctgcagtgggcaccaagatgacttgtgcacattgccggacaccactgcagaaggggcagactgcctatcagcgcaaggggctgcctcagctcttctgctcgtcatcctgcctcaccactttctccaagaagccctcgggcaaaaagacctgtaccttctgcaagaaggagatctggaacaccaaggactcggttgtggcgcagactggttctggaggctccttccatgagttctgcacatccgtctgtctctccctgtatgaggcccagcagcagcgcccgatcccccagtctggggatcccgccgacgctactcgctgcagcatatgccagaagactggagaggtcctgcacgaggtcagcaatggcagcgtggtacaccggctctgcagcgattcttgcttctccaaattccgggccaacaagggactgaaaaccaactgttgtgaccagtgtggggcttacatctacaccaagaccgggagtcctggccctgagctcctcttccacgagggccaacaaaagcggttctgcaacacaacctgcttgggggcgtacaagaagaaaaacacacgtgtgtacccatgtgtctggtgcaagaccctgtgtaagaactttgagatgctatcacatgtggatcgtaatggcaagaccagcttgttctgttccctgtgctgtaccacttcttacaaagtgaagcaggcagggctcactggccctccccgaccctgcagcttctgccgccgcagcctctctgacccctgttactacaacaaggttgaccgcacagtctaccagttctgcagccccagctgctggaccaagttccagcgcacaagccctgaggggggcattcacctgagctgtcactactgtcacagcctcttcagtggcaagcctgaggtcttggactggcaggaccaagtgttccagttctgctgccgtgattgctgtgaggacttcaagcggcttcggggtgtggtgtcccagtgtgagcactgtcggcaggagaaactcttgcatgagaaactccgattcagcggagtggagaaaagcttctgcagcgaaggctgtgtgctgctgtacaaacaggacttcactaagaagctgggcttgtgctgtatcacttgtacttactgctcccagacctgccagcgcggagtcaccgagcaactggatggcagcacctgggacttctgcagtgaggactgtaagagcaagtacctgctgtggtactgcaaggctgcccggtgccatgcgtgtaagcgccaggggaagctgctggagaccatccactggcgtgggcagatccgtcatttctgcaaccagcagtgtcttctgcgtttctatagccagcagaaccaacccaacctggatacccagagtgggcccgagagcctcctgaacagtcagtctcctgagtcaaaaccccagacaccctctcaaaccaaagtggagaacagcaacacagtgaggaccccagaggaaaatgggaatttgggcaagatccctgtgaagacccgatcagctcccactgctcccacccctccacccccaccacccccagcaacaccccgcaaaaacaaggctgccatgtgtaagccactgatgcagaatcggggcgtctcctgcaaggtggagatgaagtccaaaggaagtcaaacagaagagtggaagccacaggtgatcgtgctgcccatcccagtgcccatcttcgtgccagtgcctatgcatctgtactgccagaaagtcccggtgcctttctcgatgcctatcccggtgcctgtgcccatgttcttgcccactaccttggagagcacagacaagattgtagagaccattgaggagctgaaggtgaagatcccttccaaccccttggaggccgacatcctggctatggcagaaatgattgcagaggctgaggagttagacaaggcctcatctgacctttgtgatcttgtgagcaaccagagtgcagagggactcctggaagactgtgacctgtttgggcctgctcgagatgatgtcctggccatggcagtcaagatggccaatgtcttggatgagcctgggcaagacttggaggcagacttccctaagaatcctctggacattaatcccagtgtagacttcctctttgattgtggcctggtagggcctgaggatgtgtctactgaacaagaccttccccgaaccatgaggaagggtcaaaagcggctggtgctttccgaaagctgctcccgggactccatgagcagtcagcctagttgtaccgggctcaactattcatatggtgtcaatgcttggaagtgctgggtgcagtcaaaatatgccaatggagaaaccagcaaggttttaaaaaaagaacattgggccccaaaccccatccttttaaaaaaggatattc

SEQ ID NO: 382758 - DNA, 674 bp, Homo sapiens
aaatatatgtcaataaaattgtattttttagaaaatttctcagtgccaaaagtatgacagcatatccatcacattttagggattgtgggataagcatgtagtgagtgtttaataaatagttattgtctaaattgctataaattttagaaattgtttcaagaaacttgaaatgcaattacatcattgcattaaaaggctttattaatccttgaataaaagtattagaggcctggtacagtggctcacgcctgtaatcccagcactttgggaggccgaggcgggtagatcacctgaggtcgggagttcaagaccagcctgacccacatggagaaaccctgtctctactaaaaatacaaaattagccagggtggtggcgcatgccagtaatcccagctgctcaggaggctgaagcaggagaatcacttgaacgcgggaggtggaggttgtggtgagctgatatcgtgccattacactccagcctgggcaacaagagtgaaactccatctcaaaaaaaaagaaaaaaaaaagtattaggtggatggttagcttttttgtttttcctttacaaggatctctttttattctatatttttcataggtttattcatgtttttaaataatactgaatgatagtaattattatatacagtgagtagtttttccatgatagggtt

SEQ ID NO: 382759 - DNA, 403 bp, Homo sapiens
gcttactgtcccccgcagagcacttggtaaacgagatatgaaattgtcctttaagaatggaggtttaattttccagtaggacagagtattcaataaatgagagtggagactatattttatttgtctaaaatatatgttttttaaaatgtgttcctcaatagctggtaaaggacaaagccagggagttgagagcaaagggtatgcacgagctgagatagcaggatatttggaaaagttattgtttcttttttttttttttttttttcctgtctcatgtcctcaacctggagtagtgactctggtgagtagaacacttcttacaggctcactgggaccctgccactaaattttcacctggagaggcagcctaattaagagagagtttgctttgaaatcagttaga

SEQ ID NO: 382760 - DNA, 277 bp, Homo sapiens
ggaagggaaaagacagcaatcttttttatcttcacatttctgtgtcatttggcatgttaaaaaaatagcatgtataattttgtaattgaaacctaaaatataagaaagaaaattattgaatagaaatggtaaatactatgcagccataaaaaagaatgagagcgtgtcttttgcagggacatggatggaactggaggctattatccttagcaaactaacacaagaacagaaaaccaaatgccacatgatctcacttacaagtgggagataaatgatg

SEQ ID NO: 382761 - DNA, 676 bp, Homo sapiens
aattgaaagattggggtggactgacttttcaaaaagctaacttgtgcgtgggaaccagaaagacttgtgtttttcatcaaatgcagaaatcggtattgggggtggtggagaaattcacataatgcattttccatgaaatagcatcgttgtggagaccgctcttccgaatggaaagtcagagtcgtgcagaacattggcgccatcaggtcgtgtatagagcaggatttcgttgaaagtggaattaaacataaagattgcataatttgatgtctaatcatcagcaagtggaacaaaacctggattgaatagacggtgactcgatctccgtacagactgaggtccaaaggtctgcgctcacttctggaactttccttttgggccttgaccgaactcctgttattgtgtgcagtagcagaggctgcgctgcgtggttcagtttgtgcaaaggctatttattgtttctcatttactgaccactcgggagaagcctttagcaatagtttttcccgacacaaacttgaataaagtcgacccctgcagttcttcctgaggctctacaagcttcctggatgcaggaaccatgtgctgttctgacgacgctccgaaacctagttcagtgcctggcactagacaataaaaaattgctttctgaatgaaagtatatgctggcaggcgc

SEQ ID NO: 382762 - DNA, 459 bp, Homo sapiens
catagtagtcttatgctgaaaggctcccctgtaaaacattaacaaagggagctaatttattttgaatgtgctcaactatttaatgatgtttacaaaaatctgtgatcattaagtttgtggggtttaaagctaactaaatttttaaaacttgtataaaatactttgccaagttttctatgacatttatgtcttcatctggttttactcttaaattgtagactcctgtaaagagtatgtattttttttggctttgtaaatcttcttagaacataatacattgtcagagatttttttcttttttaaaaaatgacacatattaccctatagtaaaattatataaatctacctgaacttcatttgctccacctttttatttccaagttttaaaaaatgcagcttagcctaagctttattagttatgcaaagtcaaaataatgaaaataaaatgagattaactgg

SEQ ID NO: 382763 - DNA, 1185 bp, Homo sapiens
  misc_feature (397)..(397): n is a, c, g, or t
  misc_feature (1030)..(1030): n is a, c, g, or t
gtggatccgtgagagcatcagagaaccacggcattttcctacatcactgctgtgtgctttgcacagatgcaaaatgttaaaagagttcagaggctgcaggacttggcagggctagggtaagttggaaaagccttcctaagagcctagatatttggacagggcgtgcaaggtgggtgtgatttagatgtgagaatggagtttcatgcattccacctaaaggaatgtagcagaatgggacgtcctgtaagatacaggcacatcgagaatttacactggaggccaaatgaagtagacagggaaacaaggggaaggaattcttggtgcaaaaccaactgtgaggggctgaaatgtggcccccagattcctaacccccaggacctcagaatgtgactgcatntgaagatagggtttcatcaaacaggactggggtccttacaggaaggggtgatcacgacacagacacacacacagagggatgaccatgtgaggtcacagcaagaagacagcgtctgccagccaaggggaggccttgggaatccagccctgcccacatctccatctgggacttctggcttccaggactatgagagaataaatgttgttgaaaccacactatctgtggaattttgtaatgacagccccagcagaggaacaccagccttgaaagctttgatcaaaagctgtccattattttataacatagaactgtggaattccaatgtggatttagggttctgcattctctgctgtgctgtaagctccaagcaggaaggggctgtgtgtgcgggaactagctcagtgtctacctgtgtcccactccgggcaccgggcgtcacgtgcacagagttgagggtgacacctagtatgtgcggaggacctgcgtttggcacaggaacggacgatcagttgtggatgctgtattacaggaagacgccacttagagccatcgcagtcaatttgacctttgtgctgggagagcatcaggaatagatggttccaggctaagtaaaagtttacctacatgctgcanagatgccttggatttcaagccagcacgggctgctgcggctgtatttctggagtcagcagataatgaattattagatcaccagctaatgaggtaacgctgtagcataccacatgctttatgccaaaaataaaaaattgatatacggcaccagacgc

SEQ ID NO: 382764 - DNA, 370 bp, Homo sapiens
tcgggcttcgttctgctttaaattggaccacatgccctctgaggtaaaagagggacactccccagcccgagacaaagtcccgtttccttagaaagtcacacacacgatctagatgcaccctgtattttcctgacacgttctttatacccctgggcctgtgggctcttccttacgactaaaatccctggacacctctcttctggagaactgacactcatctttcaagacctagctcactcccccactctctgtaggcctatgcagaggactagcttggatgaagccggtacccagcctcccggcacacatgcacagtgctgctgttttccttccacacctctctccttgcggtacaggacctgcttggttc

SEQ ID NO: 382765 - DNA, 415 bp, Homo sapiens
acaaatcgttgttccataaatgaatgaatgaatgaacctgtcacatagtggcaaagcgtgaccaaggggcttgactctggatgaaatctgtcaaactagaccagaaaaccaaaggctaagaacctttgttttgagcaggagaaaaccctgtcttttcgacagtcttttcttatgttgtatgtattttcttgctttgcctcctgtcctggcctggaagctcactgagggcagagtcctcatcttaactcttccctttttttgagacagagtcttgctctgttgcccaggctggagtgcagaggtgcaatctcggctcactgcaatctctgcctcccaggtggaagcgattctcctgcctcagcctcccatgcagctgggattacagacatgtgccatcatgcccagctaatttttg

SEQ ID NO: 382766 - DNA, 188 bp, Homo sapiens
gagattgtgtgtctcggtgtgctttctcagctctggtgtaaggaacacagaaggttgaatgtgcttctggttatgtcgggaaaagaccagggaagtgtcgtgccattaaccaaaaccagaaatggatgctgtttatgaaagcagccacagcatgcctggtgctttttttttttttggagacagaatct

SEQ ID NO: 382767 - DNA, 375 bp, Homo sapiens
ggggaggggttttgggaaaccaaaatttggcccggggccttccgaaagggggccaaaaaaaaaaccttttcccccaaaaaaaaaaaaaaaaaaaggaaagaaggacttcatttttcacactccagtttgtctcccttctaggctgccagatctcatgcattcttcatttttcatcctcaaggtccaatccaagccctggcaattaataggcatgaattacctaattgttaaattactgagtaaatgagtgataaatgtataaattgaaactagggaagtttgtatagcaataggcaccttacagttttgttttgttatttggtttttatttcataatcataaacttaactctgcaatccagctaggcatggaagg

SEQ ID NO: 382768 - DNA, 1607 bp, Homo sapiens
atgcaaagaccacaatgcaggcctcagagattctgaagtcaactttacaaagctggtggacagaaaaactaatgattcttgaatgaaaataaaccaaacaagaacaaccctttattattaagtaggcctttgtatggtgggtctgtggaacacaactgtaatgtccatcacagtggtggctttacttggaaaccttctttgcttggctctttatgaccacaaccttctgctgaaatagtttgggattgttggtaagttatttgagctaaagacggtgtgttgggcatgcctcatagaggtggtaaaatatttttctcacgtcctgaaggaagatcttgagacctattcagctcaaagatcctagataaatccaaagtgttagaggaatagcatactccgtaggtgtatcacctcagatggctgactaaatcacggcatgcttgaggagcatgctcaacaagttcttactttatttacttggatcacatgaaaggagccaaccctgaggagtcgctgggctttgggctatcactttttgctgagaccaccaatagaaccttcttcagtactgaactggccttcaacctttagggcaacagagcagcagtgctccagaggaccttggcaagaaccatgccaagctgctactgaaggagtctacacaggcagatatgtggattctattagccagagcctgattctagaagctgctcatgatccaaattcctgctaggcctgatatctcccctggaacacagagtatttgaagcatttgaagaatttttttcaggttatgtttaaaattaaaaccaactcatgttgtgaaaaactcaagggcacggatagagtactgatgacttgtaatggaatggctttaccaacttaacaagaccattgtctcaggataagtccctaccctacaaaatgaaacagccaaggttaaatctaaggaacaagtttgaatgcataaattcagatcaggagaggactttcttttctatgaataaagaaaaccagaacctacaaataaaagacagctatatatcctcaaaaaatgacattcccaggatggtttcctcactgattaaaagaaaaatgttttagtgaatttgatgctaattctgttctagaacggtattatttgcagttctgttgtatattaatttggtgaataaatctagtaatgaaaagttcataatatgggaggctaaggcaagaggatcacttgagcctgggaggcagaggttgaggagagccaagattgcgccagtgcacttcagcatgggcgctagagccagaccctgtctcaaaaaaaaaaaaaaaaaaggaaagaaggacttcatttttcacactccagtttgtctcccttctaggctgccagatctcatgcattcttcatttttcatcctcaaggtccaatccaagccctggcaattaataggcatgaattacctaattgttaaattactgagtaaatgagtgataaatgtataaattgaaactagggaagtttgtatagcaataggcaccttacagttttgttttgttatttggtttttatttcataatcataaacttaactctgcaatccagctaggcatggaagg

SEQ ID NO: 382769 - DNA, 3194 bp, Homo sapiens
ggcggcggggcggggcgtggccggcgtggcggcgctggagccgggaagggggcgcgggggagagatggtcgcaagatggcggcgctgaaggaggataggagctacgggctgtcgtgcgggcgggttagcgacggcagcaaggtgtcggtgttccacgtgaagctcaccgacagtgccctgagggccttcgagagctaccgcgccagacaggattctgtttcactgaggccatctatccgatttcaaggaagccaagggcacatctccatcccccagcctgactgccccgcagaggcgcggacgttctccttctacctctccaacatcggccgcgacaacccccagggcagcttcgactgcatccagcagtatgtctccagtcatggggaagttcacctggactgcctgggcagcatacaggacaagatcacggtgtgtgccaccgacgactcctaccagaaggcgcggcagagcatggcccaggcggaggaggagacgcggagccgaagtgccattgtcatcaaggctggaggccgctacctgggcaagaaggttcagtttcggaaaccagccccaggtgcaacagacgcggtgccctcccggaagcgggcaacccccatcaacttggcgagtgccatcaggaagagtggtgccagtgccgtgagtgggggcagcggggtgtcccagaggcccttccgtgaccgagtgctgcacctcctggcactacggccctaccgcaaggctgagctgctgctgcgactgcagaaggacggcctgacgcaggcggacaaggacgcgctggatggcctcctccagcaggtggccaacatgagtgctaaggacggcacgtgtacactgcaggactgcatgtacaaggatgtgcagaaggactggcctggctactcggagggggaccagcagctgctgaagcgggtgctcgtccggaagctgtgccagccacagagcactggcagcctccttggagaccctgctgcctccagccccccaggcgagcgtgggcgctcggcctcgcccccacagaagcggctgcagcctcctgatttcatcgaccccctagccaacaagaaaccccggatatcgcacttcactcagagagctcagcctgccgtcaacgggaagctgggcgtgcccaatggccgtgaggccttgctgcccaccccgggcccaccagccagcacggacaccctcagctccagcactcacctgcccccgcggctggagcccccgagggcccacgaccccctggccgatgtcagcaatgacctgggccacagcggccgagactgtgagcacggagaggcggctgccccagcccccactgtgcgcctcggcctgcccctgctgacggactgtgcccagcccagcaggccacacggcagcccctcgcgcagcaagcccaagaagaagtccaagaagcacaaagacaaggagagggcggctgaggacaagccccgggcccagcttccagactgtgcacctgccacccatgccacccccggagccccagcagacaccccaggtttaaacggaacctgcagcgtttccagtgttcccacgtccacgtcggagacgcctgactacttgctgaagtacgcagccatctcctcttcggagcagcgccagagctacaagaacgacttcaatgccgagtacagcgagtaccgcgacctgcacgcccgcattgagcgcatcacgcggcggttcacccagctcgacgcccagctccggcagctctcccagggctccgaggagtatgagactactcgagggcagattttgcaggaatatcgaaaaatcaaaaagaccaacaccaactacagccaggagaagcaccgctgcgagtacctgcacagcaagctggcccacatcaagaggctcatcgccgagtacgaccagcggcagctgcaggcttggccctagccgccctccccgatggcggggatctgggagggtcgggggagcaaaaggcggtgagagaggatttatttaaaaaaataaacccgaggaagatgctcatctgagccagcaccgccggctttcagggcagcccctgcagacgtctggccctggcgggtggctgcaagcccacctcggccctccctgcgcttcctgagcagtccctgcttatgatgggctccccaggaagcccactgcctcctccctggctgcagcctccggggttcagcctcctgtctcgccagaagactcctaggcccttggggtggcgcgcctgccttttctagttttatacaaagacagccacttttagctactgctaatgagacttgagtctatttttgtacaaaagagaagcaaaatcttttttctaaacctgtgcctccctctcctcggacacccagggtctagccgctgccctgggtcctgcctgcagtattacagaggtcgtcgaaaggtgcagctgcgttctgagggcgtggggaatgggcaggtggcctctgctggtctctggctctacgtttaggcacccctttccccagcctctcctccttgggcagggtctctgctccagcaagcaaacagggtggcccaggtggctattttgagaactccagctggtgcccccagacagctgctcagagccaagggggcagagggctttcagcgcccccaggcctgccctgctatttcaggccctcagctgtcgggggccactgtgtttctgtgctccaagttgagactcggccgcagcggcgtcagacttttctttgcgatgtcctcggtttcccatttgttgctgctgctgctcattccacactgttgagaccttgtggtctcgatgctgctggcctccctccgtccctctgtccacttgtgggtcctggggtcgtcttagcagagccaccgccaaggtttgcactcagggaggggctgatggagggctgggcgccatggggtcagggaggccccagggacccatgggcagagctggggagccaggaggatgggtctgcctgctctgggggtgcaggctctgcagacaccccaattgctgctctgttgctgtgcctagtctagtgtcccccaaagcatcggggggccacgcaagtgtgggtgtgtgagtgtgcgtatgtggggaccccccaggcatggtggggtctgaggcgtgtgttcccatttagggctgaatgaagccatgacttggaaaggtggtg

SEQ ID NO: 382770 - DNA, 3342 bp, Homo sapiens
gtggtcatcccgcctcagccacctactacaggaccgccaagaaaagaagttcccaaaaccactcctagtgagcccaagaaaaagcagcctccaccaccagaatcaggaaaaaccacctccggtcaataagcaggagaatgcaggcactttgaacatcctcagcactctctccaatggcaatagttctaagcaaaaaattccagcagatggagtccacaggatcagagtggactttaagaactcgccgtgtgtgtgtcagagaatgttgctcctgtgccctgagtcaacaaagacggcccctgtgagctcaagggcagttgggaaggtgtagcgaacatcctgtaaaacgtcccatcttgattctgtttcactgaggccatctatccgatttcaaggaagccaagggcacatctccatcccccagcctgactgccccgcagaggcgcggacgttctccttctacctctccaacatcggccgcgacaacccccagggcagcttcgactgcatccagcagtatgtctccagtcatggggaagttcacctggactgcctgggcagcatacaggacaagatcacggtgtgtgccaccgacgactcctaccagaaggcgcggcagagcatggcccaggcggaggaggagacgcggagccgaagtgccattgtcatcaaggctggaggccgctacctgggcaagaaggttcagtttcggaaaccagccccaggtgcaacagacgcggtgccctcccggaagcgggcaacccccatcaacttggcgagtgccatcaggaagagtggtgccagtgccgtgagtgggggcagcggggtgtcccagaggcccttccgtgaccgagtgctgcacctcctggcactacggccctaccgcaaggctgagctgctgctgcgactgcagaaggacggcctgacgcaggcggacaaggacgcgctggatggcctcctccagcaggtggccaacatgagtgctaaggacggcacgtgtacactgcaggactgcatgtacaaggatgtgcagaaggactggcctggctactcggagggggaccagcagctgctgaagcgggtgctcgtccggaagctgtgccagccacagagcactggcagcctccttggagaccctgctgcctccagccccccaggcgagcgtgggcgctcggcctcgcccccacagaagcggctgcagcctcctgatttcatcgaccccctagccaacaagaaaccccggatatcgcacttcactcagagagctcagcctgccgtcaacgggaagctgggcgtgcccaatggccgtgaggccttgctgcccaccccgggcccaccagccagcacggacaccctcagctccagcactcacctgcccccgcggctggagcccccgagggcccacgaccccctggccgatgtcagcaatgacctgggccacagcggccgagactgtgagcacggagaggcggctgccccagcccccactgtgcgcctcggcctgcccctgctgacggactgtgcccagcccagcaggccacacggcagcccctcgcgcagcaagcccaagaagaagtccaagaagcacaaagacaaggagagggcggctgaggacaagccccgggcccagcttccagactgtgcacctgccacccatgccacccccggagccccagcagacaccccaggtttaaacggaacctgcagcgtttccagtgttcccacgtccacgtcggagacgcctgactacttgctgaagtacgcagccatctcctcttcggagcagcgccagagctacaagaacgacttcaatgccgagtacagcgagtaccgcgacctgcacgcccgcattgagcgcatcacgcggcggttcacccagctcgacgcccagctccggcagctctcccagggctccgaggagtatgagactactcgagggcagattttgcaggaatatcgaaaaatcaaaaagaccaacaccaactacagccaggagaagcaccgctgcgagtacctgcacagcaagctggcccacatcaagaggctcatcgccgagtacgaccagcggcagctgcaggcttggccctagccgccctccccgatggcggggatctgggagggtcgggggagcaaaaggcggtgagagaggatttatttaaaaaaataaacccgaggaagatgctcatctgagccagcaccgccggctttcagggcagcccctgcagacgtctggccctggcgggtggctgcaagcccacctcggccctccctgcgcttcctgagcagtccctgcttatgatgggctccccaggaagcccactgcctcctccctggctgcagcctccggggttcagcctcctgtctcgccagaagactcctaggcccttggggtggcgcgcctgccttttctagttttatacaaagacagccacttttagctactgctaatgagacttgagtctatttttgtacaaaagagaagcaaaatcttttttctaaacctgtgcctccctctcctcggacacccagggtctagccgctgccctgggtcctgcctgcagtattacagaggtcgtcgaaaggtgcagctgcgttctgagggcgtggggaatgggcaggtggcctctgctggtctctggctctacgtttaggcacccctttccccagcctctcctccttgggcagggtctctgctccagcaagcaaacagggtggcccaggtggctattttgagaactccagctggtgcccccagacagctgctcagagccaagggggcagagggctttcagcgcccccaggcctgccctgctatttcaggccctcagctgtcgggggccactgtgtttctgtgctccaagttgagactcggccgcagcggcgtcagacttttctttgcgatgtcctcggtttcccatttgttgctgctgctgctcattccacactgttgagaccttgtggtctcgatgctgctggcctccctccgtccctctgtccacttgtgggtcctggggtcgtcttagcagagccaccgccaaggtttgcactcagggaggggctgatggagggctgggcgccatggggtcagggaggccccagggacccatgggcagagctggggagccaggaggatgggtctgcctgctctgggggtgcaggctctgcagacaccccaattgctgctctgttgctgtgcctagtctagtgtcccccaaagcatcggggggccacgcaagtgtgggtgtgtgagtgtgcgtatgtggggaccccccaggcatggtggggtctgaggcgtgtgttcccatttagggctgaatgaagccatgacttggaaaggtggtg

SEQ ID NO: 382771 - DNA, 3296 bp, Homo sapiens
gtggtcatcccgcctcagccacctactacaggaccgccaagaaaagaagttcccaaaaccactcctagtgagcccaagaaaaagcagcctccaccaccagaatcaggtccagagcagagcaaacagaaaaaagtggctccccgcccaagtatccctgtaaaacaaaaaccaaaagaaaaggaaaaaccacctccggtcaataagcaggagaatgcaggcactttgaacatcctcagcactctctccaatggcaatagttctaagcaaaaaattccagcagatggagtccacaggatcagagtggactttaaggattctgtttcactgaggccatctatccgatttcaaggaagccaagggcacatctccatcccccagcctgactgccccgcagaggcgcggacgttctccttctacctctccaacatcggccgcgacaacccccagggcagcttcgactgcatccagcagtatgtctccagtcatggggaagttcacctggactgcctgggcagcatacaggacaagatcacggtgtgtgccaccgacgactcctaccagaaggcgcggcagagcatggcccaggcggaggaggagacgcggagccgaagtgccattgtcatcaaggctggaggccgctacctgggcaagaaggttcagtttcggaaaccagccccaggtgcaacagacgcggtgccctcccggaagcgggcaacccccatcaacttggcgagtgccatcaggaagagtggtgccagtgccgtgagtgggggcagcggggtgtcccagaggcccttccgtgaccgagtgctgcacctcctggcactacggccctaccgcaaggctgagctgctgctgcgactgcagaaggacggcctgacgcaggcggacaaggacgcgctggatggcctcctccagcaggtggccaacatgagtgctaaggacggcacgtgtacactgcaggactgcatgtacaaggatgtgcagaaggactggcctggctactcggagggggaccagcagctgctgaagcgggtgctcgtccggaagctgtgccagccacagagcactggcagcctccttggagaccctgctgcctccagccccccaggcgagcgtgggcgctcggcctcgcccccacagaagcggctgcagcctcctgatttcatcgaccccctagccaacaagaaaccccggatatcgcacttcactcagagagctcagcctgccgtcaacgggaagctgggcgtgcccaatggccgtgaggccttgctgcccaccccgggcccaccagccagcacggacaccctcagctccagcactcacctgcccccgcggctggagcccccgagggcccacgaccccctggccgatgtcagcaatgacctgggccacagcggccgagactgtgagcacggagaggcggctgccccagcccccactgtgcgcctcggcctgcccctgctgacggactgtgcccagcccagcaggccacacggcagcccctcgcgcagcaagcccaagaagaagtccaagaagcacaaagacaaggagagggcggctgaggacaagccccgggcccagcttccagactgtgcacctgccacccatgccacccccggagccccagcagacaccccaggtttaaacggaacctgcagcgtttccagtgttcccacgtccacgtcggagacgcctgactacttgctgaagtacgcagccatctcctcttcggagcagcgccagagctacaagaacgacttcaatgccgagtacagcgagtaccgcgacctgcacgcccgcattgagcgcatcacgcggcggttcacccagctcgacgcccagctccggcagctctcccagggctccgaggagtatgagactactcgagggcagattttgcaggaatatcgaaaaatcaaaaagaccaacaccaactacagccaggagaagcaccgctgcgagtacctgcacagcaagctggcccacatcaagaggctcatcgccgagtacgaccagcggcagctgcaggcttggccctagccgccctccccgatggcggggatctgggagggtcgggggagcaaaaggcggtgagagaggatttatttaaaaaaataaacccgaggaagatgctcatctgagccagcaccgccggctttcagggcagcccctgcagacgtctggccctggcgggtggctgcaagcccacctcggccctccctgcgcttcctgagcagtccctgcttatgatgggctccccaggaagcccactgcctcctccctggctgcagcctccggggttcagcctcctgtctcgccagaagactcctaggcccttggggtggcgcgcctgccttttctagttttatacaaagacagccacttttagctactgctaatgagacttgagtctatttttgtacaaaagagaagcaaaatcttttttctaaacctgtgcctccctctcctcggacacccagggtctagccgctgccctgggtcctgcctgcagtattacagaggtcgtcgaaaggtgcagctgcgttctgagggcgtggggaatgggcaggtggcctctgctggtctctggctctacgtttaggcacccctttccccagcctctcctccttgggcagggtctctgctccagcaagcaaacagggtggcccaggtggctattttgagaactccagctggtgcccccagacagctgctcagagccaagggggcagagggctttcagcgcccccaggcctgccctgctatttcaggccctcagctgtcgggggccactgtgtttctgtgctccaagttgagactcggccgcagcggcgtcagacttttctttgcgatgtcctcggtttcccatttgttgctgctgctgctcattccacactgttgagaccttgtggtctcgatgctgctggcctccctccgtccctctgtccacttgtgggtcctggggtcgtcttagcagagccaccgccaaggtttgcactcagggaggggctgatggagggctgggcgccatggggtcagggaggccccagggacccatgggcagagctggggagccaggaggatgggtctgcctgctctgggggtgcaggctctgcagacaccccaattgctgctctgttgctgtgcctagtctagtgtcccccaaagcatcggggggccacgcaagtgtgggtgtgtgagtgtgcgtatgtggggaccccccaggcatggtggggtctgaggcgtgtgttcccatttagggctgaatgaagccatgacttggaaaggtggtg

SEQ ID NO: 382772 - DNA, 3254 bp, Homo sapiens
ggcggcggggcggggcgtggccggcgtggcggcgctggagccgggaagggggcgcgggggagagatggtcgcaagatggcggcgctgaaggaggataggagctacgggctgtcgtgcgggcgggttagcgacggcagcaaggtgtcggtgttccacgtgaagctcaccgacagtgccctgagggccttcgagagctaccgcgccagacaggattctgtttcactgaggccatctatccgatttcaaggaagccaagggcctgagagctctgcacagctggatgtggggatatggacatgatgatccatgggcttccagcacatctccatcccccagcctgactgccccgcagaggcgcggacgttctccttctacctctccaacatcggccgcgacaacccccagggcagcttcgactgcatccagcagtatgtctccagtcatggggaagttcacctggactgcctgggcagcatacaggacaagatcacggtgtgtgccaccgacgactcctaccagaaggcgcggcagagcatggcccaggcggaggaggagacgcggagccgaagtgccattgtcatcaaggctggaggccgctacctgggcaagaaggttcagtttcggaaaccagccccaggtgcaacagacgcggtgccctcccggaagcgggcaacccccatcaacttggcgagtgccatcaggaagagtggtgccagtgccgtgagtgggggcagcggggtgtcccagaggcccttccgtgaccgagtgctgcacctcctggcactacggccctaccgcaaggctgagctgctgctgcgactgcagaaggacggcctgacgcaggcggacaaggacgcgctggatggcctcctccagcaggtggccaacatgagtgctaaggacggcacgtgtacactgcaggactgcatgtacaaggatgtgcagaaggactggcctggctactcggagggggaccagcagctgctgaagcgggtgctcgtccggaagctgtgccagccacagagcactggcagcctccttggagaccctgctgcctccagccccccaggcgagcgtgggcgctcggcctcgcccccacagaagcggctgcagcctcctgatttcatcgaccccctagccaacaagaaaccccggatatcgcacttcactcagagagctcagcctgccgtcaacgggaagctgggcgtgcccaatggccgtgaggccttgctgcccaccccgggcccaccagccagcacggacaccctcagctccagcactcacctgcccccgcggctggagcccccgagggcccacgaccccctggccgatgtcagcaatgacctgggccacagcggccgagactgtgagcacggagaggcggctgccccagcccccactgtgcgcctcggcctgcccctgctgacggactgtgcccagcccagcaggccacacggcagcccctcgcgcagcaagcccaagaagaagtccaagaagcacaaagacaaggagagggcggctgaggacaagccccgggcccagcttccagactgtgcacctgccacccatgccacccccggagccccagcagacaccccaggtttaaacggaacctgcagcgtttccagtgttcccacgtccacgtcggagacgcctgactacttgctgaagtacgcagccatctcctcttcggagcagcgccagagctacaagaacgacttcaatgccgagtacagcgagtaccgcgacctgcacgcccgcattgagcgcatcacgcggcggttcacccagctcgacgcccagctccggcagctctcccagggctccgaggagtatgagactactcgagggcagattttgcaggaatatcgaaaaatcaaaaagaccaacaccaactacagccaggagaagcaccgctgcgagtacctgcacagcaagctggcccacatcaagaggctcatcgccgagtacgaccagcggcagctgcaggcttggccctagccgccctccccgatggcggggatctgggagggtcgggggagcaaaaggcggtgagagaggatttatttaaaaaaataaacccgaggaagatgctcatctgagccagcaccgccggctttcagggcagcccctgcagacgtctggccctggcgggtggctgcaagcccacctcggccctccctgcgcttcctgagcagtccctgcttatgatgggctccccaggaagcccactgcctcctccctggctgcagcctccggggttcagcctcctgtctcgccagaagactcctaggcccttggggtggcgcgcctgccttttctagttttatacaaagacagccacttttagctactgctaatgagacttgagtctatttttgtacaaaagagaagcaaaatcttttttctaaacctgtgcctccctctcctcggacacccagggtctagccgctgccctgggtcctgcctgcagtattacagaggtcgtcgaaaggtgcagctgcgttctgagggcgtggggaatgggcaggtggcctctgctggtctctggctctacgtttaggcacccctttccccagcctctcctccttgggcagggtctctgctccagcaagcaaacagggtggcccaggtggctattttgagaactccagctggtgcccccagacagctgctcagagccaagggggcagagggctttcagcgcccccaggcctgccctgctatttcaggccctcagctgtcgggggccactgtgtttctgtgctccaagttgagactcggccgcagcggcgtcagacttttctttgcgatgtcctcggtttcccatttgttgctgctgctgctcattccacactgttgagaccttgtggtctcgatgctgctggcctccctccgtccctctgtccacttgtgggtcctggggtcgtcttagcagagccaccgccaaggtttgcactcagggaggggctgatggagggctgggcgccatggggtcagggaggccccagggacccatgggcagagctggggagccaggaggatgggtctgcctgctctgggggtgcaggctctgcagacaccccaattgctgctctgttgctgtgcctagtctagtgtcccccaaagcatcggggggccacgcaagtgtgggtgtgtgagtgtgcgtatgtggggaccccccaggcatggtggggtctgaggcgtgtgttcccatttagggctgaatgaagccatgacttggaaaggtggtg

SEQ ID NO: 382773 - DNA, 1942 bp, Homo sapiens
ggcggcggggcggggcgtggccggcgtggcggcgctggagccgggaagggggcgcgggggagagatggtcgcaagatggcggcgctgaaggaggataggagctacgggctgtcgtgcgggcgggttagcgacggcagcaaggtgtcggtgttccacgtgaagctcaccgacagtgccctgagggccttcgagagctaccgcgccagacaggattctgtttcactgaggccatctatccgatttcaaggaagccaagggcacatctccatcccccagcctgactgccccgcagaggcgcggacgttctccttctacctctccaacatcggccgcgacaacccccagggcagcttcgactgcatccagcagtatgtctccagtcatggggaagttcacctggactgcctgggcagcatacaggacaagatcacggtgtgtgccaccgacgactcctaccagaaggcgcggcagagcatggcccaggcggaggaggagacgcggagccgaagtgccattgtcatcaaggctggaggccgctacctgggcaagaaggttcagtttcggaaaccagccccaggtgcaacagacgcggtgccctcccggaagcgggcaacccccatcaacttggcgagtgccatcaggaagagtggtgccagtgccgtgagtgggggcagcggggtgtcccagaggcccttccgtgaccgagtgctgcacctcctggcactacggccctaccgcaaggctgagctgctgctgcgactgcagaaggacggcctgacgcaggcggacaaggacgcgctggatggcctcctccagcaggtggccaacatgagtgctaaggacggcacgtgtacactgcaggactgcatgtacaaggatgtgcagaaggactggcctggctactcggagggggaccagcagctgctgaagcgggtgctcgtccggaagctgtgccagccacagagcactggcagcctccttggagaccctgctgcctccagccccccaggcgagcgtgggcgctcggcctcgcccccacagaagcggctgcagcctcctgatttcatcgaccccctagccaacaagaaaccccggatatcgcacttcactcagagagctcagcctgccgtcaacgggaagctgggcgtgcccaatggccgtgaggccttgctgcccaccccgggcccaccagccagcacggacaccctcagctccagcactcacctgcccccgcggctggagcccccgagggcccacgaccccctggccgatgtcagcaatgacctgggccacagcggccgagactgtgagcacggagaggcggctgccccagcccccactgtgcgcctcggcctgcccctgctgacggactgtgcccagcccagcaggccacacggcagcccctcgcgcagcaagcccaagaagaagtccaagaagcacaaagacaaggagagggcggctgaggacaagccccgggcccagcttccagactgtgcacctgccacccatgccacccccggagccccagcagacaccccaggtttaaacggaacctgcagcgtttccagtgttcccacgtccacgtcggagacgcctgactacttgctgaagtacgcagccatctcctcttcggagcagcgccagagctacaagaacgacttcaatgccgagtacagcgagtaccgcgacctgcacgcccgcattgagcgcatcacgcggcggttcacccagctcgacgcccagctccggcagctctcccagggctccgaggagtatgaggtagagcccccccgctgcctactgtgccctggctctggcgggagccagggcccacttgggcgcgcaccatcgccaccacgagcttggtggccccagagtctggcccttccccaggcagcgcttctccccctggtgcactccatgcagcaaccccatggttctg

SEQ ID NO: 382774 - DNA, 1165 bp, Homo sapiens
ggcggcggggcggggcgtggccggcgtggcggcgctggagccgggaagggggcgcgggggagagatggtcgcaagatggcggcgctgaaggaggataggagctacgggctgtcgtgcgggcgggttagcgacggcagcaaggtgtcggtgttccacgtgaagctcaccgacagtgccctgagggccttcgagagctaccgcgccagacaggattctgtttcactgaggccatctatccgatttcaaggaagccaagggcacatctccatcccccagcctgactgccccgcagaggcgcggacgttctccttctacctctccaacatcggccgcgacaacccccagggcagcttcgactgcatccagcagtatgtctccagtcatggggaagttcacctggactgcctgggcagcatacaggacaagatcacggtgtgtgccaccgacgactcctaccagaaggcgcggcagagcatggcccaggcggaggaggagacgcggagccgaagtgccattgtcatcaaggctggaggccgctacctgggcaagaaggttcagtttcggaaaccagccccaggtgcaacagacgcggtgccctcccggaagcgggcaacccccatcaacttggcgagtgccatcaggaagagtggtgccagtgccgtgagtgggggcagcggggtgtcccagaggcccttccgtgaccgagtgctgcacctcctggcactacggccctaccgcaaggctgagctgctgctgcgactgcagaaggacggcctgacgcaggcggacaaggacgcgctggatggcctcctccagcaggtgggtgccgccccgatgtcttgtctttaccagtggtctccgcagatggtcttgtgcgggtgggatgggccagagcatggagactgggattgggactggcaaggaagagcccttcctggggtctctcacaggttcagaacctgcctgagagccagggcctcctggattagaacaagcttagggggccatggatgcgtttctgggcatggccccgactgtccagggttgagaggtggactcagcatggagcccaggccctccttcactgtctgctgacacacgggccgtggggcctggcacagtggattcaggcttcagttgcagacgatttgtgactcaaggcctg

SEQ ID NO: 382775 - DNA, 686 bp, Homo sapiens
ggcggcggggcggggcgtggccggcgtggcggcgctggagccgggaagggggcgcgggggagagatggtcgcaagatggcggcgctgaaggaggataggagctacgggctgtcgtgcgggcgggttagcgacggcagcaaggtgtcggtgttccacgtgaagctcaccgacagtgccctgagggccttcgagagctaccgcgccagacaggattctgtttcactgaggccatctatccgatttcaaggaagccaaggggtaagtttttgtcttaatcattcatatttggaatcttgggactggtatagtctcaggtctgtccttgctcgctgggtacagcagcagctcatggcagtgtttgggccctgtctgccaccatgcaaggctgggttctaggcccccaggatagccccttggctggggccacaccaggacgtgtcgggtgcacgtcacaggctgcttgggcaatgggcggctctcctctcccagtggctcccttcatgcagcgatgtgcacctagcttccactctgatagggcaggggcccccaacccccagcactggactggttaggaactgcccacacagcaggaggtgagctgtgggtgagtgagcacgaccacctgagctctgcctcctgtcagctgagcctgttattagattcttacaggagcgcgaaccctattg

SEQ ID NO: 382776 - DNA, 642 bp, Homo sapiens
gtggtcatcccgcctcagccacctactacaggaccgccaagaaaagaagttcccaaaaccactcctagtgagcccaagaaaaagcagcctccaccaccagaatcaggaaaaaccacctccggtcaataagcaggagaatgcaggcactttgaacatcctcagcactctctccaatggcaatagttctaagcaaaaaattccagcagatggagtccacaggatcagagtggactttaaggattctgtttcactgaggccatctatccgatttcaaggaagccaagggcacatctccatcccccagcctgactgccccgcagaggcgcggacgttctccttctacctctccaacatcggccgcgacaacccccagggcagcttcgactgcatccagcagtatgtctccagtcatggggaagttcacctggactgcctgggcagcatacaggacaagatcacggtgtgttggtgtcggtgtggtgtatctgggtgtgtggtatgagggtgtaggtgtgtgtgttgggtgcgtgtggtgtgtggtgtgtgttggggtgtggtgtgtgttggggtaaagaagctggagtggtggcctgtttggattcaggcccaggggccgagacattcccttcttcactcttttcc

SEQ ID NO: 382777 - DNA, 3072 bp, Homo sapiens
ggcggcggggcggggcgtggccggcgtggcggcgctggagccgggaagggggcgcgggggagagatggtcgcaagatggcggcgctgaaggaggataggagctacgggctgtcgtgcgggcgggttagcgacggcagcaaggtgtcggtgttccacgtgaagctcaccgacagtgccctgagggccttcgagagctaccgcgccagacaggattctgtttcactgaggccatctatccgatttcaaggaagccaagggtcatggggaagttcacctggactgcctgggcagcatacaggacaagatcacggtgtgtgccaccgacgactcctaccagaaggcgcggcagagcatggcccaggcggaggaggagacgcggagccgaagtgccattgtcatcaaggctggaggccgctacctgggcaagaaggttcagtttcggaaaccagccccaggtgcaacagacgcggtgccctcccggaagcgggcaacccccatcaacttggcgagtgccatcaggaagagtggtgccagtgccgtgagtgggggcagcggggtgtcccagaggcccttccgtgaccgagtgctgcacctcctggcactacggccctaccgcaaggctgagctgctgctgcgactgcagaaggacggcctgacgcaggcggacaaggacgcgctggatggcctcctccagcaggtggccaacatgagtgctaaggacggcacgtgtacactgcaggactgcatgtacaaggatgtgcagaaggactggcctggctactcggagggggaccagcagctgctgaagcgggtgctcgtccggaagctgtgccagccacagagcactggcagcctccttggagaccctgctgcctccagccccccaggcgagcgtgggcgctcggcctcgcccccacagaagcggctgcagcctcctgatttcatcgaccccctagccaacaagaaaccccggatatcgcacttcactcagagagctcagcctgccgtcaacgggaagctgggcgtgcccaatggccgtgaggccttgctgcccaccccgggcccaccagccagcacggacaccctcagctccagcactcacctgcccccgcggctggagcccccgagggcccacgaccccctggccgatgtcagcaatgacctgggccacagcggccgagactgtgagcacggagaggcggctgccccagcccccactgtgcgcctcggcctgcccctgctgacggactgtgcccagcccagcaggccacacggcagcccctcgcgcagcaagcccaagaagaagtccaagaagcacaaagacaaggagagggcggctgaggacaagccccgggcccagcttccagactgtgcacctgccacccatgccacccccggagccccagcagacaccccaggtttaaacggaacctgcagcgtttccagtgttcccacgtccacgtcggagacgcctgactacttgctgaagtacgcagccatctcctcttcggagcagcgccagagctacaagaacgacttcaatgccgagtacagcgagtaccgcgacctgcacgcccgcattgagcgcatcacgcggcggttcacccagctcgacgcccagctccggcagctctcccagggctccgaggagtatgagactactcgagggcagattttgcaggaatatcgaaaaatcaaaaagaccaacaccaactacagccaggagaagcaccgctgcgagtacctgcacagcaagctggcccacatcaagaggctcatcgccgagtacgaccagcggcagctgcaggcttggccctagccgccctccccgatggcggggatctgggagggtcgggggagcaaaaggcggtgagagaggatttatttaaaaaaataaacccgaggaagatgctcatctgagccagcaccgccggctttcagggcagcccctgcagacgtctggccctggcgggtggctgcaagcccacctcggccctccctgcgcttcctgagcagtccctgcttatgatgggctccccaggaagcccactgcctcctccctggctgcagcctccggggttcagcctcctgtctcgccagaagactcctaggcccttggggtggcgcgcctgccttttctagttttatacaaagacagccacttttagctactgctaatgagacttgagtctatttttgtacaaaagagaagcaaaatcttttttctaaacctgtgcctccctctcctcggacacccagggtctagccgctgccctgggtcctgcctgcagtattacagaggtcgtcgaaaggtgcagctgcgttctgagggcgtggggaatgggcaggtggcctctgctggtctctggctctacgtttaggcacccctttccccagcctctcctccttgggcagggtctctgctccagcaagcaaacagggtggcccaggtggctattttgagaactccagctggtgcccccagacagctgctcagagccaagggggcagagggctttcagcgcccccaggcctgccctgctatttcaggccctcagctgtcgggggccactgtgtttctgtgctccaagttgagactcggccgcagcggcgtcagacttttctttgcgatgtcctcggtttcccatttgttgctgctgctgctcattccacactgttgagaccttgtggtctcgatgctgctggcctccctccgtccctctgtccacttgtgggtcctggggtcgtcttagcagagccaccgccaaggtttgcactcagggaggggctgatggagggctgggcgccatggggtcagggaggccccagggacccatgggcagagctggggagccaggaggatgggtctgcctgctctgggggtgcaggctctgcagacaccccaattgctgctctgttgctgtgcctagtctagtgtcccccaaagcatcggggggccacgcaagtgtgggtgtgtgagtgtgcgtatgtggggaccccccaggcatggtggggtctgaggcgtgtgttcccatttagggctgaatgaagccatgacttggaaaggtggtg

SEQ ID NO: 382778 - DNA, 2981 bp, Homo sapiens
caccaggcgcacttctgcacccaggcgcacttctgcacccaggcgcacatctccatcccccagcctgactgccccgcagaggcgcggacgttctccttctacctctccaacatcggccgcgacaacccccagggcagcttcgactgcatccagcagtatgtctccagtcatggggaagttcacctggactgcctgggcagcatacaggacaagatcacggtgtgtgccaccgacgactcctaccagaaggcgcggcagagcatggcccaggcggaggaggagacgcggagccgaagtgccattgtcatcaaggctggaggccgctacctgggcaagaaggttcagtttcggaaaccagccccaggtgcaacagacgcggtgccctcccggaagcgggcaacccccatcaacttggcgagtgccatcaggaagagtggtgccagtgccgtgagtgggggcagcggggtgtcccagaggcccttccgtgaccgagtgctgcacctcctggcactacggccctaccgcaaggctgagctgctgctgcgactgcagaaggacggcctgacgcaggcggacaaggacgcgctggatggcctcctccagcaggtggccaacatgagtgctaaggacggcacgtgtacactgcaggactgcatgtacaaggatgtgcagaaggactggcctggctactcggagggggaccagcagctgctgaagcgggtgctcgtccggaagctgtgccagccacagagcactggcagcctccttggagaccctgctgcctccagccccccaggcgagcgtgggcgctcggcctcgcccccacagaagcggctgcagcctcctgatttcatcgaccccctagccaacaagaaaccccggatatcgcacttcactcagagagctcagcctgccgtcaacgggaagctgggcgtgcccaatggccgtgaggccttgctgcccaccccgggcccaccagccagcacggacaccctcagctccagcactcacctgcccccgcggctggagcccccgagggcccacgaccccctggccgatgtcagcaatgacctgggccacagcggccgagactgtgagcacggagaggcggctgccccagcccccactgtgcgcctcggcctgcccctgctgacggactgtgcccagcccagcaggccacacggcagcccctcgcgcagcaagcccaagaagaagtccaagaagcacaaagacaaggagagggcggctgaggacaagccccgggcccagcttccagactgtgcacctgccacccatgccacccccggagccccagcagacaccccaggtttaaacggaacctgcagcgtttccagtgttcccacgtccacgtcggagacgcctgactacttgctgaagtacgcagccatctcctcttcggagcagcgccagagctacaagaacgacttcaatgccgagtacagcgagtaccgcgacctgcacgcccgcattgagcgcatcacgcggcggttcacccagctcgacgcccagctccggcagctctcccagggctccgaggagtatgagactactcgagggcagattttgcaggaatatcgaaaaatcaaaaagaccaacaccaactacagccaggagaagcaccgctgcgagtacctgcacagcaagctggcccacatcaagaggctcatcgccgagtacgaccagcggcagctgcaggcttggccctagccgccctccccgatggcggggatctgggagggtcgggggagcaaaaggcggtgagagaggatttatttaaaaaaataaacccgaggaagatgctcatctgagccagcaccgccggctttcagggcagcccctgcagacgtctggccctggcgggtggctgcaagcccacctcggccctccctgcgcttcctgagcagtccctgcttatgatgggctccccaggaagcccactgcctcctccctggctgcagcctccggggttcagcctcctgtctcgccagaagactcctaggcccttggggtggcgcgcctgccttttctagttttatacaaagacagccacttttagctactgctaatgagacttgagtctatttttgtacaaaagagaagcaaaatcttttttctaaacctgtgcctccctctcctcggacacccagggtctagccgctgccctgggtcctgcctgcagtattacagaggtcgtcgaaaggtgcagctgcgttctgagggcgtggggaatgggcaggtggcctctgctggtctctggctctacgtttaggcacccctttccccagcctctcctccttgggcagggtctctgctccagcaagcaaacagggtggcccaggtggctattttgagaactccagctggtgcccccagacagctgctcagagccaagggggcagagggctttcagcgcccccaggcctgccctgctatttcaggccctcagctgtcgggggccactgtgtttctgtgctccaagttgagactcggccgcagcggcgtcagacttttctttgcgatgtcctcggtttcccatttgttgctgctgctgctcattccacactgttgagaccttgtggtctcgatgctgctggcctccctccgtccctctgtccacttgtgggtcctggggtcgtcttagcagagccaccgccaaggtttgcactcagggaggggctgatggagggctgggcgccatggggtcagggaggccccagggacccatgggcagagctggggagccaggaggatgggtctgcctgctctgggggtgcaggctctgcagacaccccaattgctgctctgttgctgtgcctagtctagtgtcccccaaagcatcggggggccacgcaagtgtgggtgtgtgagtgtgcgtatgtggggaccccccaggcatggtggggtctgaggcgtgtgttcccatttagggctgaatgaagccatgacttggaaaggtggtg

SEQ ID NO: 382779 - DNA, 1529 bp, Homo sapiens
ggcggcggggcggggcgtggccggcgtggcggcgctggagccgggaagggggcgcgggggagagatggtcgcaagatggcggcgctgaaggaggataggagctacgggctgtcgtgcgggcgggttagcgacggcagcaaggtgtcggtgttccacgtgaagctcaccgacagtgccctgagggccttcgagagctaccgcgccagacaggattctgtttcactgaggccatctatccgatttcaaggaagccaagggcacatctccatcccccagcctgactgccccgcagaggcgcggacgttctccttctacctctccaacatcggccgcgacaacccccagggcagcttcgactgcatccagcagtatgtctccagtcatggggaagttcacctggactgcctgggcagcatacaggacaagatcacggtgtgtgccaccgacgactcctaccagaaggcgcggcagagcatggcccaggcggaggaggagacgcggagccgaagtgccattgtcatcaaggctggaggccgctacctgggcaagaaggttcagtttcggaaaccagccccaggtgcaacagacgcggtgccctcccggaagcgggcaacccccatcaacttggcgagtgccatcaggaagagtggtgccagtgccgtgagtgggggcagcggggtgtcccagaggcccttccgtgaccgagtgctgcacctcctggcactacggccctaccgcaaggctgagctgctgctgcgactgcagaaggacggcctgacgcaggcggacaaggacgcgctggatggcctcctccagcaggtggccaacatgagtgctaaggacggcacgtgtacactgcaggactgcatgtacaaggatgtgcagaaggactggcctggctactcggagggggaccagcagctgctgaagcgggtgctcgtccggaagctgtgccagccacagagcactggcagcctccttggagaccctgctgcctccagccccccaggcgagcgtgggcgctcggcctcgcccccacagaagcggctgcagcctcctgatttcatcgaccccctagccaacaagaaaccccggatatcgcacttcactcagagagcgtcgacgctctctctgtgggggaaaagggaggtccctggtttttggacttcaagagtgagtttggttaactgagccttaaggatcccctttaccctttcgacttttccggatgtctggggcccgcctgggatatggagacgccactggatgcccagggactgagaaacctgttgagtgatttgggagatgaagctaggggcccttgtctgattgtatggagcccgggagacccaatctagggatgatttctgttaccagaatttgggagacttctgcggccttttctgaagaggtaggaaatgcttctacccacctagagaaggtgtctataagagtaagaataaattttgtcctcttgacgggatgaatgtgggtgaagtctatgcacgtccccccaaccgagagagcgt

SEQ ID NO: 382780 - DNA, 583 bp, Homo sapiens
acactgcaggactgcatgtacaaggatgtgcagaaggactggcctggctactcggagggggaccagcagctgctgaagcgggtgctcgtccggtaatgccgcctcccatcccccagcatgtccccacccgcatgaaggcagccagagcttacccagaggatgctggggtggtcttgtgtggtcctgaaggccacagggcttgggagcaggatggaagggtccaagtaggcctctctggccatcctccctactgcccacgtggtgccccagggtgtcccgtggtgggggaaggccacgctcacagagtgggacggaggtgtgagtcactggccccgaccttggaatcttcagacaaaaggcctcagtctgctgagaccctcctcagctgtccccaacttcccttcatgcttccctccacaacctgggcatccccacagggcctgggaagttcactgactttttgaaaagagcctctcaagaacctgaagtagagagaaataaggccaaacgacactcccggcagggcaggcgtcattaagcagcgttaattaaatgcatcccctcaggctaattgggacccagg

SEQ ID NO: 382781 - DNA, 242 bp, Homo sapiens
gacgatggtgatggaccttaatctaacaaccatcactgcaatgcagtactattctttcaattttaccctctttgcaaacttcaaagcaggacaagagaccattgtatttccaaacaggtagatttctttcttttctttctttctttccttttttttttttttttttttttttttttttgttgagatagagtttcactgtctcaggctagagtgcagtggcacgatctcagctcactacagcc

SEQ ID NO: 382782 - DNA, 2629 bp, Homo sapiens
aagttaaaagtggatgcagaagcgagcacagacggggctaggggtttcagagaaagtaattgagagtgctggcaacagcagctgaaatatagagaagttgtaggattagctttttcgcccaaagcagcttcagcccacgttttattcccatcgagggagggagaatgggtgccgctgagtgggcgggggagtggtccctgaaaggaggtggagtgctacagcccctccccgttggctctcgctgtttgtccgttgttggtttatactaatttgacaacagccgcctgttgagtctcctccagatcgcagctgaaggatctgttgagcgcttcaggaaaggcggacaggcgacactaacaggtgaagatctcgggagaccatgactaagaaaagaattgctgtgattgggggaggagtgagcgggctctcttccatcaagtgctgcgtagaagaaggcttggaacctgtctgctttgaaaggactgatgacatcggagggctctggaggttccaggaaaatcctgaagaaggaagggccagtatttacaaatcagtgatcatcaatacttctaaagagatgatgtgcttcagtgactatccaatcccagatcattatcccaacttcatgcataatgcccaggtcctggagtatttcaggatgtatgccaaagaatttgaccttctaaagtatattcgatttaagaccactgtgtgcagtgtgaagaagcagcctgattttgccacttcaggccaatgggaagtggtcactgaatctgaagggaaaaaggagatgaatgtctttgatggagtcatggtttgcactggccatcacaccaatgctcatctacctctggaaagcttccctggaattgagaagttcaaagggcagtacttccacagtcgagactataagaacccagagggattcactggaaagagagtcattataattggcattgggaattctggaggggatctggctgtagagattagccaaacagccaagcaggttttcctcagcaccaggagaggggcttggatcctgaatcgtgtaggggactacggatatcctgctgatgtgttgttctcttctcgacttacacattttatatggaagatctgtggccaatcattagcaaacaaatatttggaaaaaaagataaaccaaaggtttgaccatgaaatgtttggcctgaagcctaaacacagagctctgagtcagcatccaaccttaaatgatgacctgccaaatcgtatcatttctggcttggtgaaagtgaaaggaaatgtgaaggaattcacggagacagctgccatatttgaggatggctccagggaggatgacattgatgctgttatctttgccacaggctatagctttgactttccatttctggaagattccgtcaaagtggtcaaaaacaagatatccctgtataaaaaggtcttccctcctaacctggaaaggccaactcttgcaatcataggcttgattcagcccttaggagccattatgcccatttcagagctccaaggacgctgggccactcaggtatttaaaggtctaaagacattgccctcacagagtgaaatgatggcagaaatatctaaagctcaagaggaaattgacaaaaggtatgtggagagccaacgccataccattcagggagactacatagataccatggaagagcttgctgatttggtgggggtcaggcccaatctgctgtctctggccttcactgaccccaagctggcattacacttattactgggaccctgcactccaatccactatcgtgtacagggccctggaaagtgggatggggctcgaaaagctatcctcaccacagatgatcgcatcaggaagcctctgatgacaagagtagttgaaaggagtagttctatgacttcaacaatgacaataggcaagtttatgctagctcttgccttctttgctataattatagcttacttctagttgtcctattgtcactgccctgtttttcattgggaagcttatctacagatgccttcagaatctgacgagattgactctcagtttcatattgcccagaaatctactttaatgtctctttcgaaagcattaattcactttcctttttcctacaatgaaacctgttttccatttgtattaactcatctcccttccactcatgatccgtcactcttccttgtggtaatccctagactgggagctcaggtactcttttagtcatctttgtatgtctttagcagagttcttgacatgtggtaggtgcttaataaatgtttgttgtttatcaaattttatggtagggagagtaagtcagcatcggtataaaatcgcttactccacgtaactcttcttctgatagggtttgattttctattagaagctcaattttagttttttttcatattataactaaatatgtttcctgagagataagagaaataatgttcctacaatagttgtatgtatctaagataagacatatagatgcttaagacattttgtttcacttgctattcactagtgtacttgaaacatggtcatttttagcccttttccttaggaaccatgtctttattttctcaataaagaaattactttcaaatcactagg

SEQ ID NO: 382783 - DNA, 838 bp, Homo sapiens
  misc_feature (811)..(811): n is a, c, g, or t
ctctattagtccatgaagacattatggtcatgggcccgtagaagcacatagtgtgtccttaacctaagtagggtaacccatatttattattttttataaagctaaaaatcataacactatcctgtttcacagcctctttctttatagttctttgtaaaatgggtatttatgggagccaaagggagattcatttatataaaatgagagccactgaggtgtttttctaccctaccaggaaaaggagccctatagctcagtcacttatttaaaggtagccaggagaagagaacctagggtaagaagacatcagaaggtctcaggacatataggggtcaggagaagaataggcatttagtgcatggagtgtcataaaagcacaggagaagcccaggctttactcaggtgttacagtgccttaggacctggaccaagagacctggtgacttgcacttttctagaagaggagggtacattagcctgccaacactatgttatttttttctgtcttgtggaaattttctcattctgactacagccccaaacagttcttatttgtggagtatgtcaaatatccctgcatgggtcctattatgtgatagtgtctgtgatatcagccctttgtgtaacactatgcaaggagagtcatgtcagggatgtcccctgtggttatcacttttcttttcagaccactgtgtgcagtgtgaagaagcgcgatttgcatttagcctgggagggttggattcgaggcaaggaaagatgttttgggttggtggcggccaacagtctactaagtccgtgaatatggggatcnggtatacgggtgtgatttgtgtgtggg

SEQ ID NO: 382784 - DNA, 2576 bp, Homo sapiens
aagttaaaagtggatgcagaagcgagcacagacggggctaggggtttcagagaaagtaattgagagtgctggcaacagcagctgaaatatagagaagttgtaggattagctttttcgcccaaagcagcttcagcccacgttttattcccatcgagggagggagaatgggtgccgctgagtgggcgggggagtggtccctgaaaggaggtggagtgctacagcccctccccgttggctctcgctgtttgtccgttgttggtttatactaatttgacaacagccgcctgttgagtctcctccagatcgcagctgaaggatctgttgagcgcttcaggaaaggcggacaggcgacactaacaggtgaagatctcgggagaccatgactaagaaaagaattgctgtgattgggggaggagtgagcgggctctcttccatcaagtgctgcgtagaagaaggcttggaacctgtctgctttgaaaggactgatgacatcggagggctctggaggttccaggaaaatcctgaagaaggaagggccagtatttacaaatcagtgatcatcaatacttctaaagagatgatgtgcttcagtgactatccaatcccagatcattatcccaacttcatgcataatgcccaggtcctggagtatttcaggatgtatgccaaagaatttgaccttctaaagtatattcgatttaagaccactgtgtgcagtgtgaagaagcagcctgattttgccacttcaggccaatgggaagtggtcactgaatctgaagggaaaaaggagatgaatgtctttgatggagtcatggtttgcactggccatcacaccaatgctcatctacctctggaaagcttccctggaattgagaagttcaaagggcagtacttccacagtcgagactataagaacccagagggattcactggaaagagagtcattataattggcattgggaattctggaggggatctggctgtagagattagccaaacagccaagcaggttttcctcagcaccaggagaggggcttggatcctgaatcgtgtaggggactacggatatcctgctgatgtgttgttctcttctcgacttacacattttatatggaagatctgtggccaatcattagcaaacaaatatttggaaaaaaagataaaccaaaggtttgaccatgaaatgtttggcctgaagcctaaacacagagctctgagtcagcatccaaccttaaatgatgacctgccaaatcgtatcatttctggcttggtgaaagtgaaaggaaatgtgaaggaattcacggagacagctgccatatttgaggatggctccagggaggatgacattgatgctgttatctttgccacaggctatagctttgactttccatttctggaagattccgtcaaagtggtcaaaaacaagatatccctgtataaaaaggtcttccctcctaacctggaaaggccaactcttgcaatcataggcttgattcagcccttaggagccattatgcccatttcagagctccaaggacgctgggccactcaggtatttaaaggtctaaagacattgccctcacagagtgaaatgatggcagaaatatctaaagctcaagaggaaattgacaaaaggtatgtggagagccaacgccataccattcagggagactacatagataccatggaagagcttgctgatttggtgggggtcaggcccaatctgctgtctctggccttcactgaccccaagctggcattacacttattactgggaccctgcactccaatccactatcgtgtacagggccctggaaagtgggatggggctcgtagttgaaaggagtagttctatgacttcaacaatgacaataggcaagtttatgctagctcttgccttctttgctataattatagcttacttctagttgtcctattgtcactgccctgtttttcattgggaagcttatctacagatgccttcagaatctgacgagattgactctcagtttcatattgcccagaaatctactttaatgtctctttcgaaagcattaattcactttcctttttcctacaatgaaacctgttttccatttgtattaactcatctcccttccactcatgatccgtcactcttccttgtggtaatccctagactgggagctcaggtactcttttagtcatctttgtatgtctttagcagagttcttgacatgtggtaggtgcttaataaatgtttgttgtttatcaaattttatggtagggagagtaagtcagcatcggtataaaatcgcttactccacgtaactcttcttctgatagggtttgattttctattagaagctcaattttagttttttttcatattataactaaatatgtttcctgagagataagagaaataatgttcctacaatagttgtatgtatctaagataagacatatagatgcttaagacattttgtttcacttgctattcactagtgtacttgaaacatggtcatttttagcccttttccttaggaaccatgtctttattttctcaataaagaaattactttcaaatcactagg

SEQ ID NO: 382785 - DNA, 2611 bp, Homo sapiens
ctctattagtccatgaagacattatggtcatgggcccgtagaagcacatagtgtgtccttaacctaagtagggtaacccatatttattattttttataaagctaaaaatcataacactatcctgtttcacagcctctttctttatagttctttgtaaaatgggtatttatgggagccaaagggagattcatttatataaaatgagagccactgaggtgtttttctaccctaccaggaaaaggagccctatagctcagtcacttatttaaaggtagccaggagaagagaacctagggtaagaagacatcagaaggtctcaggacatataggggtcaggagaagaataggcatttagtgcatggagtgtcataaaagcacaggagaagcccaggctttactcaggtgttacagtgccttaggacctggaccaagagacctggtgacttgcacttttctagaagaggagggtacattagcctgccaacactatgttatttttttctgtcttgtggaaattttctcattctgactacagccccaaacagttcttatttgtggagtatgtcaaatatccctgcatgggtcctattatgtgatagtgtctgtgatatcagccctttgtgtaacactatgcaaggagagtcatgtcagggatgtcccctgtggttatcacttttcttttcagaccactgtgtgcagtgtgaagaagcagcctgattttgccacttcaggccaatgggaagtggtcactgaatctgaagggaaaaaggagatgaatgtctttgatggagtcatggtttgcactggccatcacaccaatgctcatctacctctggaaagcttccctggaattgagaagttcaaagggcagtacttccacagtcgagactataagaacccagagggattcactggaaagagagtcattataattggcattgggaattctggaggggatctggctgtagagattagccaaacagccaagcaggttttcctcagcaccaggagaggggcttggatcctgaatcgtgtaggggactacggatatcctgctgatgtgttgttctcttctcgacttacacattttatatggaagatctgtggccaatcattagcaaacaaatatttggaaaaaaagataaaccaaaggtttgaccatgaaatgtttggcctgaagcctaaacacagagctctgagtcagcatccaaccttaaatgatgacctgccaaatcgtatcatttctggcttggtgaaagtgaaaggaaatgtgaaggaattcacggagacagctgccatatttgaggatggctccagggaggatgacattgatgctgttatctttgccacaggctatagctttgactttccatttctggaagattccgtcaaagtggtcaaaaacaagatatccctgtataaaaaggtcttccctcctaacctggaaaggccaactcttgcaatcataggcttgattcagcccttaggagccattatgcccatttcagagctccaaggacgctgggccactcaggtatttaaaggtctaaagacattgccctcacagagtgaaatgatggcagaaatatctaaagctcaagaggaaattgacaaaaggtatgtggagagccaacgccataccattcagggagactacatagataccatggaagagcttgctgatttggtgggggtcaggcccaatctgctgtctctggccttcactgaccccaagctggcattacacttattactgggaccctgcactccaatccactatcgtgtacagggccctggaaagtgggatggggctcgaaaagctatcctcaccacagatgatcgcatcaggaagcctctgatgacaagagtagttgaaaggagtagttctatgacttcaacaatgacaataggcaagtttatgctagctcttgccttctttgctataattatagcttacttctagttgtcctattgtcactgccctgtttttcattgggaagcttatctacagatgccttcagaatctgacgagattgactctcagtttcatattgcccagaaatctactttaatgtctctttcgaaagcattaattcactttcctttttcctacaatgaaacctgttttccatttgtattaactcatctcccttccactcatgatccgtcactcttccttgtggtaatccctagactgggagctcaggtactcttttagtcatctttgtatgtctttagcagagttcttgacatgtggtaggtgcttaataaatgtttgttgtttatcaaattttatggtagggagagtaagtcagcatcggtataaaatcgcttactccacgtaactcttcttctgatagggtttgattttctattagaagctcaattttagttttttttcatattataactaaatatgtttcctgagagataagagaaataatgttcctacaatagttgtatgtatctaagataagacatatagatgcttaagacattttgtttcacttgctattcactagtgtacttgaaacatggtcatttttagcccttttccttaggaaccatgtctttattttctcaataaagaaattactttcaaatcactagg

SEQ ID NO: 382786 - DNA, 2796 bp, Homo sapiens
aagttaaaagtggatgcagaagcgagcacagacggggctaggggtttcagagaaagtaattgagagtgctggcaacagcagctgaaatatagagaagttgtaggattagctttttcgcccaaagcagcttcagcccacgttttattcccatcgagggagggagaatgggtgccgctgagtgggcgggggagtggtccctgaaaggaggtggagtgctacagcccctccccgttggctctcgctgtttgtccgttgttggtttatactaatttgacaacagccgcctgttgagtctcctccagatcgcagctgaaggatctgttgagcgcttcaggaaaggcggtgagatccggtaccgcagcagagcactctcagctctgggtcttgcaggcgcagggctcccccatgccagcagaaagatttcctctggtgaagaggaccgtcgaatctgtcctcctcaagacacctcttgtacagaatttattcgaatgccacggccaaggtcttccttgaaaaatgttaaccgatgtgtgctttttgtcttttgtcatcctttctttaggacaggcgacactaacaggtgaagatctcgggagaccatgactaagaaaagaattgctgtgattgggggaggagtgagcgggctctcttccatcaagtgctgcgtagaagaaggcttggaacctgtctgctttgaaaggactgatgacatcggagggctctggaggttccagttctaaagagatgatgtgcttcagtgactatccaatcccagatcattatcccaacttcatgcataatgcccaggtcctggagtatttcaggatgtatgccaaagaatttgaccttctaaagtatattcgatttaagaccactgtgtgcagtgtgaagaagcagcctgattttgccacttcaggccaatgggaagtggtcactgaatctgaagggaaaaaggagatgaatgtctttgatggagtcatggtttgcactggccatcacaccaatgctcatctacctctggaaagcttccctggaattgagaagttcaaagggcagtacttccacagtcgagactataagaacccagagggattcactggaaagagagtcattataattggcattgggaattctggaggggatctggctgtagagattagccaaacagccaagcaggttttcctcagcaccaggagaggggcttggatcctgaatcgtgtaggggactacggatatcctgctgatgtgttgttctcttctcgacttacacattttatatggaagatctgtggccaatcattagcaaacaaatatttggaaaaaaagataaaccaaaggtttgaccatgaaatgtttggcctgaagcctaaacacagagctctgagtcagcatccaaccttaaatgatgacctgccaaatcgtatcatttctggcttggtgaaagtgaaaggaaatgtgaaggaattcacggagacagctgccatatttgaggatggctccagggaggatgacattgatgctgttatctttgccacaggctatagctttgactttccatttctggaagattccgtcaaagtggtcaaaaacaagatatccctgtataaaaaggtcttccctcctaacctggaaaggccaactcttgcaatcataggcttgattcagcccttaggagccattatgcccatttcagagctccaaggacgctgggccactcaggtatttaaaggtctaaagacattgccctcacagagtgaaatgatggcagaaatatctaaagctcaagaggaaattgacaaaaggtatgtggagagccaacgccataccattcagggagactacatagataccatggaagagcttgctgatttggtgggggtcaggcccaatctgctgtctctggccttcactgaccccaagctggcattacacttattactgggaccctgcactccaatccactatcgtgtacagggccctggaaagtgggatggggctcgaaaagctatcctcaccacagatgatcgcatcaggaagcctctgatgacaagagtagttgaaaggagtagttctatgacttcaacaatgacaataggcaagtttatgctagctcttgccttctttgctataattatagcttacttctagttgtcctattgtcactgccctgtttttcattgggaagcttatctacagatgccttcagaatctgacgagattgactctcagtttcatattgcccagaaatctactttaatgtctctttcgaaagcattaattcactttcctttttcctacaatgaaacctgttttccatttgtattaactcatctcccttccactcatgatccgtcactcttccttgtggtaatccctagactgggagctcaggtactcttttagtcatctttgtatgtctttagcagagttcttgacatgtggtaggtgcttaataaatgtttgttgtttatcaaattttatggtagggagagtaagtcagcatcggtataaaatcgcttactccacgtaactcttcttctgatagggtttgattttctattagaagctcaattttagttttttttcatattataactaaatatgtttcctgagagataagagaaataatgttcctacaatagttgtatgtatctaagataagacatatagatgcttaagacattttgtttcacttgctattcactagtgtacttgaaacatggtcatttttagcccttttccttaggaaccatgtctttattttctcaataaagaaattactttcaaatcactagg

SEQ ID NO: 382787 - DNA, 2509 bp, Homo sapiens
ccggccccgcgcgccgcgcaggcgggggccgtggccaccaagcccgggcgcagtttctctccgcccacggcaggagcgaaggaaggccctggcgcgggcgggtaaactgcccaccgggcggcccacccgctgcgcccccggcccgcaagaggcagtcccaataggttggcccgcctggccgaagtccgcccggagcccgctcacctgtcagcccccactgccgacaggcgacactaacaggtgaagatctcgggagaccatgactaagaaaagaattgctgtgattgggggaggagtgagcgggctctcttccatcaagtgctgcgtagaagaaggcttggaacctgtctgctttgaaaggactgatgacatcggagggctctggaggttccaggaaaatcctgaagaaggaagggccagtatttacaaatcagtgatcatcaatacttctaaagagatgatgtgcttcagtgactatccaatcccagatcattatcccaacttcatgcataatgcccaggtcctggagtatttcaggatgtatgccaaagaatttgaccttctaaagtatattcgatttaagaccactgtgtgcagtgtgaagaagcagcctgattttgccacttcaggccaatgggaagtggtcactgaatctgaagggaaaaaggagatgaatgtctttgatggagtcatggtttgcactggccatcacaccaatgctcatctacctctggaaagcttccctggaattgagaagttcaaagggcagtacttccacagtcgagactataagaacccagagggattcactggaaagagagtcattataattggcattgggaattctggaggggatctggctgtagagattagccaaacagccaagcaggttttcctcagcaccaggagaggggcttggatcctgaatcgtgtaggggactacggatatcctgctgatgtgttgttctcttctcgacttacacattttatatggaagatctgtggccaatcattagcaaacaaatatttggaaaaaaagataaaccaaaggtttgaccatgaaatgtttggcctgaagcctaaacacagagctctgagtcagcatccaaccttaaatgatgacctgccaaatcgtatcatttctggcttggtgaaagtgaaaggaaatgtgaaggaattcacggagacagctgccatatttgaggatggctccagggaggatgacattgatgctgttatctttgccacaggctatagctttgactttccatttctggaagattccgtcaaagtggtcaaaaacaagatatccctgtataaaaaggtcttccctcctaacctggaaaggccaactcttgcaatcataggcttgattcagcccttaggagccattatgcccatttcagagctccaaggacgctgggccactcaggtatttaaaggtctaaagacattgccctcacagagtgaaatgatggcagaaatatctaaagctcaagaggaaattgacaaaaggtatgtggagagccaacgccataccattcagggagactacatagataccatggaagagcttgctgatttggtgggggtcaggcccaatctgctgtctctggccttcactgaccccaagctggcattacacttattactgggaccctgcactccaatccactatcgtgtacagggccctggaaagtgggatggggctcgaaaagctatcctcaccacagatgatcgcatcaggaagcctctgatgacaagagtagttgaaaggagtagttctatgacttcaacaatgacaataggcaagtttatgctagctcttgccttctttgctataattatagcttacttctagttgtcctattgtcactgccctgtttttcattgggaagcttatctacagatgccttcagaatctgacgagattgactctcagtttcatattgcccagaaatctactttaatgtctctttcgaaagcattaattcactttcctttttcctacaatgaaacctgttttccatttgtattaactcatctcccttccactcatgatccgtcactcttccttgtggtaatccctagactgggagctcaggtactcttttagtcatctttgtatgtctttagcagagttcttgacatgtggtaggtgcttaataaatgtttgttgtttatcaaattttatggtagggagagtaagtcagcatcggtataaaatcgcttactccacgtaactcttcttctgatagggtttgattttctattagaagctcaattttagttttttttcatattataactaaatatgtttcctgagagataagagaaataatgttcctacaatagttgtatgtatctaagataagacatatagatgcttaagacattttgtttcacttgctattcactagtgtacttgaaacatggtcatttttagcccttttccttaggaaccatgtctttattttctcaataaagaaattactttcaaatcactagg

SEQ ID NO: 382788 - DNA, 1799 bp, Homo sapiens
gaaatgagactgaacagaatgttgacagcttagttctgtcagacttcttggtatgagaatacaaactattgacctgtggccttatcatatcacacacagaatattattgttacttgagaaatcatatatgcactcctcaaacaacactcttccttcactcctccaacactctccctttcagtgcatccagggtccaacttcagatctgatcttgatctgtgccaacctagtataaattagaccttttccaaacttcatgcatagaccaaggggaagattattggcattctgtttacctccaccaaagcaaaattttacttatgtggtactgatttctctttctctcatttctccacttgatctttgtcacgactcacagagctctgagtcagcatccaaccttaaatgatgacctgccaaatcgtatcatttctggcttggtgaaagtgaaaggaaatgtgaaggaattcacggagacagctgccatatttgaggatggctccagggaggatgacattgatgctgttatctttgccacaggctatagctttgactttccatttctggaagattccgtcaaagtggtcaaaaacaagatatccctgtataaaaaggtcttccctcctaacctggaaaggccaactcttgcaatcataggcttgattcagcccttaggagccattatgcccatttcagagctccaaggacgctgggccactcaggtatttaaaggtctaaagacattgccctcacagagtgaaatgatggcagaaatatctaaagctcaagaggaaattgacaaaaggtatgtggagagccaacgccataccattcagggagactacatagataccatggaagagcttgctgatttggtgggggtcaggcccaatctgctgtctctggccttcactgaccccaagctggcattacacttattactgggaccctgcactccaatccactatcgtgtacagggccctggaaagtgggatggggctcgaaaagctatcctcaccacagatgatcgcatcaggaagcctctgatgacaagagtagttgaaaggagtagttctatgacttcaacaatgacaataggcaagtttatgctagctcttgccttctttgctataattatagcttacttctagttgtcctattgtcactgccctgtttttcattgggaagcttatctacagatgccttcagaatctgacgagattgactctcagtttcatattgcccagaaatctactttaatgtctctttcgaaagcattaattcactttcctttttcctacaatgaaacctgttttccatttgtattaactcatctcccttccactcatgatccgtcactcttccttgtggtaatccctagactgggagctcaggtactcttttagtcatctttgtatgtctttagcagagttcttgacatgtggtaggtgcttaataaatgtttgttgtttatcaaattttatggtagggagagtaagtcagcatcggtataaaatcgcttactccacgtaactcttcttctgatagggtttgattttctattagaagctcaattttagttttttttcatattataactaaatatgtttcctgagagataagagaaataatgttcctacaatagttgtatgtatctaagataagacatatagatgcttaagacattttgtttcacttgctattcactagtgtacttgaaacatggtcatttttagcccttttccttaggaaccatgtctttattttctcaataaagaaattactttcaaatcactagg

SEQ ID NO: 382789 - DNA, 398 bp, Homo sapiens
ctcccaggttgacgccattctcctgcctcagcctcccgagtagctgggactacaggcacctgcaaccacgcctggctaattttttgtatttttagtagagacggggtttttcagtagagacggggtttcactgtgttagccaggatggtctcgatctcctgacctcgtgatccgcccgccttggcctcccaaagtgctgggattacaggcgtgagccaccgcgccgggcctgaaatgattcttgaagaaaatgggggtgcttttgaaggtttacgaatctgagtgacaaaagcaaacaatttcttccatgccccaggttttcctcagcaccaggagaggggcttggatcctgaatcgtgtaggggactacggatatcctgctgatgtgttgttctctt

SEQ ID NO: 382790 - DNA, 644 bp, Homo sapiens
attgagccaatagcaggcactcagaaggcagtaattgattgactgactgattgaattattgacaggccatggtttctgtcttttctactttaggtatgtggagagccaacgccataccattcagggagactacatagataccatggaagagcttgctgatttggtgggggtcaggcccaatctgctgtctctggccttcactgaccccaagctggcattacacttattactgggaccctgcactccaatccactatcgtgtacagggccctggaaagtgggatggggctcgaaaagctatcctcaccacagatgatcgcatcaggaagcctctgatgacaagagtagttgaaaggagtagttctatgacttcaacaatgacaataggcaagtttatgctagctcttgccttctttgctataattatagcttacttctagttgtcctattgtcactgccctgtttttcattgggaagcttatctacagatgccttcagaatctgacgagattgactctcagtttcatattgcccagaaatctactttaatgtctctttcgaaagcattaattcactttcctttttcctacaatgaaacctgttttccatttgtattaactcatctcccttccactcatgatccgt

SEQ ID NO: 382791 - DNA, 1818 bp, Homo sapiens
  misc_feature (1581)..(1581): n is a, c, g, or t
aagttaaaagtggatgcagaagcgagcacagacggggctaggggtttcagagaaagtaattgagagtgctggcaacagcagctgaaatatagagaagttgtaggattagctttttcgcccaaagcagcttcagcccacgttttattcccatcgagggagggagaatgggtgccgctgagtgggcgggggagtggtccctgaaaggaggtggagtgctacagcccctccccgttggctctcgctgtttgtccgttgttggtttatactaatttgacaacagccgcctgttgagtctcctccagatcgcagctgaaggatctgttgagcgcttcaggaaaggcggtgagatccggtaccgcagcagagcactctcagctctgggtcttgcaggcgcagggctcccccatgccagcagaaagatttcctctggtgaagaggaccgtcgaatctgtcctcctcaagacacctcttgtacagaatttattcgaatgccacggccaaggtcttccttgaaaaatgttaaccgatgtgtgctttttgtcttttgtcatcctttctttaggacaggcgacactaacaggtgaagatctcgggagaccatgactaagaaaagaattgctgtgattgggggaggagtgagcgggctctcttccatcaagtgctgcgtagaagaaggcttggaacctgtctgctttgaaaggactgatgacatcggagggctctggaggttccaggaaaatcctgaagaaggaagggccagtatttacaaatcagtgatcatcaatacttctaaagagatgatgtgcttcagtgactatccaatcccagatcattatcccaacttcatgcataatgcccaggtcctggagtatttcaggatgtatgccaaagaatttgaccttctaaagtatattcgatttaagaccactgtgtgcagtgtgaagaagcagcctgattttgccacttcaggccaatgggaagtggtcactgaatctgaagggaaaaaggagatgaatgtctttgatggagtcatggtttgcactggccatcacaccaatgctcatctacctctggaaagcttccctggaattgagaagttcaaagggcagtacttccacagtcgagactataagaacccagagggattcactggaaagagagtcattataattggcattgggaattctggaggggatctggctgtagagattagccaaacagccaagcaggttttcctcagcaccaggagaggggcttggatcctgaatcgtgtaggggactacggatatcctgctgatgtgttgttctcttctcgacttacacattttatatggaagatctgtggccaatcattagcaaacaaatatttggaaaaaaagataaaccaaaggtttgaccatgaaatgtttggcctgaagcctaaacacaggtatgttcccaggatgggagtgcagggatagtggccaaagcacaagaataaggactcttcacactggctaatagtaaagccacctctacccatacattaagaaaacccacagtggctgggcatggtggctcacgcctgtaatcccagcactntgggaggcggaggcgggtggatcacctgagctcaggagtttgagaccatcctggccaacacggtgaaaccccatctctactaaaaacacaaaattagccaggtgtggtggcacctgtctgtagtcccagctattcaggaggctgaggcaggagaatcacctgagccctggaggcagaggttgcagtgagctgagattgcaccactgcactccagcctgggcaacagactctgtctca

SEQ ID NO: 382792 - DNA, 2849 bp, Homo sapiens
aagttaaaagtggatgcagaagcgagcacagacggggctaggggtttcagagaaagtaattgagagtgctggcaacagcagctgaaatatagagaagttgtaggattagctttttcgcccaaagcagcttcagcccacgttttattcccatcgagggagggagaatgggtgccgctgagtgggcgggggagtggtccctgaaaggaggtggagtgctacagcccctccccgttggctctcgctgtttgtccgttgttggtttatactaatttgacaacagccgcctgttgagtctcctccagatcgcagctgaaggatctgttgagcgcttcaggaaaggcggtgagatccggtaccgcagcagagcactctcagctctgggtcttgcaggcgcagggctcccccatgccagcagaaagatttcctctggtgaagaggaccgtcgaatctgtcctcctcaagacacctcttgtacagaatttattcgaatgccacggccaaggtcttccttgaaaaatgttaaccgatgtgtgctttttgtcttttgtcatcctttctttaggacaggcgacactaacaggtgaagatctcgggagaccatgactaagaaaagaattgctgtgattgggggaggagtgagcgggctctcttccatcaagtgctgcgtagaagaaggcttggaacctgtctgctttgaaaggactgatgacatcggagggctctggaggttccaggaaaatcctgaagaaggaagggccagtatttacaaatcagtgatcatcaatacttctaaagagatgatgtgcttcagtgactatccaatcccagatcattatcccaacttcatgcataatgcccaggtcctggagtatttcaggatgtatgccaaagaatttgaccttctaaagtatattcgatttaagaccactgtgtgcagtgtgaagaagcagcctgattttgccacttcaggccaatgggaagtggtcactgaatctgaagggaaaaaggagatgaatgtctttgatggagtcatggtttgcactggccatcacaccaatgctcatctacctctggaaagcttccctggaattgagaagttcaaagggcagtacttccacagtcgagactataagaacccagagggattcactggaaagagagtcattataattggcattgggaattctggaggggatctggctgtagagattagccaaacagccaagcaggttttcctcagcaccaggagaggggcttggatcctgaatcgtgtaggggactacggatatcctgctgatgtgttgttctcttctcgacttacacattttatatggaagatctgtggccaatcattagcaaacaaatatttggaaaaaaagataaaccaaaggtttgaccatgaaatgtttggcctgaagcctaaacacagagctctgagtcagcatccaaccttaaatgatgacctgccaaatcgtatcatttctggcttggtgaaagtgaaaggaaatgtgaaggaattcacggagacagctgccatatttgaggatggctccagggaggatgacattgatgctgttatctttgccacaggctatagctttgactttccatttctggaagattccgtcaaagtggtcaaaaacaagatatccctgtataaaaaggtcttccctcctaacctggaaaggccaactcttgcaatcataggcttgattcagcccttaggagccattatgcccatttcagagctccaaggacgctgggccactcaggtatttaaaggtctaaagacattgccctcacagagtgaaatgatggcagaaatatctaaagctcaagaggaaattgacaaaaggtatgtggagagccaacgccataccattcagggagactacatagataccatggaagagcttgctgatttggtgggggtcaggcccaatctgctgtctctggccttcactgaccccaagctggcattacacttattactgggaccctgcactccaatccactatcgtgtacagggccctggaaagtgggatggggctcgaaaagctatcctcaccacagatgatcgcatcaggaagcctctgatgacaagagtagttgaaaggagtagttctatgacttcaacaatgacaataggcaagtttatgctagctcttgccttctttgctataattatagcttacttctagttgtcctattgtcactgccctgtttttcattgggaagcttatctacagatgccttcagaatctgacgagattgactctcagtttcatattgcccagaaatctactttaatgtctctttcgaaagcattaattcactttcctttttcctacaatgaaacctgttttccatttgtattaactcatctcccttccactcatgatccgtcactcttccttgtggtaatccctagactgggagctcaggtactcttttagtcatctttgtatgtctttagcagagttcttgacatgtggtaggtgcttaataaatgtttgttgtttatcaaattttatggtagggagagtaagtcagcatcggtataaaatcgcttactccacgtaactcttcttctgatagggtttgattttctattagaagctcaattttagttttttttcatattataactaaatatgtttcctgagagataagagaaataatgttcctacaatagttgtatgtatctaagataagacatatagatgcttaagacattttgtttcacttgctattcactagtgtacttgaaacatggtcatttttagcccttttccttaggaaccatgtctttattttctcaataaagaaattactttcaaatcactagg

SEQ ID NO: 382793 - DNA, 2795 bp, Homo sapiens
aagttaaaagtggatgcagaagcgagcacagacggggctaggggtttcagagaaagtaattgagagtgctggcaacagcagctgaaatatagagaagttgtaggattagctttttcgcccaaagcagcttcagcccacgttttattcccatcgagggagggagaatgggtgccgctgagtgggcgggggagtggtccctgaaaggaggtggagtgctacagcccctccccgttggctctcgctgtttgtccgttgttggtttatactaatttgacaacagccgcctgttgagtctcctccagatcgcagctgaaggatctgttgagcgcttcaggaaaggcggtgagatccggtaccgcagcagagcactctcagctctgggtcttgcaggcgcagggctcccccatgccagcagaaagatttcctctggtgaagaggaccgtcgaatctgtcctcctcaagacacctcttgtacagaatttattcgaatgccacggccaaggtcttccttgaaaaatgttaaccgatgtgtgctttttgtcttttgtcatcctttctttaggacaggcgacactaacaggtgaagatctcgggagaccatgactaagtgcgtagaagaaggcttggaacctgtctgctttgaaaggactgatgacatcggagggctctggaggttccaggaaaatcctgaagaaggaagggccagtatttacaaatcagtgatcatcaatacttctaaagagatgatgtgcttcagtgactatccaatcccagatcattatcccaacttcatgcataatgcccaggtcctggagtatttcaggatgtatgccaaagaatttgaccttctaaagtatattcgatttaagaccactgtgtgcagtgtgaagaagcagcctgattttgccacttcaggccaatgggaagtggtcactgaatctgaagggaaaaaggagatgaatgtctttgatggagtcatggtttgcactggccatcacaccaatgctcatctacctctggaaagcttccctggaattgagaagttcaaagggcagtacttccacagtcgagactataagaacccagagggattcactggaaagagagtcattataattggcattgggaattctggaggggatctggctgtagagattagccaaacagccaagcaggttttcctcagcaccaggagaggggcttggatcctgaatcgtgtaggggactacggatatcctgctgatgtgttgttctcttctcgacttacacattttatatggaagatctgtggccaatcattagcaaacaaatatttggaaaaaaagataaaccaaaggtttgaccatgaaatgtttggcctgaagcctaaacacagagctctgagtcagcatccaaccttaaatgatgacctgccaaatcgtatcatttctggcttggtgaaagtgaaaggaaatgtgaaggaattcacggagacagctgccatatttgaggatggctccagggaggatgacattgatgctgttatctttgccacaggctatagctttgactttccatttctggaagattccgtcaaagtggtcaaaaacaagatatccctgtataaaaaggtcttccctcctaacctggaaaggccaactcttgcaatcataggcttgattcagcccttaggagccattatgcccatttcagagctccaaggacgctgggccactcaggtatttaaaggtctaaagacattgccctcacagagtgaaatgatggcagaaatatctaaagctcaagaggaaattgacaaaaggtatgtggagagccaacgccataccattcagggagactacatagataccatggaagagcttgctgatttggtgggggtcaggcccaatctgctgtctctggccttcactgaccccaagctggcattacacttattactgggaccctgcactccaatccactatcgtgtacagggccctggaaagtgggatggggctcgaaaagctatcctcaccacagatgatcgcatcaggaagcctctgatgacaagagtagttgaaaggagtagttctatgacttcaacaatgacaataggcaagtttatgctagctcttgccttctttgctataattatagcttacttctagttgtcctattgtcactgccctgtttttcattgggaagcttatctacagatgccttcagaatctgacgagattgactctcagtttcatattgcccagaaatctactttaatgtctctttcgaaagcattaattcactttcctttttcctacaatgaaacctgttttccatttgtattaactcatctcccttccactcatgatccgtcactcttccttgtggtaatccctagactgggagctcaggtactcttttagtcatctttgtatgtctttagcagagttcttgacatgtggtaggtgcttaataaatgtttgttgtttatcaaattttatggtagggagagtaagtcagcatcggtataaaatcgcttactccacgtaactcttcttctgatagggtttgattttctattagaagctcaattttagttttttttcatattataactaaatatgtttcctgagagataagagaaataatgttcctacaatagttgtatgtatctaagataagacatatagatgcttaagacattttgtttcacttgctattcactagtgtacttgaaacatggtcatttttagcccttttccttaggaaccatgtctttattttctcaataaagaaattactttcaaatcactagg

SEQ ID NO: 382794 - DNA, 2291 bp, Homo sapiens
gctgtaggaatacggcacgaggatctgttgagcgctctaggagaggcggtgagatccgacaggcgacactaacaggtgaagatctcgggagaccatgactaagaaaagaattgctgtgattgggggaggagtgagcgggctctcttccatcaagtgctgcgtagaagaaggcttggaacctgtctgctttgaaaggactgatgacatcggagggctctggaggttccagttctaaagagatgatgtgcttcagtgactatccaatcccagatcattatcccaacttcatgcataatgcccaggtcctggagtatttcaggatgtatgccaaagaatttgaccttctaaagtatattcgatttaagaccactgtgtgcagtgtgaagaagcagcctgattttgccacttcaggccaatgggaagtggtcactgaatctgaagggaaaaaggagatgaatgtctttgatggagtcatggtttgcactggccatcacaccaatgctcatctacctctggaaagcttccctggaattgagaagttcaaagggcagtacttccacagtcgagactataagaacccagagggattcactggaaagagagtcattataattggcattgggaattctggaggggatctggctgtagagattagccaaacagccaagcaggttttcctcagcaccaggagaggggcttggatcctgaatcgtgtaggggactacggatatcctgctgatgtgttgttctcttctcgacttacacattttatatggaagatctgtggccaatcattagcaaacaaatatttggaaaaaaagataaaccaaaggtttgaccatgaaatgtttggcctgaagcctaaacacagagctctgagtcagcatccaaccttaaatgatgacctgccaaatcgtatcatttctggcttggtgaaagtgaaaggaaatgtgaaggaattcacggagacagctgccatatttgaggatggctccagggaggatgacattgatgctgttatctttgccacaggctatagctttgactttccatttctggaagattccgtcaaagtggtcaaaaacaagatatccctgtataaaaaggtcttccctcctaacctggaaaggccaactcttgcaatcataggcttgattcagcccttaggagccattatgcccatttcagagctccaaggacgctgggccactcaggtatttaaaggtctaaagacattgccctcacagagtgaaatgatggcagaaatatctaaagctcaagaggaaattgacaaaaggtatgtggagagccaacgccataccattcagggagactacatagataccatggaagagcttgctgatttggtgggggtcaggcccaatctgctgtctctggccttcactgaccccaagctggcattacacttattactgggaccctgcactccaatccactatcgtgtacagggccctggaaagtgggatggggctcgaaaagctatcctcaccacagatgatcgcatcaggaagcctctgatgacaagagtagttgaaaggagtagttctatgacttcaacaatgacaataggcaagtttatgctagctcttgccttctttgctataattatagcttacttctagttgtcctattgtcactgccctgtttttcattgggaagcttatctacagatgccttcagaatctgacgagattgactctcagtttcatattgcccagaaatctactttaatgtctctttcgaaagcattaattcactttcctttttcctacaatgaaacctgttttccatttgtattaactcatctcccttccactcatgatccgtcactcttccttgtggtaatccctagactgggagctcaggtactcttttagtcatctttgtatgtctttagcagagttcttgacatgtggtaggtgcttaataaatgtttgttgtttatcaaattttatggtagggagagtaagtcagcatcggtataaaatcgcttactccacgtaactcttcttctgatagggtttgattttctattagaagctcaattttagttttttttcatattataactaaatatgtttcctgagagataagagaaataatgttcctacaatagttgtatgtatctaagataagacatatagatgcttaagacattttgtttcacttgctattcactagtgtacttgaaacatggtcatttttagcccttttccttaggaaccatgtctttattttctcaataaagaaattactttcaaatcactagg

SEQ ID NO: 382795 - DNA, 1126 bp, Homo sapiens
aagttaaaagtggatgcagaagcgagcacagacggggctaggggtttcagagaaagtaattgagagtgctggcaacagcagctgaaatatagagaagttgtaggattagctttttcgcccaaagcagcttcagcccacgttttattcccatcgagggagggagaatgggtgccgctgagtgggcgggggagtggtccctgaaaggaggtggagtgctacagcccctccccgttggctctcgctgtttgtccgttgttggtttatactaatttgacaacagccgcctgttgagtctcctccagatcgcagctgaaggatctgttgagcgcttcaggaaaggcggtgagatccggtaccgcagcagagcactctcagctctgggtcttgcaggcgcagggctcccccatgccagcagaaagatttcctctggtgaagaggaccgtcgaatctgtcctcctcaagacacctcttgtacagaatttattcgaatgccacggccaaggtcttccttgaaaaatgttaaccgatgtgtgctttttgtcttttgtcatcctttctttaggacaggcgacactaacaggtgaagatctcgggagaccatgactaagaaaagaattgctgtgattgggggaggagtgagcgggctctcttccatcaagtgctgcgtagaagaaggcttggaacctgtctgctttgaaaggactgatgacatcggagggctctggaggttccaggaaaatcctgaagaaggaagggccagtatttacaaatcagtgatcatcaatacttctaaagagatgatgtgcttcagtgactatccaatcccagatcattatcccaacttcatgcataatgcccaggtcctggagtatttcaggatgtatgccaaagaatttgaccttctaaagtatattcgatttaagaccactgtgtgcagtgtgaagaagcagcctgattttgccacttcaggccaatgggaagtggtcactgaatctgaagggaaaaaggagatgaatgtctttgatggagtcatggtttgcactggccatcacaccaatgctcatctacctctggaaagcttccctggtgagcagcttaccaggaaggaagacccttgacccatgcc

SEQ ID NO: 382796 - DNA, 375 bp, Homo sapiens
gcctttgtaacgtgctctccttcctcttacctgtacttcggtgatggaaataaaaggaacatataaacaaataggaatttgagtaactgagaatccttactaccaaaaatggcttgtttcactttaaaaaaatgttgccctacccaaaatagaaaatgttggtcctaaagagtgcaaattggtgtttccctcaccagctctgatgtggtcagggagcaagtgcaaataagcttgcggggagcaagcaggtgccatgctctccatgatggtttgttccttccgagcaagtcctggtttcttagcataaacaacccacggtgcccagattgaacaaagatgatatgcaaacctcgaaagaaattggcatggaaaaaa

SEQ ID NO: 382797 - DNA, 645 bp, Homo sapiens
aaatttatttgcatgtagtttggtcactgtctagggagatgatgacagagtacgtgactaaattcttacaaataactagacaacttcttattactaataaatacaatttttgaaggtggtaaaacttcaaatataattaagtaatgactaatttatagctaatgttctatataaattgacattagggcgagtgcagtgggttatgcctgtaatcccagcaccttgggagcctgcggcaggcaaatcacttgagctctgaagtccaaaaccagcctgggcaatgtaaagaaaccctgtctctataaaaaaattagctgggtgtggtggcatgcgcctatagtcctagctactcagaaggctgagggaggaggatcacctgagcctcacaggctgaggctgcagtgtgccaagatcattgcgcttcagccttggcagcggggtaagaccctgtctcaaaaacaaagtagaataaataaacaaattgacattagcgatttgttcaataaaattattaatttggaacaactttctattgctgtttgacatatatatataatctttgtaaaagttaaagcattttaaaattaattatttaaattactaatgtgttatttacacatttttggaaaaaatcctaaaatcttg

SEQ ID NO: 382798 - DNA, 3116 bp, Homo sapiens
cggatcgcagctctcgcggcagtcgcctgagacttaaggttattgcttggccgcggcctggtattccggcgattcgtttcttgctcggcttcctggagctgtggtccgtgtgggcttccacctcagacagttgcgctggctcagcggggccggaacatggctgcgtccggtctggatcatctcaaaaatggctacagaagaagattttgtcgaccttccagggcacgtgacattaacacagagcaaggccagaatgttctggaaatcttacaagactgttttgaagaaaaaagtcttgccaatgattttagtacaaattctacaaaatcagtgcctaattcaacacgcaaaataaaagacacttgtattcagtcaccaagcaaagagtgccagaaatcacatccaaagtcagttccagtttcttcaaagaagaaagaagcctctctacagtttgttgtagaaccaagtgaagccacaaacagatcagttcaggcccatgaagttcatcagaaaattctggcaactgatgttagttccaaaaatacacctgactcgaaaaaaatatcaagtagaaacataaatgatcatcacagtgaagctgatgaagaattttacttatccgttggctcaccttctgttcttttggatgcaaaaacatctgtatcacaaaatgttattccatctagtgcccaaaagagagagacttacacttttgaaaattcagtaaatatgctgccttcaagtacagaggtttcagttaaaaccaaaaaaaggttaaactttgatgataaagttatgttaaagaaaatagaaatagataataaagtatcagatgaagaggataaaacatcggaaggacaagaaagaaaaccatcaggatcatctcagaatagaatacgagattcagaatatgaaattcaacgacaagctaaaaaaagtttttcaacattgtttttagaaacagtaaaacgaaaaagtgaatccagtcccattgttaggcatgcggcaactgctccacctcattcgtgtcctcccgatgatacgaagttgatagaggatgaatttataattgatgagtcggatcaaagttttgccagtagatcttggattacaataccaagaaaggcagggtctctgaaacaacgcacaatatccccggctgagagcactgcactctttcaaggtagaaagtcaagagaaaagcatcataatatattacctaagactttggcaaatgacaaacattcccataaacctcacccagtagagacatctcagccctctgataaaacagtactggatacaagttatgctttgataggtgaaacagtaaataattatagatctacaaaatatgaaatgtattccaagaatgcagaaaaaccatctagaagcaaaaggactataaaacaaaaacagagaagaaaattcatggctaaaccagctgaagaacagcttgatgtgggacagtctaaagatgaaaacatacatacatcacatattacccaagacgaatttcaaagaaattcagacagaaatatggaagagcatgaagagatgggaaatgattgtgtttccaaaaaacagatgccacctgtgggaagcaagaaaagtagcactagaaaagataaggaagaatctaaaaagaagcgcttttccagtgagtccaagaacaaacttgtacctgaagaagtgacttcaactgtcacgaaaagtcgaagaatttccaggcgtccatctgattggtgggtggtaaaatcagaggagagtcctgtttatagcaattcttcagtaagaaatgaattaccaatgcatcacaatagtagccgaaaatctactaagaaaacaaatcagtcatctaagaatattaggaaaaaaactattccacttaaaaggcagaagacagcaactaaaggcaaccaaagagtacagaagtttttaaatgctgaaggttctggaggtatcgttggtcatgatgaaatttccagatgttcgctgagtgagccattggaaagtgatgaggcagacttggctaagaagaaaaatcttgattgttctagatctacaagaagctcaaagaatgaagataacattatgactgcacagaatgttcccctaaagcctcagaccagtggatatacatgtaatataccaacagagtcaaacttggattctggagagcataagacttcagttttagaggaaagtggaccttccaggctcaataataattatttaatgtctggaaagaatgatgtggatgatgaggaagttcatggaagttcagatgactcaaaacaatctaaagtgataccaaagaacagaatccatcacaaactagtattgccctccaacacaccaaatgttcgcaggaccaagagaacacgtttgaaacctttggagtactggcgaggagagcgaatagattatcaaggaaggccatcaggaggattcgtgattagtggagtactatctccagacacaatatcgtctaaaaggaaggcaaaagaaaatattggaaaagtcaacaaaaaatctaataagaaaaggatctgtcttgataacgatgaaagaaagactaacttaatggtaaatctaggtatacctcttggagatcctttgcagccaacgagggtaaaggacccagaaacaagagagattattctcatggatcttgtaaggccacaagatacatatcaattttttgttaagcatggtgagttgaaggtatacaagacattggatacaccctttttttctactgggaaattgatattaggaccacaagaagaaaagggaaagcagcatgttggccaggatatattggttttttatgttaactttggtgaccttttgtgtactttacatgaaacaccttatatattaagtactggggattcgttctatgttccttcaggtaactattataacatcaaaaatctccggaatgaggaaagtgttcttctttttactcagataaaaagatgaaagatcaaccaaccttaaatatatgtatgtatatatgtatatgtgaaaaacagtttgtatagttggaatatttgtctttgtaattacttgtgatgttttaaaataaaaattttattcagttttgtgta

SEQ ID NO: 382799 - DNA, 1008 bp, Homo sapiens
  misc_feature (790)..(790): n is a, c, g, or t
cggatcgcagctctcgcggcagtcgcctgagacttaaggttattgcttggccgcggcctggtattccggcgattcgtttcttgctcggcttcctggagctgtggtccgtgtgggcttccacctcagacagttgcgctggctcagcggggccggaacatggctgcgtccggtctggatcatctcaaaaatggctacagaagaagattttgtcgaccttccagggcacgtgacattaacacagagcaaggccagaatgttctggaaatcttacaagactgttttgaagaaaaaagtcttgccaatgattttagtacaaattctacaaaatcagtgcctaattcaacacgcaaaataaaagacacttgtattcagtcaccaagcaaagagtgccagaaatcacatccaaagtcagttccagtttcttcaaagaagaaagaagcctctctacagtttgttgtagaaccaagtgaagccacaaacagatcagttcaggcccatgaagttcatcagaaaattctggcaactgatgttagttccaaaaatacacctgactcgaaaaaaatatcaagtagaaacataaatgatcatcacagtgaagctgatgaagaattttacttatccgttggctcaccttctgttcttttggatgcaaaaacatctgtatcacaaaatgttattccatctagtgcccaaaagagagagacttacacttttgaaaattcagtaaatatgctgccttcaagtacagaggtttcagttaaaaccaaaaaaagtaacttggggaaaagtngttacaacatcactgctctaggttccggaagggaaacatcgagggcaaccggggatcgcgaggactactgaacaccagacaatacaggtttacacgacgagacctcgtgggggcactcccactaagatagtctgtcgtcacttgcacagacaataataacgctggagcaccatcgacgcccagcgccctacaccacgccgcaccagcgcagggcacag

SEQ ID NO: 382800 - DNA, 354 bp, Homo sapiens
aacagtttaaaagaaatttagattttatttcctagattattttctttactaaacaaatataaaagctttatttttttgaactgttaaaagtatcaccctgtttcagtcccattgttaggcatgcggcaactgctccacctcattcgtgtcctcccgatgatacgaagttgatagaggatgaatttataattgatgagtcggatcaaagttttgccagtagatcttggattacaataccaagaaaggcagggtctctgaaacaacgcacaatatccccggctgagagcactgcactcttgaagaagtgactcaacgtcacgaaaagcgaaaaaattgccggtctgcctcccaacc

SEQ ID NO: 382801 - DNA, 290 bp, Homo sapiens
cgtgtcatggttagctgttgatgtagttcatggaattaaataagttactttaggttaggtgaattgtttttatcttgtgtcctatactacaactgtcaggtgatgactacatacttaatcaaaaagaatgattcatatgtaaataatttttattttcttatcactttacttttaggtaactattataacatcaaaaatctccggaatgaggaaagtgttcttctttttactcagataaaaagatgaaagatcaaccaacctttacacgtctaaccttacacgggtaccga

SEQ ID NO: 382802 - DNA, 3062 bp, Homo sapiens
cggatcgcagctctcgcggcagtcgcctgagacttaaggttattgcttggccgcggcctggtattccggcgattcgtttcttgctcggcttcctggagctgtggtccgtgtgggcttccacctcagacagttgcgctggctcagcggggccggaacatggctgcgtccggtctggatcatctcaaaaatggctacagaagaagattttgtcgaccttccagggcacgtgacattaacacagagcaaggccagaatgttctggaaatcttacaagactgttttgaagaaaaaagtcttgccaatgattttagtacaaattctacaaaatcagtgcctaattcaacacgcaaaatatcagttccagtttcttcaaagaagaaagaagcctctctacagtttgttgtagaaccaagtgaagccacaaacagatcagttcaggcccatgaagttcatcagaaaattctggcaactgatgttagttccaaaaatacacctgactcgaaaaaaatatcaagtagaaacataaatgatcatcacagtgaagctgatgaagaattttacttatccgttggctcaccttctgttcttttggatgcaaaaacatctgtatcacaaaatgttattccatctagtgcccaaaagagagagacttacacttttgaaaattcagtaaatatgctgccttcaagtacagaggtttcagttaaaaccaaaaaaaggttaaactttgatgataaagttatgttaaagaaaatagaaatagataataaagtatcagatgaagaggataaaacatcggaaggacaagaaagaaaaccatcaggatcatctcagaatagaatacgagattcagaatatgaaattcaacgacaagctaaaaaaagtttttcaacattgtttttagaaacagtaaaacgaaaaagtgaatccagtcccattgttaggcatgcggcaactgctccacctcattcgtgtcctcccgatgatacgaagttgatagaggatgaatttataattgatgagtcggatcaaagttttgccagtagatcttggattacaataccaagaaaggcagggtctctgaaacaacgcacaatatccccggctgagagcactgcactctttcaaggtagaaagtcaagagaaaagcatcataatatattacctaagactttggcaaatgacaaacattcccataaacctcacccagtagagacatctcagccctctgataaaacagtactggatacaagttatgctttgataggtgaaacagtaaataattatagatctacaaaatatgaaatgtattccaagaatgcagaaaaaccatctagaagcaaaaggactataaaacaaaaacagagaagaaaattcatggctaaaccagctgaagaacagcttgatgtgggacagtctaaagatgaaaacatacatacatcacatattacccaagacgaatttcaaagaaattcagacagaaatatggaagagcatgaagagatgggaaatgattgtgtttccaaaaaacagatgccacctgtgggaagcaagaaaagtagcactagaaaagataaggaagaatctaaaaagaagcgcttttccagtgagtccaagaacaaacttgtacctgaagaagtgacttcaactgtcacgaaaagtcgaagaatttccaggcgtccatctgattggtgggtggtaaaatcagaggagagtcctgtttatagcaattcttcagtaagaaatgaattaccaatgcatcacaatagtagccgaaaatctactaagaaaacaaatcagtcatctaagaatattaggaaaaaaactattccacttaaaaggcagaagacagcaactaaaggcaaccaaagagtacagaagtttttaaatgctgaaggttctggaggtatcgttggtcatgatgaaatttccagatgttcgctgagtgagccattggaaagtgatgaggcagacttggctaagaagaaaaatcttgattgttctagatctacaagaagctcaaagaatgaagataacattatgactgcacagaatgttcccctaaagcctcagaccagtggatatacatgtaatataccaacagagtcaaacttggattctggagagcataagacttcagttttagaggaaagtggaccttccaggctcaataataattatttaatgtctggaaagaatgatgtggatgatgaggaagttcatggaagttcagatgactcaaaacaatctaaagtgataccaaagaacagaatccatcacaaactagtattgccctccaacacaccaaatgttcgcaggaccaagagaacacgtttgaaacctttggagtactggcgaggagagcgaatagattatcaaggaaggccatcaggaggattcgtgattagtggagtactatctccagacacaatatcgtctaaaaggaaggcaaaagaaaatattggaaaagtcaacaaaaaatctaataagaaaaggatctgtcttgataacgatgaaagaaagactaacttaatggtaaatctaggtatacctcttggagatcctttgcagccaacgagggtaaaggacccagaaacaagagagattattctcatggatcttgtaaggccacaagatacatatcaattttttgttaagcatggtgagttgaaggtatacaagacattggatacaccctttttttctactgggaaattgatattaggaccacaagaagaaaagggaaagcagcatgttggccaggatatattggttttttatgttaactttggtgaccttttgtgtactttacatgaaacaccttatatattaagtactggggattcgttctatgttccttcaggtaactattataacatcaaaaatctccggaatgaggaaagtgttcttctttttactcagataaaaagatgaaagatcaaccaaccttaaatatatgtatgtatatatgtatatgtgaaaaacagtttgtatagttggaatatttgtctttgtaattacttgtgatgttttaaaataaaaattttattcagttttgtgta

SEQ ID NO: 382803 - DNA, 2486 bp, Homo sapiens
aacatttgtgatacagatgttattccatctagtgcccaaaagtgtaagtctctctctttgggcactagatggaattacacttttgaaaattcagtaaatatgctgccttcaagtacagaggtttcagttaaaaccaaaaaaaggttaaactttgatgataaagttatgttaaagaaaatagaaatagataataaagtatcagatgaagaggataaaacatcggaaggacaagaaagaaaaccatcaggatcatctcagaatagaatacgagattcagaatatgaaattcaacgacaagctaaaaaaagtttttcaacattgtttttagaaacagtaaaacgaaaaagtgaatccagtcccattgttaggcatgcggcaactgctccacctcattcgtgtcctcccgatgatacgaagttgatagaggatgaatttataattgatgagtcggatcaaagttttgccagtagatcttggattacaataccaagaaaggcagggtctctgaaacaacgcacaatatccccggctgagagcactgcactctttcaaggtagaaagtcaagagaaaagcatcataatatattacctaagactttggcaaatgacaaacattcccataaacctcacccagtagagacatctcagccctctgataaaacagtactggatacaagttatgctttgataggtgaaacagtaaataattatagatctacaaaatatgaaatgtattccaagaatgcagaaaaaccatctagaagcaaaaggactataaaacaaaaacagagaagaaaattcatggctaaaccagctgaagaacagcttgatgtgggacagtctaaagatgaaaacatacatacatcacatattacccaagacgaatttcaaagaaattcagacagaaatatggaagagcatgaagagatgggaaatgattgtgtttccaaaaaacagatgccacctgtgggaagcaagaaaagtagcactagaaaagataaggaagaatctaaaaagaagcgcttttccagtgagtccaagaacaaacttgtacctgaagaagtgacttcaactgtcacgaaaagtcgaagaatttccaggcgtccatctgattggtgggtggtaaaatcagaggagagtcctgtttatagcaattcttcagtaagaaatgaattaccaatgcatcacaatagtagccgaaaatctactaagaaaacaaatcagtcatctaagaatattaggaaaaaaactattccacttaaaaggcagaagacagcaactaaaggcaaccaaagagtacagaagtttttaaatgctgaaggttctggaggtatcgttggtcatgatgaaatttccagatgttcgctgagtgagccattggaaagtgatgaggcagacttggctaagaagaaaaatcttgattgttctagatctacaagaagctcaaagaatgaagataacattatgactgcacagaatgttcccctaaagcctcagaccagtggatatacatgtaatataccaacagagtcaaacttggattctggagagcataagacttcagttttagaggaaagtggaccttccaggctcaataataattatttaatgtctggaaagaatgatgtggatgatgaggaagttcatggaagttcagatgactcaaaacaatctaaagtgataccaaagaacagaatccatcacaaactagtattgccctccaacacaccaaatgttcgcaggaccaagagaacacgtttgaaacctttggagtactggcgaggagagcgaatagattatcaaggaaggccatcaggaggattcgtgattagtggagtactatctccagacacaatatcgtctaaaaggaaggcaaaagaaaatattggaaaagtcaacaaaaaatctaataagaaaaggatctgtcttgataacgatgaaagaaagactaacttaatggtaaatctaggtatacctcttggagatcctttgcagccaacgagggtaaaggacccagaaacaagagagattattctcatggatcttgtaaggccacaagatacatatcaattttttgttaagcatggtgagttgaaggtatacaagacattggatacaccctttttttctactgggaaattgatattaggaccacaagaagaaaagggaaagcagcatgttggccaggatatattggttttttatgttaactttggtgaccttttgtgtactttacatgaaacaccttatatattaagtactggggattcgttctatgttccttcaggtaactattataacatcaaaaatctccggaatgaggaaagtgttcttctttttactcagataaaaagatgaaagatcaaccaaccttaaatatatgtatgtatatatgtatatgtgaaaaacagtttgtatagttggaatatttgtctttgtaattacttgtgatgttttaaaataaaaattttattcagttttgtgta

SEQ ID NO: 382804 - DNA, 3368 bp, Homo sapiens
cggatcgcagctctcgcggcagtcgcctgagacttaaggttattgcttggccgcggcctggtattccggcgattcgtttcttgctcggcttcctggagctgtggtccgtgtgggcttccacctcagacagttgcgctggctcagcggggccggaacatggctgcgtccggtctggatcatctcaaaaatggctacagaagaagattttgtcgaccttccagggcacgtgacattaacacagagcaaggccagaatgttctggaaatcttacaagactgttttgaagaaaaaagtcttgccaatgattttagtacaaattctacaaaatcagtgcctaattcaacacgcaaaataaaagacacttgtattcagtcaccaagcaaagagtgccagaaatcacatccaaagtcagttccagtttcttcaaagaagaaagaagcctctctacagtttgttgtagaaccaagtgaagccacaaacagatcagttcaggcccatgaagttcatcagaaaattctggcaactgatgttagttccaaaaatacacctgactcgaaaaaaatatcaagtagaaacataaatgatcatcacagtgaagctgatgaagaattttacttatccgttggctcaccttctgttcttttggatgcaaaaacatctgtatcacaaaatgttattccatctagtgcccaaaagagagagacttacacttttgaaaattcagtaaatatgctgccttcaagtacagaggtttcagttaaaaccaaaaaaaggttaaactttgatgataaagttatgttaaagaaaatagaaatagataataaagtatcagatgaagaggataaaacatcggaaggacaagaaagaaaaccatcaggatcatctcagaatagaatacgagattcagaatatgaaattcaacgacaagctaaaaaaagtttttcaacattgtttttagaaacagtaaaacgaaaaagtgaatccagtcccattgttaggcatgcggcaactgctccacctcattcgtgtcctcccgatgatacgaagttgatagaggatgaatttataattgatgagtcggatcaaagttttgccagtagatcttggattacaataccaagaaaggcagggtctctgaaacaacgcacaatatccccggctgagagcactgcactctttcaaggtagaaagtcaagagaaaagcatcataatatattacctaagactttggcaaatgacaaacattcccataaacctcacccagtagagacatctcagccctctgataaaacagtactggatacaagttatgctttgataggtgaaacagtaaataattatagatctacaaaatatgaaatgtattccaagaatgcagaaaaaccatctagaagcaaaaggactataaaacaaaaacagagaagaaaattcatggctaaaccagctgaagaacagcttgatgtgggacagtctaaagatgaaaacatacatacatcacatattacccaagacgaatttcaaagaaattcagacagaaatatggaagagcatgaagagatgggaaatgattgtgtttccaaaaaacagatgccacctgtgggaagcaagaaaagtagcactagaaaagataaggaagaatctaaaaagaagcgcttttccagtgagtccaagaacaaacttgtacctgaagaagtgacttcaactgtcacgaaaagtcgaagaatttccaggcgtccatctgattggtgggtggtaaaatcagaggagagtcctgtttatagcaattcttcagtaagaaatgaattaccaatgcatcacaatagtagccgaaaatctactaagaaaacaaatcagtcatctaagaatattaggaaaaaaactattccacttaaaaggcagaagacagcaactaaaggcaaccaaagagtacagaagtttttaaatgctgaaggttctggaggtatcgttggtcatgatgaaatttccagatgttcgctgagtgagccattggaaagtgatgaggcagacttggctaagaagaaaaatcttgattgttctagatctacaagaagctcaaagaatgaagataacattatgactgcacagaatgttcccctaaagcctcagaccagtggatatacatgtaatataccaacagagtcaaacttggattctggagagcataagacttcagttttagaggaaagtggaccttccaggctcaataataattatttaatgtctggaaagaatgatgtggatgatgaggaagttcatggaagttcagatgactcaaaacaatctaaagtgataccaaagaacagaatccatcacaaactagtattgccctccaacacaccaaatgttcgcaggaccaagagaacacgtttgaaacctttggagtactggcgaggagagcgaatagattatcaaggaaggccatcaggaggattcgtgattagtggagtactatctccagacacaatatcgtctaaaaggaaggcaaaagaaaatattggaaaagtcaacaaaaaatctaataagaaaaggatctgtcttgataacgatgaaagaaagactaacttaatggtaaatctaggtatacctcttggagatcctttgcagccaacgagggtaaaggacccagaaacaagagagattattctcatggatcttgtaaggccacaagatacatatcaattttttgttaagcatggtgagttgaaggtatacaagacattggatacaccctttttttctactgggaaattgatattaggaccacaagaagaaaagggaaagcagcatgttggccaggatatattggttttttatgttaactttggtgaccttttgtgtactttacatgaaacaccttatatattaagtactggggattcgttctatgttccttcaggtaactattataacatcaaaaatctccggaatgaggaaagtgttcttctttttactcagataaaaagatgaaagatcaaccaaccttaaatatatgtatgtatatatgtatatgtgaaaaacagtttgtatagttggaatatttgtctttgtaattacttgtgatgttttaaaataaaaattttattcagttttgtgtaaaaaaaaaaaaaaaaaaaaaaaaaaaaaaaaaaaaaaaaaaaaaaaaaaaaaaaaaaaaaaaaaaaaaaaaaaaaacttaaaaacaagttcctcgccccacaattggaaaagaggagccaagaatttgcacaaatttgcctaacaaggctttcactctttttagctaacccacctttcaacaacttggaacttgaccccaagcaacagcttgcttgatcccccacacatggccattgatcacactgttttcc

SEQ ID NO: 382805 - DNA, 2236 bp, Homo sapiens
aacagtttaaaagaaatttagattttatttcctagattattttctttactaaacaaatataaaagctttatttttttgaactgttaaaagtatcaccctgtttcagtcccattgttaggcatgcggcaactgctccacctcattcgtgtcctcccgatgatacgaagttgatagaggatgaatttataattgatgagtcggatcaaagttttgccagtagatcttggattacaataccaagaaaggcagggtctctgaaacaacgcacaatatccccggctgagagcactgcactctttcaaggtagaaagtcaagagaaaagcatcataatatattacctaagactttggcaaatgacaaacattcccataaacctcacccagtagagacatctcagccctctgataaaacagtactggatacaagttatgctttgataggtgaaacagtaaataattatagatctacaaaatatgaaatgtattccaagaatgcagaaaaaccatctagaagcaaaaggactataaaacaaaaacagagaagaaaattcatggctaaaccagctgaagaacagcttgatgtgggacagtctaaagatgaaaacatacatacatcacatattacccaagacgaatttcaaagaaattcagacagaaatatggaagagcatgaagagatgggaaatgattgtgtttccaaaaaacagatgccacctgtgggaagcaagaaaagtagcactagaaaagataaggaagaatctaaaaagaagcgcttttccagtgagtccaagaacaaacttgtacctgaagaagtgacttcaactgtcacgaaaagtcgaagaatttccaggcgtccatctgattggtgggtggtaaaatcagaggagagtcctgtttatagcaattcttcagtaagaaatgaattaccaatgcatcacaatagtagccgaaaatctactaagaaaacaaatcagtcatctaagaatattaggaaaaaaactattccacttaaaaggcagaagacagcaactaaaggcaaccaaagagtacagaagtttttaaatgctgaaggttctggaggtatcgttggtcatgatgaaatttccagatgttcgctgagtgagccattggaaagtgatgaggcagacttggctaagaagaaaaatcttgattgttctagatctacaagaagctcaaagaatgaagataacattatgactgcacagaatgttcccctaaagcctcagaccagtggatatacatgtaatataccaacagagtcaaacttggattctggagagcataagacttcagttttagaggaaagtggaccttccaggctcaataataattatttaatgtctggaaagaatgatgtggatgatgaggaagttcatggaagttcagatgactcaaaacaatctaaagtgataccaaagaacagaatccatcacaaactagtattgccctccaacacaccaaatgttcgcaggaccaagagaacacgtttgaaacctttggagtactggcgaggagagcgaatagattatcaaggaaggccatcaggaggattcgtgattagtggagtactatctccagacacaatatcgtctaaaaggaaggcaaaagaaaatattggaaaagtcaacaaaaaatctaataagaaaaggatctgtcttgataacgatgaaagaaagactaacttaatggtaaatctaggtatacctcttggagatcctttgcagccaacgagggtaaaggacccagaaacaagagagattattctcatggatcttgtaaggccacaagatacatatcaattttttgttaagcatggtgagttgaaggtatacaagacattggatacaccctttttttctactgggaaattgatattaggaccacaagaagaaaagggaaagcagcatgttggccaggatatattggttttttatgttaactttggtgaccttttgtgtactttacatgaaacaccttatatattaagtactggggattcgttctatgttccttcaggtaactattataacatcaaaaatctccggaatgaggaaagtgttcttctttttactcagataaaaagatgaaagatcaaccaaccttaaatatatgtatgtatatatgtatatgtgaaaaacagtttgtatagttggaatatttgtctttgtaattacttgtgatgttttaaaataaaaattttattcagttttgtgta

SEQ ID NO: 382806 - DNA, 2747 bp, Homo sapiens
cggatcgcagctctcgcggcagtcgcctgagacttaaggttattgcttggccgcggcctggtattccggcgattcgtttcttgctcggcttcctggagctgtggtccgtgtgggcttccacctcagacagttgcgctggctcagcggggccggaacatggctgcgtccggtctggatcatctcaaaaatggctacagaagaagattttgtcgaccttccagggcacgtgacattaacacagagcaaggccagaatgttctggaaatcttacaagactgttttgaagaaaaaagtcttgccaatgattttagtacaaattctacaaaatcagtgcctaattcaacacgcaaaataaaagacacttgtattcagtcaccaagcaaagagtgccagaaatcacatccaaagtcagttccagtttcttcaaagaagaaagaagcctctctacagtttgttgtagaaccaagtgaagccacaaacagatcagttcaggcccatgaagttcatcagaaaattctggcaactgatgttagttccaaaaatacacctgactcgaaaaaaatatcaagtagaaacataaatgatcatcacagtgaagctgatgaagaattttacttatccgttggctcaccttctgttcttttggatgcaaaaacatctgtatcacaaaatgttattccatctagtgcccaaaagagagagacttacacttttgaaaattcagtaaatatgctgccttcaagtacagaggtttcagttaaaaccaaaaaaaggttaaactttgatgataaagttatgttaaagaaaatagaaatagataataaagtatcagatgaagaggataaaacatcggaaggacaagaaagaaaaccatcaggatcatctcagaatagaatacgagattcagaatatgaaattcaacgacaagctaaaaaaagtttttcaacattgtttttagaaacagtaaaacgaaaaagtgaatccagtcccattgttaggcatgcggcaactgctccacctcattcgtgtcctcccgatgatacgaagttgatagaggatgaatttataattgatgagtcggatcaaagttttgccagtagatcttggattacaataccaagaaaggcagggtctctgaaacaacgcacaatatccccggctgagagcactgcactctttcaaggtagaaagtcaagagaaaagcatcataatatattacctaagactttggcaaatgacaaacattcccataaacctcacccagtagagacatctcagccctctgataaaacagtactggatacaagttatgctttgataggtgaaacagtaaataattatagatctacaaaatatgaaatgtattccaagaatgcagaaaaaccatctagaagcaaaaggactataaaacaaaaacagagaagaaaattcatggctaaaccagctgaagaacagcttgatgtgggacagtctaaagatgaaaacatacatacatcacatattacccaagacgaatttcaaagaaattcagacagaaatatggaagagcatgaagagatgggaaatgattgtgtttccaaaaaacagatgccacctgtgggaagcaagaaaagtagcactagaaaagataaggaagaatctaaaaagaagcgcttttccagtgagtccaagaacaaacttgtacctgaagaagtgacttcaactgtcacgaaaagtcgaagaatttccaggcgtccatctgattggtgggtggtaaaatcagaggagagtcctgtttatagcaattcttcagtaagaaatgaattaccaatgcatcacaatagtagccgaaaatctactaagaaaacaaatcagtcatctaagaatattaggaaaaaaactattccacttaaaaggcagaagacagcaactaaaggcaaccaaagagtacagaagtttttaaatgctgaaggttctggaggtatcgttggtcatgatgaaatttccagatgttcgctgagtgagccattggaaagtgatgaggcagacttggctaagaagaaaaatcttgattgttctagatctacaagaagctcaaagaatgaagataacattatgactgcacagaatgttcccctaaagcctcagaccagtggatatacatgtaatataccaacagagtcaaacttggattctggagagcataagacttcagttttagaggaaagtggaccttccaggctcaataataattatttaatgtctggaaagaatgatgtggatgatgaggaagttcatggaagttcagatgactcaaaacaatctaaagtgataccaaagaacagaatccatcacaaactagtattgccctccaacacaccaaatgttcgcaggaccaagagaacacgtttgaaacctttggagtactggcgaggagagcgaatagattatcaaggaaggccatcaggtaaaacttatttatgttataatatctgtcaataaaaaatttgtttactatgtgccagacactgcactacatgtttatatacattaccttacttaatcatcacccccccaaattttgataataggatttaaattcatttttgtctgattaatgtagagatgctgatattttctctttggtagctgaatgttgttattcctgtatcatctgacaagatttccaattgcataatataaagcgttagattagaacgtgagaaaattgtaactggtaaaggtaaagtagttttcattatttttcc

SEQ ID NO: 382807 - DNA, 2494 bp, Homo sapiens
cggatcgcagctctcgcggcagtcgcctgagacttaaggttattgcttggccgcggcctggtattccggcgattcgtttcttgctcggcttcctggagctgtggtccgtgtgggcttccacctcagacagttgcgctggctcagcggggccggaacatggctgcgtccggtctggatcatctcaaaaatggctacagaagaagattttgtcgaccttccagggcacgtgacattaacacagagcaaggccagaatgttctggaaatcttacaagactgttttgaagaaaaaagtcttgccaatgattttagtacaaattctacaaaatcagtgcctaattcaacacgcaaaataaaagacacttgtattcagtcaccaagcaaagagtgccagaaatcacatccaaagtcagttccagtttcttcaaagaagaaagaagcctctctacagtttgttgtagaaccaagtgaagccacaaacagatcagttcaggcccatgaagttcatcagaaaattctggcaactgatgttagttccaaaaatacacctgactcgaaaaaaatatcaagtagaaacataaatgatcatcacagtgaagctgatgaagaattttacttatccgttggctcaccttctgttcttttggatgcaaaaacatctgtatcacaaaatgttattccatctagtgcccaaaagagagagacttacacttttgaaaattcagtaaatatgctgccttcaagtacagaggtttcagttaaaaccaaaaaaaggttaaactttgatgataaagttatgttaaagaaaatagaaatagataataaagtatcagatgaagaggataaaacatcggaaggacaagaaagaaaaccatcaggatcatctcagaatagaatacgagattcagaatatgaaattcaacgacaagctaaaaaaagtttttcaacattgtttttagaaacagtaaaacgaaaaagtgaatccagtcccattgttaggcatgcggcaactgctccacctcattcgtgtcctcccgatgatacgaagttgatagaggatgaatttataattgatgagtcggatcaaagttttgccagtagatcttggattacaataccaagaaaggcagggtctctgaaacaacgcacaatatccccggctgagagcactgcactctttcaaggtagaaagtcaagagaaaagcatcataatatattacctaagactttggcaaatgacaaacattcccataaacctcacccagtagagacatctcagccctctgataaaacagtactggatacaagttatgctttgataggtgaaacagtaaataattatagatctacaaaatatgaaatgtattccaagaatgcagaaaaaccatctagaagcaaaaggactataaaacaaaaacagagaagaaaattcatggctaaaccagctgaagaacagcttgatgtgggacagtctaaagatgaaaacatacatacatcacatattacccaagacgaatttcaaagaaattcagacagaaatatggaagagcatgaagagatgggaaatgattgtgtttccaaaaaacagatgccacctgtgggaagcaagaaaagtagcactagaaaagataaggaagaatctaaaaagaagcgcttttccagtgagtccaagaacaaacttgtacctgaagaagtgacttcaactgtcacgaaaagtcgaagaatttccaggcgtccatctgattggtgggtggtaaaatcagaggagagtcctgtttatagcaattcttcagtaagaaatgaattaccaatgcatcacaatagtagccgaaaatctactaagaaaacaaatcagtcatctaagaatattaggaaaaaaactattccacttaaaaggcagaagacagcaactaaaggcaaccaaagagtacagaagtttttaaatgctgaaggttctggaggtatcgttggtcatgatgaaatttccagatgttcgctgagtgagccattggaaagtgatgaggcagacttggctaagaagaaaaatcttgattgttctagatctacaagaagctcaaagaatgaagataacattatgactgcacagaatgttcccctaaagcctcagaccagtggatatacatgtaatataccaacagagtcaaacttggattctggagagcataagacttcagttttagaggaaagtggaccttccaggctcaataataattatttaatgtctggaaagaatgatgtggatgatgaggaagttcatggaagttcaggtaaactattgttttttttctgtcttgatttttatggcattatgaatatggagtaaggagtgctatgttttgtttacattgtcactgatggcgagtgtatattgagtacctacctcttaagacccttagttagagattaataagaccctgtacctaagtgagacagaaagaaaatgagtgacagttttttaagtagaacataatgaa

SEQ ID NO: 382808 - DNA, 940 bp, Homo sapiens
ttttaaaagcctccactgatgactgttgatttcaggggagcaataggaccatctaatcatgtttcatcatctaatcctgttttatcagcctctgatttagggtggtagagatataatgaaattggttggtatttgtgttattttaactattagctgcagacatatattctttggtactttgaaaggaaatgtgccatattaaatttaaggagttttgtttcaagattttgtctttcccatgtatattttactttttttgttaaatttcaggaggattcgtgattagtggagtactatctccagacacaatatcgtctaaaaggaaggcaaaagaaaatattggaaaagtcaacaaaaaatctaataagaaaaggatctgtcttgataacgatgaaagaaagactaacttaatggtaaatctaggtatacctcttggagatcctttgcagccaacgagggtaaaggacccagaaacaagagagattattctcatggatcttgtaaggccacaagatacatatcaattttttgttaagcatggtgagttgaaggtatacaagacattggatacaccctttttttctactgggaaattgatattaggaccacaagaagaaaagggaaagcagcatgttggccaggatatattggttttttatgttaactttggtgaccttttgtgtactttacatgaaacaccttatatattaagtactggggattcgttctatgttccttcaggtaactattataacatcaaaaatctccggaatgaggaaagtgttcttctttttactcagataaaaagatgaaagatcaaccaaccttaaatatatgtatgtatatatgtatatgtgaaaaacagtttgtatagttggaatatttgtctttgtaattacttgtgatgttttaaaataaaaattttattcagttttgtgta

SEQ ID NO: 382809 - DNA, 1007 bp, Homo sapiens
ttttaaaagcctccactgatgactgttgatttcaggggagcaataggaccatctaatcatgtttcatcatctaatcctgttttatcagcctctgatttagggtggtagagatataatgaaattggttggtatttgtgttattttaactattagctgcagacatatattctttggtactttgaaaggaaatgtgccatattaaatttaaggagttttgtttcaagattttgtctttcccatgtatattttactttttttgttaaatttcaggaggattcgtgattagtggagtactatctccagacacaatatcgtctaaaaggaaggcaaaagaaaatattggaaaagtcaacaaaaaatctaataagaaaaggatctgtcttgataacgatgaaagaagtatgaacttatttctgaaagtaacttttagattttattttaaataggagtactttgagaagaagctctttgcaaaatatgaaatttacttccatacctcttggagatcctttgcagccaacgagggtaaaggacccagaaacaagagagattattctcatggatcttgtaaggccacaagatacatatcaattttttgttaagcatggtgagttgaaggtatacaagacattggatacaccctttttttctactgggaaattgatattaggaccacaagaagaaaagggaaagcagcatgttggccaggatatattggttttttatgttaactttggtgaccttttgtgtactttacatgaaacaccttatatattaagtactggggattcgttctatgttccttcaggtaactattataacatcaaaaatctccggaatgaggaaagtgttcttctttttactcagataaaaagatgaaagatcaaccaaccttaaatatatgtatgtatatatgtatatgtgaaaaacagtttgtatagttggaatatttgtctttgtaattacttgtgatgttttaaaataaaaattttattcagttttgtgta

SEQ ID NO: 382810 - DNA, 1531 bp, Homo sapiens
cggatcgcagctctcgcggcagtcgcctgagacttaaggttattgcttggccgcggcctggtattccggcgattcgtttcttgctcggcttcctggagctgtggtccgtgtgggcttccacctcagacagttgcgctggctcagcggggccggaacatggctgcgtccggtctggatcatctcaaaaatggctacagaagaagattttgtcgaccttccagggcacgtgacattaacacagagcaaggccagaatgttctggaaatcttacaagactgttttgaagaaaaaagtcttgccaatgattttagtacaaattctacaaaatcagtgcctaattcaacacgcaaaataaaagacacttgtattcagtcaccaagcaaagagtgccagaaatcacatccaaagtcagttccagtttcttcaaagaagaaagaagcctctctacagtttgttgtagaaccaagtgaagccacaaacagatcagttcaggcccatgaagttcatcagaaaattctggcaactgatgttagttccaaaaatacacctgactcgaaaaaaatatcaagtagaaacataaatgatcatcacagtgaagctgatgaagaattttacttatccgttggctcaccttctgttcttttggatgcaaaaacatctgtatcacaaaatgttattccatctagtgcccaaaagagagagacttacacttttgaaaattcagtaaatatgctgccttcaagtacagaggtttcagttaaaaccaaaaaaaggtaacattttatttaaataatgttaacgcactttaaaaattttactttttgtattaaaaaatggtaattcaatcttgttatattattttacactaaggaaggaggaatattaacatgttatgagaaagtatacatttagcatatattcagtttgtaataattaaggaagggcttaaagtgtacttcagagaagtttagaggttaacttttctatagtctggaataatgtgttttctctctgataatatttgattgcttcctaagagaaacaatttgtattttctcaatattttttgtaattgcaagtgtagatgtgtatcaggtcacttcaagggtagcagagcataagtattattgaggatgctatgctttgtggacagctggtttctctttcttgaccttacctttggcctttaggaaacaaagtggattcaaggtcttttgcatttggagatctctgtaatgagtgtaatttctatttagagtattgtatgattactggagccaaggagttaagtatattctaagactttgatattcaaagtttggtctgtcacagtgctctaagattgccctgagaaccattgcctagctatacatttcattgatgtatactttagccattattttctctttcatgtttttctattgataaatacaaaagttaattttcctgagcagtttatcttatgtatttggaatgcacaaatcagcatttatgtcttaaataaatgcctagtacagaattttaaattggt

SEQ ID NO: 382811 - DNA, 374 bp, Homo sapiens
ttctaatcttaatgactttgagttttctgaaaactatttctgattaaattattgcagaatttttaaaaagcctgcttgattctcttattattcttttaattgacaaatatctttatataattttcttctagttcaggcccatgaagttcatcagaaaattctggcaactgatgttagttccaaaaatacacctgactcgaaaaaaatatcaagtagaaacataaatgatcatcacagtgaagctgatgaagaattttacttatccgttggctcaccttctgttcttttggatgcaaaaacatctgtatcacaaaatgttattccatctagtgcccaaaagagagagacttacacttttgaaaattcagtaaata

SEQ ID NO: 382812 - DNA, 3323 bp, Homo sapiens
cggatcgcagctctcgcggcagtcgcctgagacttaaggttattgcttggccgcggcctggtattccggcgattcgtttcttgctcggcttcctggagctgtggtccgtgtgggcttccacctcagacagttgcgctggctcagcggggccggaacatggctgcgtccggtctggatcatctcaaaaatggctacagaagaagattttgtcgaccttccagggcacgtgacattaacacagagcaaggccagaatgttctggaaatcttacaagactgttttgaagaaaaaagtcttgccaatgattttagtacaaattctacaaaatcagtgcctaattcaacacgcaaaataaaagacacttgtattcagtcaccaagcaaagagtgccagaaatcacatccaaagtcagttccagtttcttcaaagaagaaagaagcctctctacagtttgttgtagaaccaagtgaagccacaaacagatcagttcaggcccatgaagttcatcagaaaattctggcaactgatgttagttccaaaaatacacctgactcgaaaaaaatatcaagtagaaacataaatgatcatcacagtgaagctgatgaagaattttacttatccgttggctcaccttctgttcttttggatgcaaaaacatctgtatcacaaaatgttattccatctagtgcccaaaagagagagacttacacttttgaaaattcagtaaatatgctgccttcaagtacagaggtttcagttaaaaccaaaaaaaggttaaactttgatgataaagttatgttaaagaaaatagaaatagataataaagtatcagatgaagaggataaaacatcggaaggacaagaaagaaaaccatcaggatcatctcagaatagaatacgagattcagaatatgaaattcaacgacaagctaaaaaaagtttttcaacattgtttttagaaacagtaaaacgaaaaagtgaatccagtcccattgttaggcatgcggcaactgctccacctcattcgtgtcctcccgatgatacgaagttgatagaggatgaatttataattgatgagtcggatcaaagttttgccagtagatcttggattacaataccaagaaaggcagggtctctgaaacaacgcacaatatccccggctgagagcactgcactctttcaaggtagaaagtcaagagaaaagcatcataatatattacctaagactttggcaaatgacaaacattcccataaacctcacccagtagagacatctcagccctctgataaaacagtactggatacaagttatgctttgataggtgaaacagtaaataattatagatctacaaaatatgaaatgtattccaagaatgcagaaaaaccatctagaagcaaaaggactataaaacaaaaacagagaagaaaattcatggctaaaccagctgaagaacagcttgatgtgggacagtctaaagatgaaaacatacatacatcacatattacccaagacgaatttcaaagaaattcagacagaaatatggaagagcatgaagagatgggaaatgattgtgtttccaaaaaacagatgccacctgtgggaagcaagaaaagtagcactagaaaagataaggaagaatctaaaaagaagcgcttttccagtgagtccaagaacaaacttgtacctgaagaagtgacttcaactgtcacgaaaagtcgaagaatttccaggcgtccatctgattggtgggtggtaaaatcagaggagagtcctgtttatagcaattcttcagtaagaaatgaattaccaatgcatcacaatagtagccgaaaatctactaagaaaacaaatcagtcatctaagaatattaggaaaaaaactattccacttaaaaggcagaagacagcaactaaaggcaaccaaagagtacagaagtttttaaatgctgaaggttctggaggtatcgttggtcatgatgaaatttccagatgttcgctgagtgagccattggaaagtgatgaggcagacttggctaagaagaaaaatcttgattgttctagatctacaagaagctcaaagaatgaagataacattatgactgcacagaatgttcccctaaagcctcagaccagtggatatacatgtaatataccaacagagtcaaacttggattctggagagcataagacttcagttttagaggaaagtggaccttccaggctcaataataattatttaatgtctggaaagaatgatgtggatgatgaggaagttcatggaagttcagatgactcaaaacaatctaaagtgataccaaagaacagaatccatcacaaactagtattgccctccaacacaccaaatgttcgcaggaccaagagaacacgtttgaaacctttggagtactggcgaggagagcgaatagattatcaaggaaggccatcaggaggattcgtgattagtggagtactatctccagacacaatatcgtctaaaaggaaggcaaaagaaaatattggaaaagtcaacaaaaaatctaataagaaaaggatctgtcttgataacgatgaaagaaagactaacttaatggtaaatctaggtatacctcttggagatcctttgcagccaacgagggtaaaggacccagaaacaagagagattattctcatggatcttgtaaggccacaagatacatatcaattttttgttaagcatggtgagttgaaggtatacaagacattggatacaccctttttttctactgggaaattgatattaggaccacaagaagaaaagggaaagcagcatgttggccaggatatattggttttttatgttaactttggtgaccttttgtgtactttacatgaaacaccttatatattaagtactggggattcgttctatgttccttcaggtaactattataacatcaaaaatctccggaatgaggaaagtgttcttctttttactcagataaaaagatgaaagatcaaccaaccttaaatatatgtatgtatatatgtatatgtgaaaaacagtttgtatagttggaatatttgtctttgtaattacttgtgatgttttaaaataaaaattttattcagttttgtgtagacttgtatttgataaacatttctaactcacatgttttttctgatttttcagtgactgtacataatagcttgtagcgatgtccatatttatgatattatttttataatttgacaagaatatgaaaatgaaatatagaacatttctgtgtcaaaagagacctgattaatatgtctactcattaaaaaacatcttttccaaataaaaat

SEQ ID NO: 382813 - DNA, 3089 bp, Homo sapiens
cggatcgcagctctcgcggcagtcgcctgagacttaaggttattgcttggccgcggcctggtattccggcgattcgtttcttgctcggcttcctggagctgtggtccgtgtgggcttccacctcagacagttgcgctggctcagcggggccggaacatggctgcgtccggtctggatcatctcaaaaatggctacagaagaagattttgtcgaccttccagggcacgtgacattaacacagagcaaggccagaatgttctggaaatcttacaagactgttttgaagaaaaaagtcttgccaatgattttagtacaaattctacaaaatcagtgcctaattcaacacgcaaaataaaagacacttgtattcagtcaccaagcaaagagtgccagaaatcacatccaaagtcagttccagtttcttcaaagaagaaagaagcctctctacagtttgttgtagaaccaagtgaagccacaaacagatcagttcaggcccatgaagttcatcagaaaattctggcaactgatgttagttccaaaaatacacctgactcgaaaaaaatatcaagtagaaacataaatgatcatcacagtgaagctgatgaagaattttacttatccgttggctcaccttctgttcttttggatgcaaaaacatctgtatcacaaaatgttattccatctagtgcccaaaagagagagacttacacttttgaaaattcagtaaatatgctgccttcaagtacagaggtttcagttaaaaccaaaaaaaggttaaactttgatgataaagttatgttaaagaaaatagaaatagataataaagtatcagatgaagaggataaaacatcggaaggacaagaaagaaaaccatcaggatcatctcagaatagaatacgagattcagaatatgaaattcaacgacaagctaaaaaaagtttttcaacattgtttttagaaacagtaaaacgaaaaagtgaatccagtcccattgttaggcatgcggcaactgctccacctcattcgtgtcctcccgatgatacgaagttgatagaggatgaatttataattgatgagtcggatcaaagttttgccagtagatcttggattacaataccaagaaaggcagggtctctgaaacaacgcacaatatccccggctgagagcactgcactctttcaaggtagaaagtcaagagaaaagcatcataatatattacctaagactttggcaaatgacaaacattcccataaacctcacccagtagagacatctcagccctctgataaaacagtactggatacaagttatgctttgataggtgaaacagtaaataattatagatctacaaaatatgaaatgtattccaagaatgcagaaaaaccatctagaagcaaaaggactataaaacaaaaacagagaagaaaattcatggctaaaccagctgaagaacagcttgatgtgggacagtctaaagatgaaaacatacatacatcacatattacccaagacgaatttcaaagaaattcagacagaaatatggaagagcatgaagagatgggaaatgattgtgtttccaaaaaacagatgccacctgtgggaagcaagaaaagtagcactagaaaagataaggaagaatctaaaaagaagcgcttttccagtgagtccaagaacaaacttgtacctgaagaagtgacttcaactgtcacgaaaagtcgaagaatttccaggcgtccatctgattggtgggtggtaaaatcagaggagagtcctgtttatagcaattcttcagtaagaaatgaattaccaatgcatcacaatagtagccgaaaatctactaagaaaacaaatcagtcatctaagaatattaggaaaaaaactattccacttaaaaggcagaagacagcaactaaaggcaaccaaagagtacagaagtttttaaatgctgaaggttctggaggtatcgttggtcatgatgaaatttccagatgttcgctgagtgagccattggaaagtgatgaggcagacttggctaagaagaaaaatcttgattgttctagatctacaagaagctcaaagaatgaagataacattatgactgcacagaatgttcccctaaagcctcagaccagtggatatacatgtaatataccaacagagtcaaacttggattctggagagcataagacttcagttttagaggaaagtggaccttccaggctcaataataattatttaatgtctggaaagaatgatgtggatgatgaggaagttcatggaagttcagatgactcaaaacaatctaaagtgataccaaagaacagaatccatcacaaactagtattgccctccaacacaccaaatgttcgcaggaccaagagaacacgtttgaaacctttggagtactggcgaggagagcgaatagattatcaaggaaggccatcaggaggattcgtgattagtggagtactatctccagacacaatatcgtctaaaaggaaggcaaaagaaaatattggaaaagtcaacaaaaaatctaataagaaaaggatctgtcttgataacgatgaaagaatacctcttggagatcctttgcagccaacgagggtaaaggacccagaaacaagagagattattctcatggatcttgtaaggccacaagatacatatcaattttttgttaagcatggtgagttgaaggtatacaagacattggatacaccctttttttctactgggaaattgatattaggaccacaagaagaaaagggaaagcagcatgttggccaggatatattggttttttatgttaactttggtgaccttttgtgtactttacatgaaacaccttatatattaagtactggggattcgttctatgttccttcaggtaactattataacatcaaaaatctccggaatgaggaaagtgttcttctttttactcagataaaaagatgaaagatcaaccaaccttaaatatatgtatgtatatatgtatatgtgaaaaacagtttgtatagttggaatatttgtctttgtaattacttgtgatgttttaaaataaaaattttattcagttttgtgta

SEQ ID NO: 382814 - DNA, 3309 bp, Homo sapiens
cggatcgcagctctcgcggcagtcgcctgagacttaaggttattgcttggccgcggcctggtattccggcgattcgtttcttgctcggcttcctggagctgtggtccgtgtgggcttccacctcagacagttgcgctggctcagcggggccggaacatggctgcgtccggtctggatcatctcaaaaatggctacagaagaagattttgtcgaccttccagggcacgtgacattaacacagagcaaggccagaatgttctggaaatcttacaagactgttttgaagaaaaaagtcttgccaatgattttagtacaaattctacaaaatcagtgcctaattcaacacgcaaaataaaagacacttgtattcagtcaccaagcaaagagtgccagaaatcacatccaaagtcagttccagtttcttcaaagaagaaagaagcctctctacagtttgttgtagaaccaagtgaagccacaaacagatcagttcaggcccatgaagttcatcagaaaattctggcaactgatgttagttccaaaaatacacctgactcgaaaaaaatatcaagtagaaacataaatgatcatcacagtgaagctgatgaagaattttacttatccgttggctcaccttctgttcttttggatgcaaaaacatctgtatcacaaaatgttattccatctagtgcccaaaagagagagacttacacttttgaaaattcagtaaatatgctgccttcaagtacagaggtttcagttaaaaccaaaaaaaggttaaactttgatgataaagttatgttaaagaaaatagaaatagataataaagtatcagatgaagaggataaaacatcggaaggacaagaaagaaaaccatcaggatcatctcagaatagaatacgagattcagaatatgaaattcaacgacaagctaaaaaaagtttttcaacattgtttttagaaacagtaaaacgaaaaagtgaatccagtcccattgttaggcatgcggcaactgctccacctcattcgtgtcctcccgatgatacgaagttgatagaggatgaatttataattgatgagtcggatcaaagttttgccagtagatcttggattacaataccaagaaaggcagggtctctgaaacaacgcacaatatccccggctgagagcactgcactctttcaaggtagaaagtcaagagaaaagcatcataatatattacctaagactttggcaaatgacaaacattcccataaacctcacccagtagagacatctcagccctctgataaaacagtactggatacaagttatgctttgataggtgaaacagtaaataattatagatctacaaaatatgaaatgtattccaagaatgcagaaaaaccatctagaagcaaaaggactataaaacaaaaacagagaagaaaattcatggctaaaccagctgaagaacagcttgatgtgggacagtctaaagatgaaaacatacatacatcacatattacccaagacgaatttcaaagaaattcagacagaaatatggaagagcatgaagagatgggaaatgattgtgtttccaaaaaacagatgccacctgtgggaagcaagaaaagtagcactagaaaagataaggaagaatctaaaaagaagcgcttttccagtgagtccaagaacaaacttgtacctgaagaagtgacttcaactgtcacgaaaagtcgaagaatttccaggcgtccatctgattggtgggtggtaaaatcagaggagagtcctgtttatagcaattcttcagtaagaaatgaattaccaatgcatcacaatagtagccgaaaatctactaagaaaacaaatcagtcatctaagaatattaggaaaaaaactattccacttaaaaggcagaagacagcaactaaaggcaaccaaagagtacagaagtttttaaatgctgaaggttctggaggtatcgttggtcatgatgaaatttccagatgttcgctgagtgagccattggaaagtgatgaggcagacttggctaagaagaaaaatcttgattgttctagatctacaagaagctcaaagaatgaagataacattatgactgcacagaatgttcccctaaagcctcagaccagtggatatacatgtaatataccaacagagtcaaacttggattctggagagcataagacttcagttttagaggaaagtggaccttccaggctcaataataattatttaatgtctggaaagaatgatgtggatgatgaggaagttcatggaagttcagatgactcaaaacaatctaaagtgataccaaagaacagaatccatcacaaactagtattgccctccaacacaccaaatgttcgcaggaccaagagaacacgtttgaaacctttggagtactggcgaggagagcgaatagattatcaaggaaggccatcaggaggattcgtgattagtggagtactatctccagacacaatatcgtctaaaaggaaggcaaaagaaaatattggaaaagtcaacaaaaaatctaataagaaaaggatctgtcttgataacgatgaaagaaagactaacttaatggtaaatctaggtatacctcttggagatcctttgcagccaacgagggtaaaggacccagaaacaagagagattattctcatggatcttgtaaggccacaagatacatatcaattttttgttaagcatggtgagttgaaggtatacaagacattggatacaccctttttttctactgggaaattgatattaggaccacaagaagaaaagggaaagcagcatgttggccaggatatattggttttttatgttaactttggtgaccttttgtgtactttacatgaaacaccttatatattaagtactggggattcgttctatgttccttcaggtaactattataacatcaaaaatctccggaatgaggaaagtgttcttctttttactcagataaaaagatgaaagatcaaccaaccttaaatatatgtatgtatatatgtatatgtgaaaaacagtttgtatagttggaatatttgtctttgtaattacttgtgatgttttaaaataaaaattttattcagttttgtgtagacttgtatttgataaacatttctaactcacatgttttttctgatttttcagtgactgtacataatagcttgtagcgatgtccatatttatgatattatttttataatttgacaagaatatgaaaatgaaatatagaacatttctgtgtcaaaagagaacactggagtcacctaccactcctttttccccccc

SEQ ID NO: 382815 - DNA, 1391 bp, Homo sapiens
ctggacaaacttactaactttaggttatcattgaatccttcaggtcctgtttatagcaattcttcagtaagaaatgaattaccaatgcatcacaatagtagccgaaaatctactaagaaaacaaatcagtcatctaagaatattaggaaaaaaactattccacttaaaaggcagaagacagcaactaaaggcaaccaaagagtacagaagtttttaaatgctgaaggttctggaggtatcgttggtcatgatgaaatttccagatgttcgctgagtgagccattggaaagtgatgaggcagacttggctaagaagaaaaatcttgattgttctagatctacaagaagctcaaagaatgaagataacattatgactgcacagaatgttcccctaaagcctcagaccagtggatatacatgtaatataccaacagagtcaaacttggattctggagagcataagacttcagttttagaggaaagtggaccttccaggctcaataataattatttaatgtctggaaagaatgatgtggatgatgaggaagttcatggaagttcagatgactcaaaacaatctaaagtgataccaaagaacagaatccatcacaaactagtattgccctccaacacaccaaatgttcgcaggaccaagagaacacgtttgaaacctttggagtactggcgaggagagcgaatagattatcaaggaaggccatcaggaggattcgtgattagtggagtactatctccagacacaatatcgtctaaaaggaaggcaaaagaaaatattggaaaagtcaacaaaaaatctaataagaaaaggatctgtcttgataacgatgaaagaaagactaacttaatggtaaatctaggtatacctcttggagatcctttgcagccaacgagggtaaaggacccagaaacaagagagattattctcatggatcttgtaaggccacaagatacatatcaattttttgttaagcatggtgagttgaaggtatacaagacattggatacaccctttttttctactgggaaattgatattaggaccacaagaagaaaagggaaagcagcatgttggccaggatatattggttttttatgttaactttggtgaccttttgtgtactttacatgaaacaccttatatattaagtactggggattcgttctatgttccttcaggtaactattataacatcaaaaatctccggaatgaggaaagtgttcttctttttactcagataaaaagatgaaagatcaaccaaccttaaatatatgtatgtatatatgtatatgtgaaaaacagtttgtatagttggaatatttgtctttgtaattacttgtgatgttttaaaataaaaattttattcagttttgtgta

SEQ ID NO: 382816 - DNA, 2449 bp, Homo sapiens
cggatcgcagctctcgcggcagtcgcctgagacttaaggttattgcttggccgcggcctggtattccggcgattcgtttcttgctcggcttcctggagctgtggtccgtgtgggcttccacctcagacagttgcgctggctcagcggggccggaacatggctgcgtccggtctggatcatctcaaaaatggctacagaagaagattttgtcgaccttccagggcacgtgacattaacacagagcaaggccagaatgttctggaaatcttacaagactgttttgaagaaaaaagtcttgccaatgattttagtacaaattctacaaaatcagtgcctaattcaacacgcaaaataaaagacacttgtattcagtcaccaagcaaagagtgccagaaatcacatccaaagtcagttccagtttcttcaaagaagaaagaagcctctctacagtttgttgtagaaccaagtgaagccacaaacagatcagttcaggcccatgaagttcatcagaaaattctggcaactgatgttagttccaaaaatacacctgactcgaaaaaaatatcaagtagaaacataaatgatcatcacagtgaagctgatgaagaattttacttatccgttggctcaccttctgttcttttggatgcaaaaacatctgtatcacaaaatgttattccatctagtgcccaaaagagagagacttacacttttgaaaattcagtaaatatgctgccttcaagtacagaggtttcagttaaaaccaaaaaaaggttaaactttgatgataaagttatgttaaagaaaatagaaatagataataaagtatcagatgaagaggataaaacatcggaaggacaagaaagaaaaccatcaggatcatctcagaatagaatacgagattcagaatatgaaattcaacgacaagctaaaaaaagtttttcaacattgtttttagaaacagtaaaacgaaaaagtgaatccagtcccattgttaggcatgcggcaactgctccacctcattcgtgtcctcccgatgatacgaagttgatagaggatgaatttataattgatgagtcggatcaaagttttgccagtagatcttggattacaataccaagaaaggcagggtctctgaaacaacgcacaatatccccggctgagagcactgcactctttcaaggtagaaagtcaagagaaaagcatcataatatattacctaagactttggcaaatgacaaacattcccataaacctcacccagtagagacatctcagccctctgataaaacagtactggatacaagttatgctttgataggtgaaacagtaaataattatagatctacaaaatatgaaatgtattccaagaatgcagaaaaaccatctagaagcaaaaggactataaaacaaaaacagagaagaaaattcatggctaaaccagctgaagaacagcttgatgtgggacagtctaaagatgaaaacatacatacatcacatattacccaagacgaatttcaaagaaattcagacagaaatatggaagagcatgaagagatgggaaatgattgtgtttccaaaaaacagatgccacctgtgggaagcaagaaaagtagcactagaaaagataaggaagaatctaaaaagaagcgcttttccagtgagtccaagaacaaacttgtacctgaagaagtgacttcaactgtcacgaaaagtcgaagaatttccaggcgtccatctgattggtgggtggtaaaatcagaggagagtcctgtttatagcaattcttcagtaagaaatgaattaccaatgcatcacaatagtagccgaaaatctactaagaaaacaaatcagtcatctaagaatattaggaaaaaaactattccacttaaaaggcagaagacagcaactaaaggcaaccaaagagtacagaagtttttaaatgctgaaggttctggaggtatcgttggtcatgatgaaatttccagatgttcgctgagtgagccattggaaagtgatgaggcagacttggctaagaagaaaaatcttgattgttctagatctacaagaagctcaaagaatgaagataacattatgactgcacagaatgttcccctaaagcctcagaccagtggatatacatgtaatataccaacagagtcaaacttggattctggagagcataagacttcagttttagaggaaagtggaccttccaggctcaataataattatttaatgtctggaaagaatgatgtggatgatgaggaagttcatggaagttcagatgactcaaaacaatctaaagtgataccaaagaacagaatccatcacaaactagtattgccctccaacacaccaaatgttcgcaggaccaagagaacacgtttgaaacctttggagtactggcgaggagagcagatcctgaagctccattcagttgtgacat

SEQ ID NO: 382817 - DNA, 1658 bp, Homo sapiens
cggatcgcagctctcgcggcagtcgcctgagacttaaggttattgcttggccgcggcctggtattccggcgattcgtttcttgctcggcttcctggagctgtggtccgtgtgggcttccacctcagacagttgcgctggctcagcggggccggaacatggctgcgtccggtctggatcatctcaaaaatggctacagaagaagattttgtcgaccttccagggcacgtgacattaacacagagcaaggccagaatgttctggaaatcttacaagactgttttgaagaaaaaagtcttgccaatgattttagtacaaattctacaaaatcagtgcctaattcaacacgcaaaataaaagacacttgtattcagtcaccaagcaaagagtgccagaaatcacatccaaagtcagttccagtttcttcaaagaagaaagaagcctctctacagtttgttgtagaaccaagtgaagccacaaacagatcagttcaggcccatgaagttcatcagaaaattctggcaactgatgttagttccaaaaatacacctgactcgaaaaaaatatcaagtagaaacataaatgatcatcacagtgaagctgatgaagaattttacttatccgttggctcaccttctgttcttttggatgcaaaaacatctgtatcacaaaatgttattccatctagtgcccaaaagagagagacttacacttttgaaaattcagtaaatatgctgccttcaagtacagaggtttcagttaaaaccaaaaaaaggttaaactttgatgataaagttatgttaaagaaaatagaaatagataataaagtatcagatgaagaggataaaacatcggaaggacaagaaagaaaaccatcaggatcatctcagaatagaatacgagattcagaatatgaaattcaacgacaagctaaaaaaagtttttcaacattgtttttagaaacagtaaaacgaaaaagtgaatccagtcccattgttaggcatgcggcaactgctccacctcattcgtgtcctcccgatgatacgaagttgatagaggatgaatttataattgatgagtcggatcaaagttttgccagtagatcttggattacaataccaagaaaggcagggtctctgaaacaacgcacaatatccccggctgagagcactgcactctttcaaggtagaaagtcaagagaaaagcatcataatatattacctaagactttggcaaatgacaaacattcccataaacctcacccagtagagacatctcagccctctgataaaacagtactggatacaagttatgctttgataggtgaaacagtaaataattatagatctacaaaatatgaaatgtattccaagaatgcagaaaaaccatctagaagcaaaaggactataaaacaaaaacagagaagaaaattcatggctaaaccagctgaagaacagcttgatgtgggacagtctaaagatgaaaacatacatacatcacatattacccaagacgaatttcaaagaaattcagacagaaatatggaagagcatgaagagatgggaaatgattgtgtttccaaaaaacagatgccacctgtgggaagccagaaaggtagcactgaaaagattgggggattcttaaaggagcgcttttcagt

SEQ ID NO: 382818 - DNA, 644 bp, Homo sapiens
cactcaggcgtaatccatagggtttgagtgcaggactccccaaggacccaggctggggatggtggcgggcgtgatgatgccgttgacgagctgctggatgatcccttctagcgtggggaggccttcgtgccggccggtggcccgccgcgtggggaggcggaggcggggctgccgggcgcagtacggggccgggactgatgctctgtctcccacggtctctcagggtccttgctgccgtcagcctgcgccccaggagagaacgtggggatctcgaagctgtcgtcaaagatgccgaaagcaaactgtccgtagccctgcggcagcgtgaacaggtgctggtccgcgttctccaacggcggccggctctggtccgtgggggcagtggaaggggcagagctgttttctgtgctcctggtctcttcaggaagctcctcgataaaatcagacgcacatcttgggcagatataatccgataggcgcgggacggtgtccagggagcagcagtggcagaagaaccgtcctagctgctgcgacgcctcggccctggccaccgccccctactctgcgccgcccgccccccgcgaggcgccaaccgccggccatttgctgctccctcgctgatcgacgcccaaaccttttatata

SEQ ID NO: 382819 - DNA, 838 bp, Homo sapiens
actggaggaatcacatacccttcaagcacaaggcatgcttcagggctgaaaacaggggcaatattaaagtctgcataaggagcatttagctaccacgacttctcccaaccctgagcaaccacctcgccttagcctcaagagaaatcaggtgatgtatattctggaaaggttgaggtcctaggctctgaaaatctcagtagagctgaggacagggtggaggtgagaagccacaatgaaaactgggggcttcagtgtacactggtatgctgaacagtgagatttctctatcctccactcctacctgcatcctctcagctctcactctcaagatatggtttaggcaagaactactctccaagcaggaactactctctggaaaagctgaccagcccaagagaacatttctgcagagaatgacaaatgaggatccccatcctatcatcccaggctgaagtctatcagttctcaaactcctctttccaaccacccaacctgacataccatagcagagagctctaaatatttgaggaaaactcccacatatggtcagcaaaacaaacagggaaggggaaaactcagagaaaaagaaaaaataggaatacagggacaatgcaggaaggataataaaactttaaacatttaaagagaaagaaagatacacggtattacagacacaaataaaatctcaaaaatttatttctatgcttcctttctcaggaagttactggactcagtactcccacaaaatgagggtctaggctgggctcagcggcttacacctgtaatcccagtacttaggaaggcagaggcaggatagtctgggcaacacagcaaggct

SEQ ID NO: 382820 - DNA, 403 bp, Homo sapiens
caaatgcagtagtcaaaacaaaatctcattgggcagagaaagccagttaacttgttaaatacctagtaggcggttcatttttaaaattgatacataatatacctatttatgggatatatgtgatattttgatacatgcatatctatgtgtaattatcaagtcagggtggttaagctactcattacctcaaacatttaccatttctttgtgttgggaacatttcaaatctactcttctggctattttgaaatatacaataaattattgttaactatagtcactctgctgtgctatcaacactagaatttattgcttctaactgtatgtttgtacccattaaccaagctctcttcatcctccccacacccaaccattcccagcctctggtaaccatcattctata

SEQ ID NO: 382821 - DNA, 426 bp, Homo sapiens
gactggataagtgcaatcttaatagtcattcagtggaataatatttggcagtaaaaaggaatgagggaagtactgatacatgctgcaacgtgcataaatcttgaaaacattatgctcagttaagccagtcacaaaagggcacacattgtactattccatttgtatgacacatccagaataggcaaatctatagagagaaagattagcggttgccaggggctagggttggaggtggagaatacaaagtgagaactaatagatacaagtttctttttggaatgattaaaatgttctagaattagtggtgatgattgtactactttgtgaatatattaaaaattttaagacagtcttatggcatatggaattacatgtccatagtgattttaaaaattaaatattgggcatgcatatctaaagacagta

SEQ ID NO: 382822 - DNA, 254 bp, Homo sapiens
agtacagacagggtttcaccatgttagccacgatggtctctatttcctgacctcgtgacccgccccaccttggcctcccaaagtgctgggattacagtcagccccagctttctgcagtgtctggagggaccaggcttcaggcttgggggccgggctaggaagctgtgcacagttagagttgaaggtcaggtctgggtcactgttgccaggggagcaggtgtctgcagacatctgactgggatggctttgggggg

SEQ ID NO: 382823 - DNA, 913 bp, Homo sapiens
agaggggaggggaggggaagaggggaggggaggggaggggaggcaaagagaggggaggtgagggaaagagaggagaggggaggggaagagaggggagggaagggcagggcagggcagagcccggcaggcagccctcagaggaggggcgcaggccccagcccaaggcctcccgcgcctgcccaggtcccggcctccatcgtccagggctctggggctcccaggggagacacccacgctcggccaagcccagggttccagaagcccaggggtggcggcagccgggctcagcctatggccaggctcgcattcagacatgcgccagcctcggtcggctctctccgggagacactaagatctcctcactgactttggtgttccttggtctcaccagcgcgtcctagctgtgccgagctcacacccaccctgtttggtgtaagccacaggtccacaacgttcatcagctctggaaatccctcaacaattgtgtccagtttcaccacgaattccttctccatatcctcaccattttcttttaccccctcatcaaattactcccttccgtctaatctgctgattaactcattcattttatcttaaattattatgttaacatatccaggccaggcacggtggctcacgcctgtaatcccagcactttgggaagccgaggagggcggatcaccagctcaggagatccagatcatcctggctaacacggtgaaaccccgtctctactaaaaaatacagaaattagctgggcttggtggcgggcacctgtagtaccagctactcgggaggctgaggcaggagaatggcgtgaacctgggaggcaaagcttgcagtgagccaagatcacgccactgcactctagcttgggcgaaagagcgaggctccgtctcaaaaaaaaaaaaaa

SEQ ID NO: 382824 - DNA, 384 bp, Homo sapiens
tgaaaagtgcgccctacgaaaggacggtcgacttcggcggggcccaggtgagaaaggcccacctgtgtcctggttgagggtctccagggttctttggggcccgaggtgccaatgggtcatgtttggttagaaggtgacaatctacagaattctacagattccaggtgctatggacctattccatatggactaataagaggacgaatcttctttaagatttggcctctgagtgattttggatttttacgtgccagccctaatggccacagattttctgatgattagtaagcatttattcttttgacttgattattgtctccttttcatgtgaatttattactcccgttgaaaccgtgtacttaccaataaactatttgctattca

SEQ ID NO: 382825 - DNA, 734 bp, Homo sapiens
tgaaaagtgcgccctacgaaaggacggtcgacttcggcggggcccaggtgagaaaggcccacctgtgtcctggttgagggtctccagggttctttggggcccgaggccaatggtggcagagtctacatagaactatgcttcgtggtgttctggggaaaacctttcgacttgttggctatactattcaatatggctgtatagctcattgtgcttttgaatacgttggtggtgttgtcatgtgttctggaccatcaatggagcctacaattcaaaattcagatattgtctttgcagaaaatcttagtcgacatttttatggtatccaaagaggtgacattgtgattgcaaaaagcccaagtgatccaaaatcaaatatttgtaaaagagtaattggtttggaaggagacaaaatcctcaccactagtccatcagatttctttaaaagccatagttatgtgccaatgggtcatgtttggttagaaggtgacaatctacagaattctacagattccaggtgctatggacctattccatatggactaataagaggacgaatcttctttaagatttggcctctgagtgattttggatttttacgtgccagccctaatggccacagattttctgatgattagtaagcatttattcttttgacttgattattgtctccttttcatgtgaatttattactcccgttgaaaccgtgtacttaccaataaactatttgctattca

SEQ ID NO: 382826 - DNA, 928 bp, Homo sapiens
tgaaaagtgcgccctacgaaaggacggtcgacttcggcggggcccaggtgagaaaggcccacctgtgtcctggttgagggtctccagggttctttggggcccgaggtgccaatgggtcatgtttggttagaaggtgacaatctacagaattctacagattccaggtgctatggacctattccatatggactaataagaggacgaatcttctttaagatttggcctctgagtgattttggatttttacgtgccagccctaatggccacagattttctgatgattagtaagcatttattcttttgacttgattattgtctccttttcatgtgaatttattactcccgttgaaaccgtgtacttaccaataaactatttgctattcaaaaagacgcaagggctaacgacgaacaagacgcaaacaacagtggacaggagcagcacacatacggagccaccgcgagaaaaacgtctctaaaaaacacaatcagaagagtgcggcccgagggcgcccccagaggcgaaaaggcagacaaagtggggcccaaaacagcggtgtgccccagaggaggaaagaaccgggggccacacaggaaccacacaaaagagtgcagagggataatacccgaccaccaacagaaagaaaaaaaagacacgccggcgcgggggtcgggaggacaaaacacacccgggagcagggccgtctgtctgttaggtagaagcacaaaatgcatcgtcccaggcaagtaggagggagacactcacgggaagggggacgaccaatcactgacacggggtgaggcaatctcatgtataactatcagccaaacggggaggggcgacttaacaaagcagaggggagcagcgaccacagcgacaaaaatacaccaagacaatttgtaagccccgcgcgtagcgcgggggatgggc

SEQ ID NO: 382827 - DNA, 464 bp, Homo sapiens
ctttgatatttagtaaaagttattgtgcaagaaataaaagcaaaaatgcaatattaggatttgtatctattctataaaagagagccttaggacatttctccctacctctgaatgacatgctttttaattatagtacccaaattaggttttatctttaagaggctgcatttcttctctaattctaggtgccaatgggtcatgtttggttagaaggtgacaatctacagaattctacagattccaggtgctatggacctattccatatggactaataagaggacgaatcttctttaagatttggcctctgagtgattttggatttttacgtgccagccctaatggccacagattttctgatgattagtaagcatttattcttttgacttgattattgtctccttttcatgtgaatttattactcccgttgaaaccgtgtacttaccaataaactatttgctattca

SEQ ID NO: 382828 - DNA, 643 bp, Homo sapiens
tgaaaagtgcgccctacgaaaggacggtcgacttcggcggggcccaggtgagaaaggcccacctgtgtcctggttgagggtctccagggttctttggggcccgaggtgaagcgacttccagtcatttggaaaggatgggatgaaaaggaaccttggtgataattttgatgtctgcaagatttagtaccagtgtaatgggattatcggtaacaccttcactgcagaaaaagccacctggcgctataactggcagcaactgagaactaatcctttcccatctcttggatgtcattcatgaagctcaaagctatttctgccctgctaactgtgattaattttataaacaacaacaacaaaaaatcaggtgccaatgggtcatgtttggttagaaggtgacaatctacagaattctacagattccaggtgctatggacctattccatatggactaataagaggacgaatcttctttaagatttggcctctgagtgattttggatttttacgtgccagccctaatggccacagattttctgatgattagtaagcatttattcttttgacttgattattgtctccttttcatgtgaatttattactcccgttgaaaccgtgtacttaccaataaactatttgctattca

SEQ ID NO: 382829 - DNA, 844 bp, Homo sapiens
atgtagaaaattttattcttgattgatgagtaaggagaaagtgtttatctggcatagagaaaagggacagatagcaaaagggaatatgatgatactataacattactttcactaattgtcttcaacctcattttgattttacagatttggcctctgagtgattttggatttttacgtgccagccctaatggccacagattttctgatgattagtaagcatttattcttttgacttgattattgtctccttttcatgtgaatttattactcccgttgaaaccgtgtacttaccaataaactatttgctattcagttttagttgtttttaattgttaaatgtaaagaatattcaacacacattctgccaagttctgttagttcaaaatatatggataaaaatgtaacccacaaaagtcatctaaattttatgatacaaaaatattgtgggagggggaacctggatgactacctcacttttgaattcttgttcttataggtataatgaaactaatctattcttcttaaatatacctcatactttagcagctacatttacaagtcagagtagtaactattcgtatttataagttcaacctgacaatgccaggtttgataaaaagctgctagtctacatgctcagcccactcatttgaaattaagtaaaaatgtttctaaaggatcccttaaagttctttaaatgagttctgacttttactgtacacaaaatattaaatacatagaaaaatgcatctttaaggcatatgccatctgtagttggctatagtccaataatactttataaaagttcatttcagcatagcagcagtgcaatggccctgtcttc

SEQ ID NO: 382830 - DNA, 481 bp, Homo sapiens
tctcaagaaaagaaaagaaaaaaaaagatgctgtttgctttccttattttgaagactatagtgataaaaacctgtgctacacatccatttctcagcaacggctcctaggataatcaatcatggcatactgctaatgccttgattgcagctgatatggaggaaatatgtttactcttttgctaaagtgaagttcactgcggaggtgccaatgggtcatgtttggttagaaggtgacaatctacagaattctacagattccaggtgctatggacctattccatatggactaataagaggacgaatcttctttaagatttggcctctgagtgattttggatttttacgtgccagccctaatggccacagattttctgatgattagtaagcatttattcttttgacttgattattgtctccttttcatgtgaatttattactcccgttgaaaccgtgtacttaccaataaactatttgctattca

SEQ ID NO: 382831 - DNA, 544 bp, Homo sapiens
  misc_feature (527)..(527): n is a, c, g, or t
  misc_feature (530)..(530): n is a, c, g, or t
tgaaaagtgcgccctacgaaaggacggtcgacttcggcggggcccaggtgagaaaggcccacctgtgtcctggttgagggtctccagggttctttggggcccgaggccaatggtggcagagtctacatagaactatgcttcgtggtgttctggggaaaacctttcgacttgttggctatactattcaatatggctgtatagctcattgtgcttttgaatacgttggtggtgttgtcatggtgccaatgggtcatgtttggttagaaggtgacaatctacagaattctacagattccaggtgctatggacctattccatatggactaataagaggacgaatcttctttaagatttggcctctgagtgattttggatttttacgtgccagccctaatggccacagattttctgatgattagtaagcatttattcttttgacttgattattgtctccttttcatgtgaatttattactcccgttgaaaccgtgtacttaccaataaactatttgctattcaaaagacaanaancacaacaaacacaa

SEQ ID NO: 382832 - DNA, 904 bp, Homo sapiens
  misc_feature (887)..(887): n is a, c, g, or t
  misc_feature (890)..(890): n is a, c, g, or t
tgaaaagtgcgccctacgaaaggacggtcgacttcggcggggcccaggtgagaaaggcccacctgtgtcctggttgagggtctccagggttctttggggcccgaggtgaagcgacttccagtcatttggaaaggatgggatgaaaaggaaccttggtgataattttgatgtctgcaagatttagtaccagtgtaatgggattatcggtaacaccttcactgcagaaaaagccacctggcgctataactggcagcaactgagaactaatcctttcccatctcttggatgtcattcatgaagctcaaagctatttctgccctgctaactgtgattaattttataaacaacaacaacaaaaaatcaggtgccaatgggtcatgtttggttagaaggtgacaatctacagaattctacagattccaggtgctatggacctattccatatggactaataagaggacgaatcttctttaagatttggcctctgagtgattttggatttttacgtgccagccctaatggccacagattttctgatgattagtaagcatttattcttttgacttgattattgtctccttttcatgtgaatttattactcccgttgaaaccgtgtacttaccaataaactatttgctattcaaaaaaaaaaaaaaaaaatcggggatttatgtggggggcggaaaaagggggcactggaagaggccaggggtccttaggggggtttccctggacccagctttctggtccaagggggaaacctgcggggccccctaaagggaggcgataattcgataggcgggtaacgtaaagaggcgcacacaaacccaaacaaaacagacacggggggaggcaacacaacaaaagcgcgcgcaaacaaagacaanaancacaacaaacacaa

SEQ ID NO: 382833 - DNA, 727 bp, Homo sapiens
tgaaaagtgcgccctacgaaaggacggtcgacttcggcggggcccaggtgagaaaggcccacctgtgtcctggttgagggtctccagggttctttggggcccgaggtgaagcgacttccagtcatttggaaaggatgggatgaaaaggaaccttggtgataattttgatgtctgcaagatttagtaccagtgtaatgggattatcggtaacaccttcactgcagaaaaagccacctggcgctataactggcagcaactgagaactaatcctttcccatctcttggatgtcattcatgaagctcaaagctatttctgccctgctaactgtgattaattttataaacaacaacaacaaaaaatcaggtcatcaaggcaaagaatatgctctttattatttataatatgtaaccttatgttaagctatatgacttaaaattatgcaagacatatacaaactaagctatatgattcaaaatttattaagctattgaaatagaaaagttgatcaatgatgtcttggtttttttaattgaatggcaaattatttactattggtaacaattcatatttcagatcaaatattaatttaaatacttttatattcttttggctatagagccactatgaaattaatcaaaatgtctagctgtaaggaattgaaataatatgtttcgtcatatgttttacctgtttttgactgcttcagttgctactgatgaaatgttt

SEQ ID NO: 382834 - DNA, 312 bp, Homo sapiens
atgtagaaaattttattcttgattgatgagtaaggagaaagtgtttatctggcatagagaaaagggacagatagcaaaagggaatatgatgatactataacattactttcactaattgtcttcaacctcattttgattttacagatttggcctctgagtgattttggatttttacgtgccagccctaatggccacagattttctgatgattagtaagcatttattcttttgacttgattattgtctccttttcatgtgaatttattactcccgttgaaaccgtgtacttaccaataaactatttgctattca

SEQ ID NO: 382835 - DNA, 814 bp, Homo sapiens
tgaaaagtgcgccctacgaaaggacggtcgacttcggcggggcccaggtgagaaaggcccacctgtgtcctggttgagggtctccagggttctttggggcccgaggtaggtaatatcacgtaacgttcttctccttttgagtgccttcattcacattgagttaaagaaaaggaatttcagacctgaacaatcaggtggacaacttcttgtgactttgggtattctgaaattactcatcttgactctactgtgcctggatgtagctgtgtgttttgccaatggtggcagagtctacatagaactatgcttcgtggtgttctggggaaaacctttcgacttgttggctatactattcaatatggctgtatagctcattgtgcttttgaatacgttggtggtgttgtcatgaggtgacattgtgattgcaaaaagcccaagtgatccaaaatcaaatatttgtaaaagagtaattggtttggaaggagacaaaatcctcaccactagtccatcagatttctttaaaagccatagttatgtgccaatgggtcatgtttggttagaaggtgacaatctacagaattctacagattccaggtgctatggacctattccatatggactaataagaggacgaatcttctttaagatttggcctctgagtgattttggatttttacgtgccagccctaatggccacagattttctgatgattagtaagcatttattcttttgacttgattattgtctccttttcatgtgaatttattactcccgttgaaaccgtgtacttaccaataaactatttgctattca

SEQ ID NO: 382836 - DNA, 893 bp, Homo sapiens
tgaaaagtgcgccctacgaaaggacggtcgacttcggcggggcccaggtgagaaaggcccacctgtgtcctggttgagggtctccagggttctttggggcccgaggtaggtaatatcacgtaacgttcttctccttttgagtgccttcattcacattgagttaaagaaaaggaatttcagacctgaacaatcaggtggacaacttcttgtgactttgggtattctgaaattactcatcttgactctactgtgcctggatgtagctgtgtgttttgccaatggtggcagagtctacatagaactatgcttcgtggtgttctggggaaaacctttcgacttgttggctatactattcaatatggctgtatagctcattgtgcttttgaatacgttggtggtgttgtcatgaggtgacattgtgattgcaaaaagcccaagtgatccaaaatcaaatatttgtaaaagagtaattggtttggaaggagacaaaatcctcaccactagtccatcagatttctttaaaagccatagttatcatttcagataagagatactcaacctgcaacttatagaggtggatcagcaaagatgcctgctttaattttaaaagatctgtgccaatgggtcatgtttggttagaaggtgacaatctacagaattctacagattccaggtgctatggacctattccatatggactaataagaggacgaatcttctttaagatttggcctctgagtgattttggatttttacgtgccagccctaatggccacagattttctgatgattagtaagcatttattcttttgacttgattattgtctccttttcatgtgaatttattactcccgttgaaaccgtgtacttaccaataaactatttgctattca

SEQ ID NO: 382837 - DNA, 916 bp, Homo sapiens
tgaaaagtgcgccctacgaaaggacggtcgacttcggcggggcccaggtgagaaaggcccacctgtgtcctggttgagggtctccagggttctttggggcccgaggtgccaatgggtcatgtttggttagaaggtgacaatctacagaattctacagattccaggtgctatggacctattccatatggactaataagaggacgaatcttctttaagatttggcctctgagtgattttggatttttacgtgccagccctaatggccacagattttctgatgattagtaagcatttattcttttgacttgattattgtctccttttcatgtgaatttattactcccgttgaaaccgtgtacttaccaataaactatttgctattcagttttagttgtttttaattgttaaatgtaaagaatattcaacacacattctgccaagttctgttagttcaaaatatatggataaaaatgtaacccacaaaagtcatctaaattttatgatacaaaaatattgtgggagggggaacctggatgactacctcacttttgaattcttgttcttataggtataatgaaactaatctattcttcttaaatatacctcatactttagcagctacatttacaagtcagagtagtaactattcgtatttataagttcaacctgacaatgccaggtttgataaaaagctgctagtctacatgctcagcccactcatttgaaattaagtaaaaatgtttctaaaggatcccttaaagttctttaaatgagttctgacttttactgtacacaaaatattaaatacatagaaaaatgcatctttaaggcatatgccatctgtagttggctatagtccaataatactttataaaagttcatttcagcatagcagcagtgcaatggccctgtcttc

SEQ ID NO: 382838 - DNA, 687 bp, Homo sapiens
tgaaaagtgcgccctacgaaaggacggtcgacttcggcggggcccaggtgagaaaggcccacctgtgtcctggttgagggtctccagggttctttggggcccgaggtaggtaatatcacgtaacgttcttctccttttgagtgccttcattcacattgagttaaagaaaaggaatttcagacctgaacaatcaggtggacaacttcttgtgactttgggtattctgaaattactcatcttgactctactgtgcctggatgtagctgtgtgttttgccaatggtggcagagtctacatagaactatgcttcgtggtgttctggggaaaacctttcgacttgttggctatactattcaatatggctgtatagctcattgtgcttttgaatacgttggtggtgttgtcatggtgccaatgggtcatgtttggttagaaggtgacaatctacagaattctacagattccaggtgctatggacctattccatatggactaataagaggacgaatcttctttaagatttggcctctgagtgattttggatttttacgtgccagccctaatggccacagattttctgatgattagtaagcatttattcttttgacttgattattgtctccttttcatgtgaatttattactcccgttgaaaccgtgtacttaccaataaactatttgctattca

SEQ ID NO: 382839 - DNA, 459 bp, Homo sapiens
tctttctgtttgtttaaatgtcatttcccttagctaaaagtcaaccatctggtcttctattaccacttgtattataaacagaaaaaagtacttctctgtagagagaggaatcatcagattgaaagggcttgtgtattataagctgctgatatactaaatccttatgtcatttaaatagaagaactgcctaataatgtcacttattacaactagagtatctaaacaagcgacttgttttttgcagactatagtgataaaaacctgtgctacacatccatttctcagcaacggctcctaggataatcaatcatggcatactgctaatgccttgattgcagctgatatggaggaaatatgtttactcttttgctaaagtgaagttcactgcggaggtgacgtgactttttcattctatagctaacacaattctgaagataaatttcactcattgtttacaag

SEQ ID NO: 382840 - DNA, 511 bp, Homo sapiens
tgaaaagtgcgccctacgaaaggacggtcgacttcggcggggcccaggtgagaaaggcccacctgtgtcctggttgagggtctccagggttctttggggcccgagaggtgacattgtgattgcaaaaagcccaagtgatccaaaatcaaatatttgtaaaagagtaattggtttggaaggagacaaaatcctcaccactagtccatcagatttctttaaaagccatagttatgtgccaatgggtcatgtttggttagaaggtgacaatctacagaattctacagattccaggtgctatggacctattccatatggactaataagaggacgaatcttctttaagatttggcctctgagtgattttggatttttacgtgccagccctaatggccacagattttctgatgattagtaagcatttattcttttgacttgattattgtctccttttcatgtgaatttattactcccgttgaaaccgtgtacttaccaataaactatttgctattca

SEQ ID NO: 382841 - DNA, 568 bp, Homo sapiens
cagtgtggatggaactattttctaaaatttgcggtattcataggcttttgtttttggcagttctttgaaaacgatttggagattgtaaaataatagtcaaagactattctcatgtttctcataagtatgaggtgatggagagtgggatttgctttaatttgtgacattaattggggtatggggagttttaacattgattacagtttttcagtgatatctattgcacttaaatctacctttcccgtcatctatattttattcatataattctcaggtaatttttagcattgtatttcacttcaaagctgaaatatgattgggagaaacttgatcctttgatgttaaaccaaggtacctttgccaaggctgtgaaattctgtatgattcattcaagaacacttgaaggccagtgcacaaaaagatgtcttaatctcctgaacatcctagtgtccaggctcaactctggcaccaagaacagagttctacacaactttttcccagcatcaagaaaatccttgttccggctttaccgagtttacgctgggagcagtcagcttctgggtgacag

SEQ ID NO: 382842 - DNA, 422 bp, Homo sapiens
atggaagcagctaggcatgaacaccaattaatgctaatgaggcaagatctaatgaggcatcaagaagaactcagatgcttggaagaactcagaaatcaagagttgcagagggtggagccaagatggccgaataggaacagctccattctacagctcccagcatgagcgacgcagaagatgaatgatttctgcatttccaactgaggtacctttgccaaggctgtgaaattctgtatgattcattcaagaacacttgaaggccagtgcacaaaaagatgtcttaatctcctgaacatcctagtgtccaggctcaactctggcaccaagaacagagttctacacaactttttcccagcatcaagaaaatccttgttccggctttaccgagtttacgctgggagcagtcagcttctgggtgacag

SEQ ID NO: 382843 - DNA, 395 bp, Homo sapiens
caccaaccttagcaattggaaggggaccatttctcctcccctcttacaatgatagtgtatacgttaggaggaaaagaccagaaaaagacatttctggtggcagtaggaaggaaatgaaagacaaataaacatcttgactaaaaaggtaaaagagtatacccaatggcttaatcagagacataaagaggagtggagtatctccagtagcatggaagaggaagaagaaagcattcttcagtggcagaattggttgggttttctttctccctggcccacaaaatgttcctggtcagggcgagcatggtggctcatacttgtagtcccagctacttgggaggctgaggcaagaggatcactggagctcaggagttcttggctgtagtgaactgtgatca

SEQ ID NO: 382844 - DNA, 160 bp, Homo sapiens
aaggttcggaaggaaattttaactaattgttctccctccaatgtgtgaaggggagcccctggaagtcagggtgctctttgggggataccataaaatactagtcagttgggcatggggaacaatcttttttttttttttttttttaatttttttgagacgg

SEQ ID NO: 382845 - DNA, 374 bp, Homo sapiens
caagcaccatgcacccaggctcagccccaccagacgtggaaacgagaattagtccagatgccctaaacgtgtgacgtttttgtccaccagcacagttaaaagctccagctctgaaaaggacgcccaactgcgccactggctaattgtttgaccctaatggaagcctgaatttcctcaatctgcaaaatgatatctgcctgatagagctcttgaaaggattcagtgaggaactgcagattaaaggtacatggcttcagagaaaacacttgatatgacagctgttactgtatcagtagtagtagtagctcagtagtatctggttagcctgttggaagccccaacttaccccatctgaacaatgggctccaggcctc

SEQ ID NO: 382846 - DNA, 244 bp, Homo sapiens
aacattcgtccaaatgccttccagataaaaggcaatttattccgtgagcaacagcggacgctctactctatgagttacatgaataagtgctgggagatttatctcgcttactgcagacccagtgcagcgcctccccacgagcctacgatgaagatgagacacttcctctggatgctgaaagactttaaaatgataaataaagaattaacagcagctacatttatggaggtcatagcagaggata

SEQ ID NO: 382847 - DNA, 998 bp, Homo sapiens
gccttcagggccgtgccccatgctgctcctctttttgtccccacatccagcagttttccattaaaccactgtaggtcctctcagaacttactagagtcatcgtgtcatcgtctcccattactccaggagagcagggccctggtggcacttgaggcaagaccccaagctgatggcactcgaccacatagtgggagtgaattttaaagaaaatccccctcaaagcctctgctggtgtagaaggcagatagtctaggccggggtagggccagtgagtgggagccagggaaggaggcttgggtgtcatgagactgggtttacatttacagatgacaaaaccaagacccagtgagggggaggatgtgtgcaggccacaggacaagtctgagcagaaccatggccacgcccaacgttcctccactagcattccctcatgaaagatcactttttccaggccaaggaccagaaaaggaccaggctttaggaagagggccgaggtgcatggaaagcagtgctggtgaggagagggttgagtaactggattttgactgtttcttcgcatttggttctcactaatgaaatcttgtcagacgtgcccctgctgctggattgggtgggggtgggacagaagcatgtgtggtcaaaggcaagtttatttgcagtttgggggttgaatgcagtggatttcaaactggatattttgaggagttccatgagggtccaccaaggtataccagggtcctcgccctgatgcaaccagagtagttcttcatcgactttatacagtgggactctgaagaaaagaaaaaggaaaaccccatagcttagtgggaatccgggcgaattaaaacacaggatgaagtgcttgttctctttggctcttggagcataatgtatgtccttttcctacttggtttgcgtgtaataacatcattggtatatttcaaaatatgaagctcctggtgctggataataaatgttttcccagtttttcaacctct

SEQ ID NO: 382848 - DNA, 961 bp, Homo sapiens
  misc_feature (942)..(942): n is a, c, g, or t
  misc_feature (945)..(946): n is a, c, g, or t
gccttcagggccgtgccccatgctgctcctctttttgtccccacatccagcagttttccattaaaccactgtaggtcctctcagaacttactagagtcatcgtgtcatcgtctcccattactccaggagagcagggccctggtggcacttgaggcaagaccccaagctgatggcactcgaccacatagtgggagtgaattttaaagaaaatccccctcaaagcctctgctggtgtagaaggcagatagtctaggccggggtagggccagtgagtgggagccagggaaggaggcttgggtgtcatgagactgggtttacatttacagatgacaaaaccaagacccagtgagggggaggatgtgtgcaggccacaggacaagtctgagcagaaccatggccacgcccaacgttcctccactagcattccctcatgaaagatcactttttccaggccaaggaccagaaaaggaccaggctttaggaagagggccgaggtgcatggaaagcagtgctggtgaggagagggttgagtaactggattttgactgtttcttcgcatttggttctcactaatgaaatcttgtcagacgtgcccctgctgctggattgggtgggggtgggacagaagcatgtgtggtcaaaggcaagtttatttgcagtttgggggttgaatgcagtggatttcaaactggatattttgaggagttccatgagggtccaccaaggtataccagggtcctcgccctgatgcaaccagagtagttcttcatcgactttatacagtgggactctgaagaaaagaaaaaggaaaaccccatagcttagtgggaatccgggcgaattaaaacacaggatgaagtgcttgttctctttggctcttggagcataatgtatgtccttttcctacttggcagcagatatggggatcctatagagtcgggntgnnggcaaggggttcaaa

SEQ ID NO: 382849 - DNA, 735 bp, Homo sapiens
gaaatcatgcacaaaactggccttaggagaacagtgtctatgttgtgctgccctatcaagtaccggaggaaacgccactacagtctcaccagtttcacttgacgtgcccccccaactctcccagaaagcccaacacttcagccacagtccatgtgtcgagaaacagagtcactacattattcttttctgagtcaagccttatgagggtgcctggtaggcagagtctaattacatgcctacatcttagctgcaagagaggctgggaatttgtgttttgatatctacaataggaagacagaactcatgatgtgggattttcccaaatagtgaaatatttttcaaaagatgggctgttaagaatataacagatacccagtacacaacccagatctatttcagtatttgttttttgttgttgttgttttggagacagagtctcgctctatcccccaggctggatggagtgcagcggcacaatctcggctcactgcaacctccacctcccatgttcaagtgattctcatgcctcagcctcctgagtagctgggattacaggcacctgccaccacatctggctaatttttctatttttagtagcgatggggtttcgccatgttggcctggctggtcttgaactcctgacctcaggtgatctgtgcacctcagcctcccaaagtgctaggattacaggcatgagtcactgcacctggcatatattagtatttgaaatttggt

SEQ ID NO: 382850 - DNA, 442 bp, Homo sapiens
aaaaaatgatgaatttttaaataattttaaaagacaacttgtaagcatactagtctcatttatgaccattaagtaagcaatgaacaaataaaattagaaaagcttattatttcaccttaaatgtcttatagtcaatgtatatatttcaggaatattgcaccaatctcactttcactaaatttgaactaaggcataaaggacatctaaaatttgaatgttgtatggttaattaacatttaataaacttattttctttgtttaaatgtctttgaaaatcaaatgtctcatgctgtttttcctcatcaatgtaatcccagtagtcctaggaatgattttgttgaattgtttgacaaaacctaacttggctgcttgtaatttatagttgttcacccccgtcactttgcagtttttccctactaaaaaatttagatttctgtgaagc

SEQ ID NO: 382851 - DNA, 452 bp, Homo sapiens
ctaaagatggacatactttaggaggaatatgtggctttcctcagctctttctttctttactcaaggctgtccagtgggagcagaactagcttatgacttgcagtattgtgttgcagtgtaattttataaacattctggaactatttcttctagagtaatttatgatatttcatgtcctgtgcagaaaaagaaatccacagctgggcaattacatactggttgtactgtatgtttttaacaggcatctttcctaacataaaatgcaagaatactagtcttgtttttttgtctcctgattttgtaaataagcaaaacaaaattgccaaaaagcttattccaggggaaaaatatgtgttaaaaattgatagattatcacccttccacgtggagctttctattgttatccatccatgtgattaaaaaaaatctttattgtagttttactagagaat

SEQ ID NO: 382852 - DNA, 322 bp, Homo sapiens
gatggcgttattggcttacccactactttaatactgttttggtacaactaaaatttttgcaatggagtacacgatgaaattgcttcatgctaaccttccccctcaccaaataatggtgactgctaaaagtccttacaactgcagactaggtaattgaataatttgtatatcaaattaaggtccaaatgatgcttttaatagcacaattactcataataaggaaaaggtcagcattcactagtaattatctattctctataatttttaaaacatgaaaaaaaaaatgctgtgaccagcatatccaaaggggaaaaggcactgt

SEQ ID NO: 382853 - DNA, 432 bp, Homo sapiens
tttttttttaaagttttttctcagtgaaaatatacacattctataataaaaaagagcatttatcttaaatataaataaaatactctacaaattattaattactagtattatcttaacccagtaaaggctctattgctcttactttctgtgttgaataaagtattatagtcactacttagaaactccatgttttatctatgactgatactgcttcattcagctactgagcaaacaggcacagtgtcctgttccccatttagatcagtggtctccaacctttctgacaccagggaccagttttatggaaggcaatttttccacggatgggagggtaggggatagttttaggaagacaagcacattacatttattatggcactttatttgtattattattacattgtattatataatgaaataatcctatagctc

SEQ ID NO: 382854 - DNA, 464 bp, Homo sapiens
tacttttctggttaccagttcaaaaagaaaaaaaaatttatgacattatggcttaaatttacctttttcatgaagcaccacttcacgattatgaagggttgaaaatagcccttttaactcccgtgctgtttactgtccctgccaaacattagacatttactgcttatgtagttaattgtctttattgtataccatcaagattaggaaacatgggccgggcccggcagatcacgaggtcaggagatcgagaccatcctggctaacacggtgaaactccgtctctactaaaaatacaaaaaatttagctgggcgaggtggtgggtgcctgtagtcccagctactctggaggctgaggcaggagaatggtgtgaacccgggaggtggagcttgcagtgagctgagattgtatcactgcactccagcctgggtgacagagtgagaatctgtccccccagcccccccaa

SEQ ID NO: 382855 - DNA, 395 bp, Homo sapiens
gcctgtaatctcaattatttgggaggctgaagcgggtagattacttgatgtcagcagttcaacatcagcttggcgaacatggtgaaataccgtctctactcgcttcagcctcccaaagtgctgggtcacaggcatgagccatcccacgaagcctatcattttttccttttattttatttttttttgagatggagcctgggcaacaagagggaaactctgtctcaaagaaaaaaaaaaaagaaacgaaaatactatgtaggaaatatgtagtaaaaacatgcacaggaatgacaaatgccaaattcaaaaatgttgtgacctctgtggagaaaaggtgaggaatgagttaatgtgtgaatgtatgggtacatgctttctattaacttagtaggaga

SEQ ID NO: 382856 - DNA, 460 bp, Homo sapiens
taacaatatatggtaatactttaaactctgaatggaaaatctcagcctcacttcataggattctaattttcatgtcactaaaaacattatgctaaaaagttaaataaggtgattagaaatccactttgcagaccataacctctttacattaatgggaaaaaagaaagcattaaatgagaagaaagaaaaggcaagttgcagattaatatgtattttatgaacccatatgtatttttaaagatgagagaatatcttcctgatcgttaagtagggaagagtcttcagccagcactgattataaaggaatagatcaaacacataccctatgacccagcaattctccttgtagctaactatgtttacaaatagacataaatagacacgggaactaagagacatgtacaaggctgttcacagcagcataactcataatagcaaaaaagtagaaacccagatattc

SEQ ID NO: 382857 - DNA, 287 bp, Homo sapiens
ctacttatactcgatgtgggaaaaatgggaaatgttagggggttcataaacagaaatccttgcaggaagccgggtgtgacagcagacacctataatcccagctacttgggagactgagctgagaggcccacttgaggccaggaatttaaggaccagcctgggcaacatagaccttatctctaaaacaaaaaaaaatccttgcaagaagagagaataattgcttcccatttggaaatgatatagggacttttgaattagatctatcttgacaaagttttctaggccat

SEQ ID NO: 382858 - DNA, 479 bp, Homo sapiens
gtaccctaattgtaaaagaagtgtggtcctattttttttcagtgacaattttacttctgtttacttctgtctactatagtaaccatgtaacacaatttgttcagggtccttttatagctgctgggaacctttgccaagaaagttgcaccaaaatataagtatagacagggaagctaggtttaggtatattagccattggtttgttatgggttcaaataaggataggtagttgaaaattatttgaatgtctgtattctgtttagaattggagtgattttgaacatgataatttaatttgaactaggtcatttctgatgttaataataagttgtcttctctaggtttctgcattctccttattaattcttgagcttcttaatttctaggatgtgttttctccctgtgtccttccctaatcttacacctgttgctcctcaatttgtgtgtatgcacatgtacatgtaaggatttttctgatg

SEQ ID NO: 382859 - DNA, 411 bp, Homo sapiens
atgttttcactaacacaacacatgagcttccatttttgctgtgtccaatagcagttttctactgccattttggcttctgttaactgtttatctgccattcttctaagctttactaatagtctctgtgatgattttttatcctctgtccattgtgcggtcccaaagtcagtaccacatggttagaacagccaatcacatggccgaacccagagccaatgcagaaggcaagtaggcaagaatgtgggtattgggaggtgtgatttattacgggacatgagtggaacaatctaccatatgacctatgtcaacaggtaccctttctattaagtagtaagaagtaggagtcttaaaagaagattctagaaaaggagagtctttagaaggaagacagttttgaggaattataaagat

SEQ ID NO: 382860 - DNA, 707 bp, Homo sapiens
agatgtgacattacggtcatcctgaacctaggcctcaaggagccttgctgtttctgctcactctccaggaaccctgcctacgccatgaggacaggcccaggctagccttcggatgatgagagacctgtggccctgctaagcagcagacgtgagagatgccatcttggagctgctagctgtggtccacccatcagcgcctgcaggcacatgctgagattagtcgatttcctaaaagttgaaggaaaaatcacccagctgacctgtttgggttatgattttaactcactaagctttggggagctttattacacagcagaagctaactggtgtattactattattactattattctaagaaccaaataccaggcaaacctctaggaggaaaattgtaatgaaagtcacctcattgatttgtggccgggctcagtggctcacgcctgtaatctctgcactttgggaggcagaggtgggtggatcatgaggtcaggagatcgagaccaccctggccaacatggtgaaacctcgtctctactaaaaatacaaaaattagccaagcatggtggcaggcgcctgtagtcccagctactcgggaggctgaggcaggagaatcgcttgaacccaggaggcggaggttgcagtgagcccagattgcgccactgcactccagcctggcgacagagcgagactccatctcaaaaaaaaaa

SEQ ID NO: 382861 - DNA, 3525 bp, Homo sapiens
  misc_feature (2475)..(2475): n is a, c, g, or t
ccgacagccgcgggtgcgtggtcgtgcggcaagtgagcgatttggtgaacagacactcccttctgtagccatggattgttacagaacttcactaagcagttcctggatttaccccactgtgatcctctgcttatttggttttttctccatgatgagaccctcagaaccattccttatcccatatttatctggaccagataaaaacctgaccagtgcagagataacaaatgagatcttccccgtttggacatactcctacctggtgctgctgctgcctgtgtttgtcctcaccgattatgtccgctacaagccagtcatcatcttgcaaggtatcagtttcatcattacctggctgctgctgttgtttggccaaggagtgaagaccatgcaggttgtagagttcttctatgggatggtcaccgccgccgaggtggcctactacgcctacatatacagcgtggtcagccccgagcactaccagagagtgagcggctactgcaggagcgtcacgctggccgcctacacagcagggtcggtgctggctcaactcttggtatccctggcgaacatgtcgtacttttacctcaacgtcatatccttggcctctgtctccgtggctttccttttctcacttttcctaccaatgcccaagaaaagcatgttttttcatgcaaaacccagcagagaaataaagaagtcatcaagcgtgaatccagtattagaggaaactcacgaaggtgaagcaccaggctgtgaagagcagaaacccacatcagaaatactcagcacttcagggaagctgaataagggccagctgaacagcctgaaaccaagcaatgtgactgtggacgtttttgtgcagtggttccaagatttgaaggagtgctactcctcaaaacgtcttttctactggtctctatggtgggctttcgccacagcaggttttaaccaggttttgaactatgttcaaatcctgtgggattacaaggcgccatcccaagattcttccatctataatggggccgtagaagctattgcaacctttggaggggctgtggctgcctttgcagtgggttatgtgaaagtcaactgggaccttctgggagagctggctctggtggtcttctcagttgtcaatgccggttctttatttctcatgcattacacagccaatatctgggcgtgctatgctggctatttgatattcaagtccagctatatgcttcttataaccatagcagtatttcagattgcagttaatctgaatgtggaacgctatgccttggtatttggaatcaacacctttattgccttggtgattcagaccatcatgactgtgattgtagtagatcagagagggctcaacttgccagtcagcattcagtttttagtttatgggagctattttgcagtaattgctggaattttcctaatgagaagcatgtatattacctactcaaccaaatcccagaaggatgtacagagccctgctccaagtgagaatccagatgtgtctcacccagaggaagagagtaatatcatcatgtcaacaaaactctaacctcatcgcaacaaacgcaacagtggctttcaaagttatgcaataataaggaaagattttgagatgggtggcatatgttttgccataacttgacatgctttgcaaatctggattccaatggacctttcaaaaccacaacaaaacctcagttttagatgagttctctatgtgaccaattttactggatgcaattgacaggacccgtcatcataattaaacaacccatattggggaccccctgtgactagtagcagctggaaaattctggtttttatcacttgtaaagacatgcagatggcgtggaaccaaaccatgagaaaactccagccatcctggagttgatattcaccatttgtgaggagaaatactaactggactgaccctattgctaggcttaaatacttatttgatcttaccaaagaagtcaacacatgggacctttgtgtcacatgaaccattttctttcctcttctattaagtgtatttctgtttaagttacagttctctaagagaattacaatgtttgtcccatttctaagggcttctcttcaactctaataacagcattattcacgttatgatttgatagtattattatttaatttttttatgattattttccattttgtgctctgagttttgctgttgaaagtctccctcaagaatagcttcagatcctcttgtgtatttgcagaatacacaaggtcatttcccagtggcctgggagaggcagtgagccttctctccaccaccatagacaggtgttaatgcatctatgggccaggtgcagtggctcactcctgtaatccgagcaatttgggaggccaaggtgggagttttgcttgaggccagaggttcaagaccagcctgggcaacacagtgacacctgactctactaaaaaattaaaaaattngctgggcagcgtggtgtgtgcctgtagtctcagctacttgggaggccatggtgggaggatgggttgagcacaggagtcagaggctggagtgcaatggcgtgatcttggctcactgcagacttcacctcctgagttcaagccattctcctacctcagcctcccaagtagctgggactatgggtgcacaccaccacgcctggctaatttttgtatttttagtggagatggggtttcacaatgttggccaggctggtctcaaactcctgacttcaggtgatctgtctgcctcggcctcccaaagagctgagattacaggcgtgagccaccatgcctggccaaaacacctgatttttaaatggtagcaattgtgctaaataaaatgtgtaaaaattttaaagagttgttaacattttttgatgaattctgctgaaaattatctgaacatacctgtttttcgaaacttcaagaaacttcaataagggatgcattgagcagtctgacagtgagaataaagaatgctgagtcaagatttatattaaggctggaagctgtggctcacacctgtaatcccagcattttgggaggctgaagtgagaggttaatttgagggtaggggtatgagaccatcttggccaatatagcaagaccctgtgtctaaaacaaacaaaaaaatttttaattggattttgatatggtttggatctgtgtccccaccaaatctcacgttgaagtgtaatccccaatgttagaggtggggccggctgggaggcgactggatcatgggtgtgaagccttcatgaatggtttggcaccgtcccctcagtgctggtctcatgacagtgagttatcgtgagatctggtagtttaaaagtgtgtagcacctccccactctctctttctcctgctttggccacgtgaagatgcctgctcccactttgccttctgccatgagtaaaaattccctgaggactccctagaagcagatgttgccacgcttcctatatagcctgtgagctaattaaaccccttttcttacaaactatctagtct

SEQ ID NO: 382862 - DNA, 472 bp, Homo sapiens
tacagtgagctatgattgcaccattgcactccagcctgggcaacagagtaagactctcatccccctcctcccaaaaaagagcacctgtgtggtgtctgtctaaaataggaaaacttaaaggaggtttctagaagtattagaaataagaaaacactgatggggggagtggaataaaacacctgattttgttttgttttggtttttgagacagtctcgctctctcacccaggctggagtgcaatggcgtgatcttggctcactgcagacttcacctcctgagttcaagccattctcctacctcagcctcccaagtagctgggactatgggtgcacaccaccacgcctggctaatttttgtatttttagtggagatggggttctatatttaatcttcttctgtcttttcttctttctctttctcgatgatctttttttatatctttctatctcacttttactcactctttttact

SEQ ID NO: 382863 - DNA, 265 bp, Homo sapiens
tacagtgagctatgattgcaccattgcactccagcctgggcaacagagtaagactctcatccccctcctcccaaaaaagagcacctgtgtggtgtctgtctaaaataggaaaacttaaaggaggtttctagaagtattagaaataagaaaacactgatggggggagtggaataaaacacctgattttgttttgttttggtttttgagacacctgtcttgaacaaacaaaccaacaatcaaacaaataaataaacaactgaaactc

SEQ ID NO: 382864 - DNA, 1197 bp, Homo sapiens
tacagtgagctatgattgcaccattgcactccagcctgggcaacagagtaagactctcatccccctcctcccaaaaaagagcacctgtgtggtgtctgtctaaaataggaaaacttaaaggaggtttctagaagtattagaaataagaaaacactgatggggggagtggaataaaacacctgattttgttttgttttggtttttgagacagtctcgctctctcacccaggctggagtgcaatggcgtgatcttggctcactgcagacttcacctcctgagttcaagccattctcctacctcagcctcccaagtagctgggactatgggtgcacaccaccacgcctggctaatttttgtatttttagtggagatggggtttcacaatgttggccaggctggtctcaaactcctgacttcaggtgatctgtctgcctcggcctcccaaagagctgagattacaggcgtgagccaccatgcctggccaaaacacctgatttttaaatggtagcaattgtgctaaataaaatgtgtaaaaattttaaagagttgttaacattttttgatgaattctgctgaaaattatctgaacatacctgtttttcgaaacttcaagaaacttcaataagggatgcattgagcagtctgacagtgagaataaagaatgctgagtcaagatttatattaaggctggaagctgtggctcacacctgtaatcccagcattttgggaggctgaagtgagaggttaatttgagggtaggggtatgagaccatcttggccaatatagcaagaccctgtgtctaaaacaaacaaaaaaatttttaattggattttgatatggtttggatctgtgtccccaccaaatctcacgttgaagtgtaatccccaatgttagaggtggggccggctgggaggcgactggatcatgggtgtgaagccttcatgaatggtttggcaccgtcccctcagtgctggtctcatgacagtgagttatcgtgagatctggtagtttaaaagtgtgtagcacctccccactctctctttctcctgctttggccacgtgaagatgcctgctcccactttgccttctgccatgagtaaaaattccctgaggactccctagaagcagatgttgccacgcttcctatatagcctgtgagctaattaaaccccttttcttacaaactatctagtct

SEQ ID NO: 382865 - DNA, 364 bp, Homo sapiens
tttggttttttctccatgatgagaccctcagaaccattccttatcccatatttatctggaccagataaaaacctgaccagtgcagaggtaagttaacatacatacatatcttaatgtggttttttaaattttatgggacttgaacaaggatacagggcttccctcaacttgatataagatgaacacattaaactcagtgagcctgattttcataatatgtgtcccatatagaacttttcaaactatttcctcttcttacttgcaaaaaattgcagccaaaacatattacatgtgttaacaaatttttaacttgcatagagtcctaacatttgtgttaatgataggagactttcaggtctccgtt

SEQ ID NO: 382866 - DNA, 369 bp, Homo sapiens
gcgggtgcgtggtcgtgcggcaagtgagcgatttggtgaacagacactcccttctgtaggtaagaatatctcggggggcgaattaattgaagaagcaccgtcatccctcggtcttagcagtgtcgcctctctcttcccgggtttggagagctgggggcgggttcctggctctgcgggcctgggctacactctgagccgcgtgaggagctctccccctacgccgcagcccgcgtgctgggattcacccaagtgggtttgtctggaattcccatttgcagccttctggaagcgcagattaaataaaatcatgattcccgtaaagtgccagcacctcctatggttacatcccacgttcacagattttaactg

SEQ ID NO: 382867 - DNA, 769 bp, Homo sapiens
tagaattttgctgactaatattcctttgactagtttgaataacattggatcaactcagatgatggcattcttatgttttgattagtgtatacatggtgtacattttttcttttacttttcacttatctgttcttttatttaaaataggctttttgtagacagcatattgtcgaaccttgcctttaaaaaaattgaatccgacaatatctgtctcttttttttttttccttgagactgggcctcggtctgtcccaggctagagtgcagtggtgtgatctcatggctcactgcagctttgacctcccaggctcaagtgattctcctgcctcagcccgtcaagtcgctggagctacaggcacatgccaccacgcctggctaatttttgtattttttgtagagacggggtttcaccatcttgcccaggctggtcttgaactcctgagctcaagctgtctgcttggcttggcctcccaaagtgctgagattataggtgtgagccaccactcccaccccagtatctgtcttttaattgctgtttagaccagggaccaacagactttttaaataaaggaccaaatggtacatggttacaggtcatgcttgtatgtcatgcagacattcaactatgctgtaacatgaaagctgctgtacagtatgcaaatgaaccagtatgtctgtattccaagaacactttataaaaataggcatgggccagatatggctccaggactctagtttcctaaccttggcttagtgtaatatgatcact

SEQ ID NO: 382868 - DNA, 480 bp, Homo sapiens
gctgactcctttctcggactcagcccacctgcacccaggtgaaataaacagccctgttgctcacacaaagcctgttggtggtctcttcacaaggatgcgtgtgacatttggtgccaaaacccaggacaggaggactccttcaggagaccagtcccctgtcttcgccctcactccgtgacctcaggtcctcagaccaaccagcccaaggaacatctcaccaatttcaaattgggtaagcagtcttttcactcttctcatgcctctcttgctacccttcaatcttcctctcttgctacccttcaatctccctgtccttccaattccaattctttttcctctctagtagagacaaggagacggccaggtgcggtggctcacgcctgcaatcccagctctcagggaggctaagaggcgggaggatagcttgagcccaggagttcgagacctgcctgggcaatatagcgagaccccgttctccag

SEQ ID NO: 382869 - DNA, 786 bp, Homo sapiens
gctgactcctttctcggactcagcccacctgcacccaggtgaaataaacagccctgttgctcacacaaagcctgttggtggtctcttcacaaggatgcgtgtgacatttggtgccaaaacccaggacaggaggactccttcaggagaccagtcccctgtcttcgccctcactccgtgacctcaggtcctcagaccaaccagcccaaggaacatctcaccaatttcaaattgggaccccactggaaatcagactgtccaactcacccagcagccactcccagagcccctggaactctggcccaaggctctctgactgactccttcccagatcgtctcagcttagcggctgaagactgacactgcccgatcgcctcggaagcctacaggaccatcacagatgctctggataactcttacagtggagggttaagacccaaactggttcaattggcatctgacgccctttgcaaatggctctactctccttcatcaatccatcacccaaagacagcctgatctaaaaggatagattcttcacacatgccatccgcactcctgccttcatatgaagttactcctactttttggccacctctccttcgaagcccagcctcaactcccacctcctccttcatgaagccctccccagccacataagttctcagtagtcatttctctgaattttgagtgtcttcctgtctatataatgtgtctggcactttaagaaacattagactgttttggaaaatgccttgggctttggaataaaatagagctggtgatgtt

SEQ ID NO: 382870 - DNA, 279 bp, Homo sapiens
ccctgaacttggaactcagtacatctaaattaggacccaagaactgcattttcaaaaggccctgctggtgactcagatgcagatcttccaagggttacatctggagcattggcatggggccaagaatacaggcttgaaatcagaaagacctgaatgcaaattttgactctgcaaatttttacctatgcagcacacaacaaactactcctttaatcactgaaaaactactaatacctactacaggctatgcactttacttttctaagcctctatttcctt

SEQ ID NO: 382871 - DNA, 237 bp, Homo sapiens
ggtcactgatacaaacactacagattttacctggttcactatcaatactgttatgctctagcgctgggtggaaagattgtcagtctgctctttggttaaatcatgtattcaggcgggcgtggtggctcttgcctgtaatcctagcactttgggaggccgaggcaggcggatcacctgaggtcaggagttgaagaccagcctggccaacatggtgaaaccccatgtctactaaaatac

SEQ ID NO: 382872 - DNA, 481 bp, Homo sapiens
gtcacatgaccgtcatactacttgcttacccaggttatgccgttgatcttaagtctactttatccaggaactttctctccttctttggggtcctttacttggtattgattgccttttgggacatagaaatactgttgcaggtaatgatgccttcaatttcaaattgcagtacttttagttctaagtaacttggcccttttagacagaaactgctgtgctgagggagtcccagccctctaatccaagcaggggacagtcccacaagtgaccttgacttctgcaaagaacttagtttttcctgcggataatttaaagctgacagcatctgaaggaaaggaaagccttaggatggttttggcttgctgtatgtaatttttttttttttttgagacaggatattgctctgtcactcaagctggagtcttgtggtgtgaccaaggctccctgcagcctccacctcctgggctcaagcaatcctccc

SEQ ID NO: 382873 - DNA, 543 bp, Homo sapiens
aaaggaaaacctagggactgacataattcaagttttccgaagttagtaaaaggccctgaaaagagtgcaaatgagtgacaactcctggaggtcgggtccagcctctgaaattaacatgcaagagcccaaggccaggcaaccaaaatgtgaaacagactctgcccggggttcctttcactgtcaaactcctagccaaaagaggcttcccacatcagatattttaaatattaaaatttaaaaagttattcacatctattcacctctcccttgaaaaacaaatgaataaatagcccctatttgcgtctttactcccacactaaacctcacaccgttgatgagcctggagggctaggttggcacgagaggatggcgccaaagctcggggagagggcggtcagtgggcggaaggtgcctcttcccacatggccgagccctcgccgccactggccaccggcacacggtccccaagcatcgggagctccctctcggccctgaccccgcggtctctgtcgccccgcaaacggccgctgcggccgcaggctc

SEQ ID NO: 382874 - DNA, 796 bp, Homo sapiens
gctgttatattggagtgggctcccaaaggcccctgttgtggatatttagttgctggattgtggggagtttcaggtgctgcagcccagcagctgtttattagccaattaagtatgtcagtattttgcacctgatacagccgtattgtacataccagttaaatatcagcctaccttgtaacatcacgtggagagactctagagcaggttaggttggggtgtgaggtgatagcagagaaggaaagaccctgggcttttgagccacctcatggtttttaccccatctggctgaatctacaggcccatctcaagtagagaggccagactataaaagatagttggtttccacagtttttcttgatcttgagaaaagacaaaaaaataaaaataaaaaagaagaaaagacagccagggaagtgactctcagaaacccaggaaccttataagctaagctgcttctcattcttctccttcactggggatggaattgtctccctcatacctgccttcggatccgagcctatagcttgggagggcctgtcacgcacacagtcgaaaaggctggaagttacttccaatggataggggcccaaattgtaggtaacagcccattttattttaggttggcagagaatggagacatagttgagagatcacatttgacatcagagggcttttatgtccattgtgactcctctggactccccgtatgacagtcagcatgccatttgtatccctacttctggggctgtggcagtacagagttgtgcccagtaggccaacagcatcacctagaaaa

SEQ ID NO: 382875 - DNA, 451 bp, Homo sapiens
ggtgagtgcccagctctgaccaggggctcagtaaatgtcagctctgggttattgcattgacccatctggtgctggggccacactgagtggatgtcagggagacaggctatgggggagggaactcctttgcaattgtccctgctttcagtactgatgggggcacctctggagacctctcccttgatttcattacttctacttcctctcctaactggattagatggcagtctatgaaatccagggcatagagattggctttctgcctggaaatgagcagaaatgtcattataggtcctgaatcagcatctcaccacagccccaggggccacctggtcaatgggaaggtggtctttgccctgtatttatgctttccttcattctctcctgcattcatccatccattcatccacccactcattcatccatccatccaatatgcattttgtagctc

SEQ ID NO: 382876 - DNA, 457 bp, Homo sapiens
aatacttcaggaaccaccagctcccaacagttcgcagttccaatattagcttgcgctacattcctttgatctttctgaagttgggtttttagcggttgctgtgataaaagcaggtagagctcaaatcaatgtggagcaggatatgagggagaggtatctccaatttcaaggttggaggacttatgcagcatccaacaggtacttactcacattaataggtaattttcctttcacttttcatatatatttggtcaagcatctaaaagtttaagacataaaaccttaataaattgtttgacaaaaataaaaataaaaataaattgtttggcgctaactgcttaataaaagtcgtgacagtctcgctgagtgtatgcgggggattggtgccaggaccaccagcaaataaccaaatcctcgtactcaatcctgcagtcagccctgcagaacctccctatac

SEQ ID NO: 382877 - DNA, 1803 bp, Homo sapiens
gagaatcgagcgcagcctgtgctggttgtgtaagccgtgggacacacgggaaagccaggaagaagaggaagagcacccccacaccccacccgcgtgaagaagagcaaccccactccccgcccgtgggaagaagagcaccctcacgccgggcccgcaggaagaagagcacccccacgcccggcccgcagcatcccgctggcttcctggccacctctcctcacccatcttagaggcatggcgggctggggcatctttccctccttgggcaggatgaaacaggcgcctatttaatcgacagagaccccacctactttgggcctgtgctgaactacctgagacacggcaagctggtgattaacaaagacctcgcggaggaagatgataccacgagtcaacccaaaagttgctggggagaagtttctctttaatgaattgcatctcatgaatgtatcaggctgtgacctttctgcactctctaatgagttcatgaatttaggccaattatggccacaaatgctgctgctgtcacagagagatgccggataaagaacacccaccaccagtctctgaacagggaggggagaatcaactctgaatgtgatgtagtggccaggagagaggaccatgttcaacaacgccacacagatgcaaatgacttgtttcttcaacaaactgcaagggaaaaaataaaaatgggggaagctacagattaaaatacatgtgtttggataggagagtatttaatggcaaaagaaaaagaaaaaatttaaaaatgaaattgtgcaaaacttatttgaatcctgttcaagtgagcaacaaaacattatgatgtacatgagacaactggaaatataactctgactggacactttgagatattaagcaattaccgttcatttttacatatcaaacagtatggtattgtggttacgcttttaaaaagatttgtattttagcgacacatactggaatttttacagggaaaacccactgaggatgctgggcatcaggtcactagcaccgagtgaattttttacaataagcagtaattctccccagccccatgcatcatagccaatcctaaatgaatgccaatctggaaaagaccaaaataaaccacgtgaagatgggaagagctgctcttggtgatgggagaatggggactctctcttttattgtgcaaactccactttccatcatgcaggaaaatccgtcttgaaggcagctcctctctgtgccgggggtgggtgatccagcctaagctagaatggcggcaagctcaaggcagctgtggccctcaggagagcgtctggagtccacagcacagtgggaagcgcaacggcagctagtctgagggtctggacgatggccatgcacagatgaggacagaggagccactgtagtgactgaagcccacggcatccaccctctccagccagccccgcccacacctgaagcccacagcgtccaccctgtccacccagccctgcccacacctgtggccttcctctccttcctgtttggtgagtgctgcctccacacctggctgcatgccagaaaggcctgcacaggtcagaacacaggtttccaaaccctactccaagtctgaacctccaaggacaccccgagctccccaaggttcttgcatagagggcacaggccagagacagcccaggtgggaagcttactctgagtcagctgccctcaccaagatacatccacaggctcctgtacaaggagaggaggcagaagtccctctctgccaggaggtcctcctcaatctcccaagcccacaccactgcc

SEQ ID NO: 382878 - DNA, 1844 bp, Homo sapiens
tttcattttttcactatggaggctgccaccaagacccagctgtgtctctcaaagaccctcatgcctgctggacgcctcctccctcccacacccgcaccctccagggcctccctgcgctctgggggacgtgtcccactgcagctggtgtgtggccgagcaacccgaaggccgggctgcctgccctccaccccgacgggggacagcaccaaggaagcctgggctctgtgcacacggcagccacgctttcctcactcaatagtttttcccaaagaaacgatcaggctgggcatggtgtgaggaagggtaataacttttttaatgaattaatcatcattggaagagaatggagaaccaatgtgtggttttcaaaaatggcatgaaaaggggaaagaagcatttatcctacttttcttttacagatgataccacgagtcaacccaaaagttgctggggagaagtttctctttaatgaattgcatctcatgaatgtatcaggctgtgacctttctgcactctctaatgagttcatgaatttaggccaattatggccacaaatgctgctgctgtcacagagagatgccggataaagaacacccaccaccagtctctgaacagggaggggagaatcaactctgaatgtgatgtagtggccaggagagaggaccatgttcaacaacgccacacagatgcaaatgacttgtttcttcaacaaactgcaagggaaaaaataaaaatgggggaagctacagattaaaatacatgtgtttggataggagagtatttaatggcaaaagaaaaagaaaaaatttaaaaatgaaattgtgcaaaacttatttgaatcctgttcaagtgagcaacaaaacattatgatgtacatgagacaactggaaatataactctgactggacactttgagatattaagcaattaccgttcatttttacatatcaaacagtatggtattgtggttacgcttttaaaaagatttgtattttagcgacacatactggaatttttacagggaaaacccactgaggatgctgggcatcaggtcactagcaccgagtgaattttttacaataagcagtaattctccccagccccatgcatcatagccaatcctaaatgaatgccaatctggaaaagaccaaaataaaccacgtgaagatgggaagagctgctcttggtgatgggagaatggggactctctcttttattgtgcaaactccactttccatcatgcaggaaaatccgtcttgaaggcagctcctctctgtgccgggggtgggtgatccagcctaagctagaatggcggcaagctcaaggcagctgtggccctcaggagagcgtctggagtccacagcacagtgggaagcgcaacggcagctagtctgagggtctggacgatggccatgcacagatgaggacagaggagccactgtagtgactgaagcccacggcatccaccctctccagccagccccgcccacacctgaagcccacagcgtccaccctgtccacccagccctgcccacacctgtggccttcctctccttcctgtttggtgagtgctgcctccacacctggctgcatgccagaaaggcctgcacaggtcagaacacaggtttccaaaccctactccaagtctgaacctccaaggacaccccgagctccccaaggttcttgcatagagggcacaggccagagacagcccaggtgggaagcttactctgagtcagctgccctcaccaagatacatccacaggctcctgtacaaggagaggaggcagaagtccctctctgccaggaggtcctcctcaatctcccaagcccacaccactgcc

SEQ ID NO: 382879 - DNA, 259 bp, Homo sapiens
tttattaaaatcttacagaatatgtgtttggtggaatacagttttggaaagagtgaatctttatcccaaaggaatggacatcaaatagagtaattccagatgaagataatgttactattaccttcatctgaaattccagatgaaggtagtaatcactatttcctgtgtgtctgcataaggatagctctaatccgcagtggaactctaaaatagggaggaaggaagaattctgcattctttcttccactttgaatcctct

SEQ ID NO: 382880 - DNA, 227 bp, Homo sapiens
tgcattcttgcctctttgacaagttctgcttctttacaaaggactttgcaagtacttcacccagaccatctcacctgtaccgaaataacctcccctactagcgaatgagcaactttggagcagaaagcagaaactgcatcatatttctcttactatgcaaactggtagctcaaacctcatatgacctcaaaaaactataattgcttcaacctaaaaaagctgattgt

SEQ ID NO: 382881 - DNA, 399 bp, Homo sapiens
actacggcaatacaaaacccctttctcattacaaagcggactgtgggcaaggcagcccggggtctggccagagcaagccagccctgatggcttatcttccccagcagctgtcccatataagtcacgagcagaactccctgtttctgatgaagccaaagccaggaaatatgcctttccgatcactggttccacctggccaggagcagaacccttccagtgtccctgtgcaagcccaggctaccagtgttgggacccagccgcctgccgtgtccgtggccagctcccacaacagctccccctatctcagcagccagcaacaggccgctgtaatgaagcagcactaaaagcactctgagtcaagatgagtgggaaaccatctcaataaacacattttggata

SEQ ID NO: 382882 - DNA, 338 bp, Homo sapiens
  misc_feature (23)..(23): n is a, c, g, or t
  misc_feature (44)..(44): n is a, c, g, or t
  misc_feature (150)..(150): n is a, c, g, or t
ctgagtaagcatactgtagtacnaagagcttagtagtagttttngtaatataccttaaagatcttcaaacagttgatcttttttcagaatgttggaaaatcctgtaaatgcaaatagtcaatactgtattaaatacgtgcacttggagtngtgtcgcttgtacagttgtaaataatcagaacatatgaaaaaggtaccctacagagaaaattctgatacagattattgatatattataaatgttgctgttgagcgggatgtagataaactgaagcagcactaaaagcactctgagtcaagatgagtgggaaaccatctcaataaacacattttggata

SEQ ID NO: 382883 - DNA, 393 bp, Homo sapiens
aacgaaagcacttattctatgaaataccctggatctttaagcagtactgttcattcagaaaattctcataaagagaatagtaagaaagagatcctcccagtatcttcctgtgaaagtagtatttttgattatgaagaagatattccatctgttacaagacaagtaccaagtagaaaatatacaaacattagaaaaatcgaaaaggattccccttttatacatatgcaccgtcaccctaacgagaatacattgggcaaaaattctttcaacttttctgacttaaatcattcaaaaaataaagtatcctctgaaggaaatgaaaaaggaagcagcactaaaagcactctgagtcaagatgagtgggaaaccatctcaataaacacattttggata

SEQ ID NO: 382884 - DNA, 390 bp, Homo sapiens
  misc_feature (347)..(347): n is a, c, g, or t
  misc_feature (376)..(376): n is a, c, g, or t
atgaagcagaagaaccaaccagctgaggcctgcccgaactcctaacccacagaattgtgacaaatgattgttatggtgctaagtaccataagatttgggccaggtgtggtggctcacacgtgtaatcccaacactttgggaggctaatgtgggaggatcacttgagcccgggagttcaagactagcctgggcctaatcctactgaaactgttctaaaagacagagaaagagggaatcctccgtaaatcattctatgaagccactaccatgctaatatcaaaaccaggaaaagacataacaacaacaaactacagaccaatatctctggatgaacatagatgcaaaantcctcaacaaaatactagctaaccaaatncagcagcacatcaa

SEQ ID NO: 382885 - DNA, 2791 bp, Homo sapiens
  misc_feature (2)..(2): n is a, c, g, or t
  misc_feature (2489)..(2489): n is a, c, g, or t
gntagctgttccagtaggcactagagtcgtttcccagataccatgtagtgtcaccaagaccactatactcttccaccctagacgaagcctttgacagaattaagaagcaaagactcaggtggactgaaggccgctatgatcgaattggtggaaaggttgaagttcaagagctcagaccctaaagtaactcgggaccaaatgaagatgtttatacagcaggaatttaagaaagttcagaaagtgattgctgatgaggagcagaaggcccttcatctagtggacatccaagaggcaatggccacagctcatgtgactgagatactggcagacatccaatcccacatggataggttgatgactcagatggcccaagccaaggaacaacttgatacctctaatgaatcagctgagccaaaggcagagggcgatgaggaaggacccagtggtgccagtgaagaagaggacacatgaaggcttgctacccccagtggaaaatcatcccctccccttgtgtgtatgtgacagcgtgtatgtaacggcttctgatttctgtgaaagctgctcagcaacaaacgtacttccaccagatgtgtccccagatccacagcaggcacatatctctccaagggatgaccagttttatgcttactgtgtgcttctcatcccctggttgtggtaggtcaaggaaaagagcccctttgatccaccaggagcaattaagaaaggtccttcaggtaatccctcaatggctgctttgaacttactcaggaaagccagcccccataatattgtattaccaaacagtatcgctttgttaggaaggatctggaataatcttgaagggaagtcagagttttctccctgcctattaacaaaaacccaattttgttcatattgaagcatgaaataaatgagagcaaggtagggccaaattaactcttgtggacagtccctaaaagtccagttctacatttgtgaaaattgtggtgccatgaattaagatggatgactggaaaaaggtgttggagaaagagttaaagatgaggaagagatatttttagtatatgaagttatccaggacttgatattcataattcagtgctgtggaaatgaaaaaaatgattgaagaggtggaacggaaatgaccttagggggaaaaaaaaggaccaaagaagtctgattaaaagttgaaatcagtatttctgaattcaaattgcttgaatttccaaaatagtcagtaaaggatctaatagaaccagaattatttgggtgaattctgcaggttttatgggcttgtcacaacgtgaagggctggaatgtatattaccaaatgggaatttccattgtaggtttttgctagtcccacccccattttagcctaatttggcttaaacgcagtatggggagaattgttcccattccatgtgttctgaattcagctcatctcccagcatatagatatatcctcctttaactccgaccagaacccttcttcctgtggcactccccacccatagaccttcagatcatctcccacaccctggatctcactctcctcttagtaacagagacactcctgaggttggacttccttgcttttctctacttccaaatcacaatttcttacaaccaagctttgtgctcccgagtaagcagggatgtactaggggaatgtaaaactgcaaacttaaaaacctgcatcttcttgaagcatcagttttacttaccaaatggtttagagtcataagatgacctatttttatataaaagttatattatagaataaaatgttcatacgcatagactgttaagataaaaaaataggaatcttgcaaggtaattcttatttgcaagtgggttatgtgttcactctcctctacctttatggtattttggtgttcacttacgaagcatacaactagaaccatatccaagcagactctgggttgctgttaacccagggcctagacttctagtgcctctgaggcagaaccaaaggagcctgcactggggaaaatcccttttcctgcctgcctgtctgcctgtgacctgtgtacgtattacaggctttaggaccagctgattgttatgcttgcaggatggttttgaaacagaaacaatacttgtttactgtaggaatcctatttatattatttttcagtcctgtgaatgctgtgaaaagatttattcctttgaggccaggaagctcccaggcatatatgcttctaggttaggattgtcctgactcactaaagatgccaggatattggggctgaggggagtttgaggtgttaaaaaaaaaaaaaaaaaaaaaaaaactccggggcttctattgcgggggggggaaaaaggggtcttgaagggcctgggccatggggttcccggaccccttttttgtaccaagggggaaactcggggggcccccaatagggggacgaatataattcgaaaagcccgggtacccgggctagcagcccgccgacaaaaangaagaacgccaacacggaaacaggaacgaacaggaggggggcaccaccattggccacacgcaaacgggcccggccacaccgtgaccaaaggcacaacaagaacatagcgcaagaccagaagagaacgcaagagcagcaaagaacaagcaacacagatgcacagacgagaaggcaagaaaaggcaacgacacaacaggcacgagaacgaacgcgaagcaagacacgacagagcaaagcgagacgacaaacgaggaccaaagagcaacgacaaagacagcgagcagacgacacaagacgacagc

SEQ ID NO: 382886 - DNA, 2493 bp, Homo sapiens
  misc_feature (2191)..(2191): n is a, c, g, or t
gtgatctagaggatcccataggaagaatgtgcatccaatcccacatggataggttgatgactcagatggcccaagccaaggaacaacttgatacctctaatgaatcagctgagccaaaggcagagggcgatgaggaaggacccagtggtgccagtgaagaagaggacacatgaaggcttgctacccccagtggaaaatcatcccctccccttgtgtgtatgtgacagcgtgtatgtaacggcttctgatttctgtgaaagctgctcagcaacaaacgtacttccaccagatgtgtccccagatccacagcaggcacatatctctccaagggatgaccagttttatgcttactgtgtgcttctcatcccctggttgtggtaggtcaaggaaaagagcccctttgatccaccaggagcaattaagaaaggtccttcaggtaatccctcaatggctgctttgaacttactcaggaaagccagcccccataatattgtattaccaaacagtatcgctttgttaggaaggatctggaataatcttgaagggaagtcagagttttctccctgcctattaacaaaaacccaattttgttcatattgaagcatgaaataaatgagagcaaggtagggccaaattaactcttgtggacagtccctaaaagtccagttctacatttgtgaaaattgtggtgccatgaattaagatggatgactggaaaaaggtgttggagaaagagttaaagatgaggaagagatatttttagtatatgaagttatccaggacttgatattcataattcagtgctgtggaaatgaaaaaaatgattgaagaggtggaacggaaatgaccttagggggaaaaaaaaggaccaaagaagtctgattaaaagttgaaatcagtatttctgaattcaaattgcttgaatttccaaaatagtcagtaaaggatctaatagaaccagaattatttgggtgaattctgcaggttttatgggcttgtcacaacgtgaagggctggaatgtatattaccaaatgggaatttccattgtaggtttttgctagtcccacccccattttagcctaatttggcttaaacgcagtatggggagaattgttcccattccatgtgttctgaattcagctcatctcccagcatatagatatatcctcctttaactccgaccagaacccttcttcctgtggcactccccacccatagaccttcagatcatctcccacaccctggatctcactctcctcttagtaacagagacactcctgaggttggacttccttgcttttctctacttccaaatcacaatttcttacaaccaagctttgtgctcccgagtaagcagggatgtactaggggaatgtaaaactgcaaacttaaaaacctgcatcttcttgaagcatcagttttacttaccaaatggtttagagtcataagatgacctatttttatataaaagttatattatagaataaaatgttcatacgcatagactgttaagataaaaaaataggaatcttgcaaggtaattcttatttgcaagtgggttatgtgttcactctcctctacctttatggtattttggtgttcacttacgaagcatacaactagaaccatatccaagcagactctgggttgctgttaacccagggcctagacttctagtgcctctgaggcagaaccaaaggagcctgcactggggaaaatcccttttcctgcctgcctgtctgcctgtgacctgtgtacgtattacaggctttaggaccagctgattgttatgcttgcaggatggttttgaaacagaaacaatacttgtttactgtaggaatcctatttatattatttttcagtcctgtgaatgctgtgaaaagatttattcctttgaggccaggaagctcccaggcatatatgcttctaggttaggattgtcctgactcactaaagatgccaggatattggggctgaggggagtttgaggtgttaaaaaaaaaaaaaaaaaaaaaaaaactccggggcttctattgcgggggggggaaaaaggggtcttgaagggcctgggccatggggttcccggaccccttttttgtaccaagggggaaactcggggggcccccaatagggggacgaatataattcgaaaagcccgggtacccgggctagcagcccgccgacaaaaangaagaacgccaacacggaaacaggaacgaacaggaggggggcaccaccattggccacacgcaaacgggcccggccacaccgtgaccaaaggcacaacaagaacatagcgcaagaccagaagagaacgcaagagcagcaaagaacaagcaacacagatgcacagacgagaaggcaagaaaaggcaacgacacaacaggcacgagaacgaacgcgaagcaagacacgacagagcaaagcgagacgacaaacgaggaccaaagagcaacgacaaagacagcgagcagacgacacaagacgacagc

SEQ ID NO: 382887 - DNA, 1441 bp, Homo sapiens
  misc_feature (1139)..(1139): n is a, c, g, or t
ttagttggccgtggtgggggatgccagcctaatttggcttaaacgcagtatggggagaattgttcccattccatgtgttctgaattcagctcatctcccagcatatagatatatcctcctttaactccgaccagaacccttcttcctgtggcactccccacccatagaccttcagatcatctcccacaccctggatctcactctcctcttagtaacagagacactcctgaggttggacttccttgcttttctctacttccaaatcacaatttcttacaaccaagctttgtgctcccgagtaagcagggatgtactaggggaatgtaaaactgcaaacttaaaaacctgcatcttcttgaagcatcagttttacttaccaaatggtttagagtcataagatgacctatttttatataaaagttatattatagaataaaatgttcatacgcatagactgttaagataaaaaaataggaatcttgcaaggtaattcttatttgcaagtgggttatgtgttcactctcctctacctttatggtattttggtgttcacttacgaagcatacaactagaaccatatccaagcagactctgggttgctgttaacccagggcctagacttctagtgcctctgaggcagaaccaaaggagcctgcactggggaaaatcccttttcctgcctgcctgtctgcctgtgacctgtgtacgtattacaggctttaggaccagctgattgttatgcttgcaggatggttttgaaacagaaacaatacttgtttactgtaggaatcctatttatattatttttcagtcctgtgaatgctgtgaaaagatttattcctttgaggccaggaagctcccaggcatatatgcttctaggttaggattgtcctgactcactaaagatgccaggatattggggctgaggggagtttgaggtgttaaaaaaaaaaaaaaaaaaaaaaaaactccggggcttctattgcgggggggggaaaaaggggtcttgaagggcctgggccatggggttcccggaccccttttttgtaccaagggggaaactcggggggcccccaatagggggacgaatataattcgaaaagcccgggtacccgggctagcagcccgccgacaaaaangaagaacgccaacacggaaacaggaacgaacaggaggggggcaccaccattggccacacgcaaacgggcccggccacaccgtgaccaaaggcacaacaagaacatagcgcaagaccagaagagaacgcaagagcagcaaagaacaagcaacacagatgcacagacgagaaggcaagaaaaggcaacgacacaacaggcacgagaacgaacgcgaagcaagacacgacagagcaaagcgagacgacaaacgaggaccaaagagcaacgacaaagacagcgagcagacgacacaagacgacagc

SEQ ID NO: 382888 - DNA, 569 bp, Homo sapiens
gtttcttgtatgtgggaagaatctatgtttgagctatactctgtttggcagtttgatggccagctgttcaattcacgtcccacagacctgacatacctagtgctgacggagtgctccagtagtttaagagttaaaaacatgtgactcatgtgcccattcaggccttctgtctcatagatcttctccttttcgataaccatattttgtgaatgatgattttctaacacaccattgcaagtttctacaacttacttagtcgttaatagatattctgactgtgttcacagttatagtagtccccttttatctgcagggaatacattccaagaaccccagtggacgcttgaaaccatggatagtactgaaccctatggatactgttttttttcctatccatacctacgataaaggtatgataaataatacactttaaggccgggcacggtggctcatgcctgtaatcctagcactttgggaggccgaggcaggcggatcatgaggtaggagtttgagaccaccctggccaacatggtgaaaccccatctctactaaaaatacaaaaaaaaaaa

SEQ ID NO: 382889 - DNA, 906 bp, Homo sapiens
tagaagaaaaggttggttcagataaaatgaaaattataagtgaagggtgagattcacattctggaagatctgtagtttacttggaggatgggttttcaaccttgttctattattctatgcttctctattatacaagataaatggatggtttctacccatccacagctccccaggagctccatctctcttggtggtgccatttgaccaccctccctgctaccctgtagtcacaactgattgggccaagctgggccattctcacttttctctcttgaaatttaatgttaagacatggaaactgagtacatcaggtggttacaagctctgggtttgtaagtcacagccctaggtccatacctttgtattcccttcaccctgtagtgctgtaaaggaagagaaaccaggaaggtgatactcatggaagagatttgaagatacacacacacacacacacacacacacagagagagagagagagagagagagagagagagaaagatcagattgagcttggtaaatctcctgggtcagggtaccccaagattgtccaaacaacccagaggctagggattggtgggatccagaggttggtagctcctgtgaacttcctatcatagcccttggatatccctgactggagaagctgctgagaactcatctgtgaagttgttgcctcagaccccatgttgtccagtaatccttccttccaggccactgtctttccccctggacaaaactcagtgtggagttgggctctttaactttctcacattttaacttgaggagttggaccagatcaatattccctgaagtatgatatgtgtactactgctagtattatactgatgtttcaattatacaagataatttcaggaactatgtgaataaatatttcttttattgtgt

SEQ ID NO: 382890 - DNA, 425 bp, Homo sapiens
ttggtggtgtgggtggctctgctccatgaggtcactcaggtggacaggaggcacgaccaccctgagagcacagccttcctccttcctcacagtcactgcccccatggtcatcctcaacagcatgaggtggaactgaatggagagaaagctgttttcttctaaggatcaaaaataaatacagaaacaaataaaacctctagctttccatcagggacaaatgtacttttgactcagtcacagatttgagaaattttccattgagcgggtctgctggtaaacccacgttcattgtttgtttgttttaatctgaaaatgtgtttacatgattcttgaagatattctttgacaagaaacttccatatgtggtagcctatttgaagttgtcatttactatttcatcattgctgctaaaaagtcatttgtta

SEQ ID NO: 382891 - DNA, 478 bp, Homo sapiens
ataaaataggaccatgccataggagtgctaaatgcagtctttctctctttgttatcacttccataataatatatgcatactgtagtttctggaagttgggaagctatcagaacaagagcatctcacttttgacacatacaatagacaccccaaacaggaaactgatgaccttattaaaatcatagataaaatttggaaaggggccaggcacagtggctcctgcctgtaatcccagcactctgggaggccaaggcaggaggattgctggagcccaggagttcaggaccagcctgggaaacatagtgagaccctgtctctacaaaaagtaaaaattaggcatggtggcatgtggctgtggtcccagctacatgggaggttaaggcaggaggatcacttgagcccaggagttggttgcagtgagccaagatcatgccactgcattccagcctgggtgacagagtaagtgagaccctgtatt

SEQ ID NO: 382892 - DNA, 374 bp, Homo sapiens
gttgttacagacaggatcagtaagatgaaggctgagaattgagaccattgaatttagtggggtggggttgttgcagacattggtgagcagttttggtagagggagaaaggtgaattaaagcatggttggagtggtttcaggagacaaggccacagaaggaattgagggaaccattgtagataacattttcaaagaatgttgctgtaaaagagagcagagaatgggaatttttcttaagagagccactagcaacatatttgctaatgacaaataagggagatgagagaattgctggaacaattagtatttgcatggtgaattttcagtactttccttgttttattctagtatgcagttgtactgtgtaagtttgc

SEQ ID NO: 382893 - DNA, 1646 bp, Homo sapiens
tggagctcaaggatccttaattaaattaatcccccccccccagtgcgcccaacagcggactccgagaccagcggatctcggcaaaccctctttctcgaccacccacctaccattcttggaaccatggcggcagtggcggcggcctcggctgaactgctcatcatcggctggtacatcttccgcgtgctgctgcaggtgttcaggtactccctgcagaagctggcatacacggtgtcgcggaccgggcggcaggtgttgggggagcgcaggcagcgagcccccaactgaggccccagctcccagccctgggcggccgtatcatcaggtgctcctgtgcatctcggccagcacgggagccagtgccgcgcaggaatgtggggtcccctgtgttccctcgccagaggagcacttggcaaggtcagtgaggggccagtagacccccggagaagcagtaccgacaatgacgaagataccagatcccttcccaacccctttgcaccggtcccactaaggggcagggtcgagagaggaggggggatagggggagcagacccctgagatctgggcataggcaccgcattctgatctggacaaagtcgggacagcaccatcccagccccgaagccagggccatgccagcaggccccaccatggaaatcaaaacaccgcaccagccagcagaatggacattctgacatcgccagccgacgccctgaatcttggtgcagcaccaaccgcgtgcctgtgtggcgggactggagggcacagttgaggaaggagggtggttaagaaatacagtggggccctctcgctgtcccttgcccagggcacttgcattccagcctcgctgcatttgctctctcgattcccctttcctcctcactgcctcccaagcccaccctactccaaaataatgtgtcacttgatttggaactattcaagcagtaaaagtaaatgaatcccacctttactaaaacactttctctgaaccccccttgcccctcactgatcttgcttttccctggtctcatgcagttgtggtcaatattgtggtaatcgctaattgtactgattgtttaagtgtgcattagttgtgtctccccagctagattgtaagctcctggaggacagggaccacctctacaaaaaataaaaaaagtacctcccctgtctcgcacagtgtcccaggaccctgcggtgcagtagaggcgcaccaaaactttgtctcttgtgatttctttagcggcatcaacatacacttctaagactcagctgatgtgcccactgtggaacaggcacactgcttgggggagggaggaaaaggagggccatcaaaattgcaataagctgggcccctcacacacccaaccccatctcaatgctgtcctgtgataaaggaccatctccccctctccccaaagagaaaggctgacatcttcacttgtggtcctggaataagggaccacttccccctccccaaagggataggtgctttacttgtggtcttaggataaggggccaaagcaagtatcactttgggaaagatgagaggaggggaaaaaggtgggagtagccctccaaagaggtactagggaccaagggggtgatttcagaacacaaagccttacttcaggtctccatccagg

SEQ ID NO: 382894 - DNA, 1672 bp, Homo sapiens
tggagctcaaggatccttaattaaattaatcccccccccccagtgcgcccaacagcggactccgagaccagcggatctcggcaaaccctctttctcgaccacccacctaccattcttggaaccatggcggcagtggcggcggcctcggctgaactgctcatcatcggctggtacatcttccgcgtgctgctgcagggtgggtcctgggtttctcgtcgcaggtgttcaggtactccctgcagaagctggcatacacggtgtcgcggaccgggcggcaggtgttgggggagcgcaggcagcgagcccccaactgaggccccagctcccagccctgggcggccgtatcatcaggtgctcctgtgcatctcggccagcacgggagccagtgccgcgcaggaatgtggggtcccctgtgttccctcgccagaggagcacttggcaaggtcagtgaggggccagtagacccccggagaagcagtaccgacaatgacgaagataccagatcccttcccaacccctttgcaccggtcccactaaggggcagggtcgagagaggaggggggatagggggagcagacccctgagatctgggcataggcaccgcattctgatctggacaaagtcgggacagcaccatcccagccccgaagccagggccatgccagcaggccccaccatggaaatcaaaacaccgcaccagccagcagaatggacattctgacatcgccagccgacgccctgaatcttggtgcagcaccaaccgcgtgcctgtgtggcgggactggagggcacagttgaggaaggagggtggttaagaaatacagtggggccctctcgctgtcccttgcccagggcacttgcattccagcctcgctgcatttgctctctcgattcccctttcctcctcactgcctcccaagcccaccctactccaaaataatgtgtcacttgatttggaactattcaagcagtaaaagtaaatgaatcccacctttactaaaacactttctctgaaccccccttgcccctcactgatcttgcttttccctggtctcatgcagttgtggtcaatattgtggtaatcgctaattgtactgattgtttaagtgtgcattagttgtgtctccccagctagattgtaagctcctggaggacagggaccacctctacaaaaaataaaaaaagtacctcccctgtctcgcacagtgtcccaggaccctgcggtgcagtagaggcgcaccaaaactttgtctcttgtgatttctttagcggcatcaacatacacttctaagactcagctgatgtgcccactgtggaacaggcacactgcttgggggagggaggaaaaggagggccatcaaaattgcaataagctgggcccctcacacacccaaccccatctcaatgctgtcctgtgataaaggaccatctccccctctccccaaagagaaaggctgacatcttcacttgtggtcctggaataagggaccacttccccctccccaaagggataggtgctttacttgtggtcttaggataaggggccaaagcaagtatcactttgggaaagatgagaggaggggaaaaaggtgggagtagccctccaaagaggtactagggaccaagggggtgatttcagaacacaaagccttacttcaggtctccatccagg

SEQ ID NO: 382895 - DNA, 1129 bp, Homo sapiens
tggagctcaaggatccttaattaaattaatcccccccccccagtgcgcccaacagcggactccgagaccagcggatctcggcaaaccctctttctcgaccacccacctaccattcttggaaccatggcggcagtggcggcggcctcggctgaactgctcatcatcggctggtacatcttccgcgtgctgctgcaggtgttcctggaatgctgcatttactgggtaggattcgcttttcgaaatcctccagggacacagcccattgcgagaagtgaggtgttcaggtactccctgcagaagctggcatacacggtgtcgcggaccgggcggcaggtgttgggggagcgcaggcagcgagcccccaactgaggccccagctcccagccctgggcggccgtatcatcaggtgctcctgtgcatctcggccagcacgggagccagtgccgcgcaggaatgtggggtcccctgtgttccctcgccagaggagcatgatcttgcttttccctggtctcatgcagttgtggtcaatattgtggtaatcgctaattgtactgattgtttaagtgtgcattagttgtgtctccccagctagattgtaagctcctggaggacagggaccacctctacaaaaaataaaaaaagtacctcccctgtctcgcacagtgtcccaggaccctgcggtgcagtagaggcgcaccaaaactttgtctcttgtgatttctttagcggcatcaacatacacttctaagactcagctgatgtgcccactgtggaacaggcacactgcttgggggagggaggaaaaggagggccatcaaaattgcaataagctgggcccctcacacacccaaccccatctcaatgctgtcctgtgataaaggaccatctccccctctccccaaagagaaaggctgacatcttcacttgtggtcctggaataagggaccacttccccctccccaaagggataggtgctttacttgtggtcttaggataaggggccaaagcaagtatcactttgggaaagatgagaggaggggaaaaaggtgggagtagccctccaaagaggtactagggaccaagggggtgatttcagaacacaaagccttacttcaggtctccatccagg

SEQ ID NO: 382896 - DNA, 1731 bp, Homo sapiens
taggtggcgggcgggtacttaaggcgcggccaccgcggctgcggcagtgcgcccaacagcggactccgagaccagcggatctcggcaaaccctctttctcgaccacccacctaccattcttggaaccatggcggcagtggcggcggcctcggctgaactgctcatcatcggctggtacatcttccgcgtgctgctgcaggtgttcctggaatgctgcatttactgggtaggattcgcttttcgaaatcctccagggacacagcccattgcgagaagtgaggtgttcaggtactccctgcagaagctggcatacacggtgtcgcggaccgggcggcaggtgttgggggagcgcaggcagcgagcccccaactgaggccccagctcccagccctgggcggccgtatcatcaggtgctcctgtgcatctcggccagcacgggagccagtgccgcgcaggaatgtggggtcccctgtgttccctcgccagaggagcacttggcaaggtcagtgaggggccagtagacccccggagaagcagtaccgacaatgacgaagataccagatcccttcccaacccctttgcaccggtcccactaaggggcagggtcgagagaggaggggggatagggggagcagacccctgagatctgggcataggcaccgcattctgatctggacaaagtcgggacagcaccatcccagccccgaagccagggccatgccagcaggccccaccatggaaatcaaaacaccgcaccagccagcagaatggacattctgacatcgccagccgacgccctgaatcttggtgcagcaccaaccgcgtgcctgtgtggcgggactggagggcacagttgaggaaggagggtggttaagaaatacagtggggccctctcgctgtcccttgcccagggcacttgcattccagcctcgctgcatttgctctctcgattcccctttcctcctcactgcctcccaagcccaccctactccaaaataatgtgtcacttgatttggaactattcaagcagtaaaagtaaatgaatcccacctttactaaaacactttctctgaaccccccttgcccctcactgatcttgcttttccctggtctcatgcagttgtggtcaatattgtggtaatcgctaattgtactgattgtttaagtgtgcattagttgtgtctccccagctagattgtaagctcctggaggacagggaccacctctacaaaaaataaaaaaagtacctcccctgtctcgcacagtgtcccaggaccctgcggtgcagtagaggcgcaccaaaactttgtctcttgtgatttctttagcggcatcaacatacacttctaagactcagctgatgtgcccactgtggaacaggcacactgcttgggggagggaggaaaaggagggccatcaaaattgcaataagctgggcccctcacacacccaaccccatctcaatgctgtcctgtgataaaggaccatctccccctctccccaaagagaaaggctgacatcttcacttgtggtcctggaataagggaccacttccccctccccaaagggataggtgctttacttgtggtcttaggataaggggccaaagcaagtatcactttgggaaagatgagaggaggggaaaaaggtgggagtagccctccaaagaggtactagggaccaagggggtgatttcagaacacaaagccttacttcaggtctccatccagg

SEQ ID NO: 382897 - DNA, 1561 bp, Homo sapiens
tggagctcaaggatccttaattaaattaatcccccccccccagtgcgcccaacagcggactccgagaccagcggatctcggcaaaccctctttctcgaccacccacctaccattcttggaaccatggcggcagtggcggcggcctcggctgaactgctcatcatcggctggtacatcttccgcgtgctgctgcaggtgttcaggtactccctgcagaagctggcatacacggtgtcgcggaccgggcggcaggtgttgggggagcgcaggcagcgagcccccaactgaggccccagctcccagccctgggcggccgtatcatcaggtgctcctgtgcatctcggccagcacgggagccagtgccgcgcaggaatgtggggtcccctgtgttccctcgccagaggagcacttggcaaggtcagtgaggggccagtagacccccggagaagcagtaccgacaatgacgaagataccagatcccttcccaacccctttgcaccggtcccactaaggggcagggtcgagagaggaggggggatagggggagcagacccctgagatctgggcataggcaccgcattctgatctggacaaagtcgggacagcaccatcccagccccgaagccagggccatgccagcaggccccaccatggaaatcaaaacaccgcaccagccagcagaatggacattctgacatcgccagccgacgccctgaatcttggtgcagcaccaaccgcgtgcctgtgtggcgggactggagggcacagttgaggaaggagggtggttaagaaatacagtggggccctctcgctgtcccttgcccagggcacttgcattccagcctcgctgcatttgctctctcgattcccctttcctcctcactgcctcccaagcccaccctactccaaaataatgtgtcatgatcttgcttttccctggtctcatgcagttgtggtcaatattgtggtaatcgctaattgtactgattgtttaagtgtgcattagttgtgtctccccagctagattgtaagctcctggaggacagggaccacctctacaaaaaataaaaaaagtacctcccctgtctcgcacagtgtcccaggaccctgcggtgcagtagaggcgcaccaaaactttgtctcttgtgatttctttagcggcatcaacatacacttctaagactcagctgatgtgcccactgtggaacaggcacactgcttgggggagggaggaaaaggagggccatcaaaattgcaataagctgggcccctcacacacccaaccccatctcaatgctgtcctgtgataaaggaccatctccccctctccccaaagagaaaggctgacatcttcacttgtggtcctggaataagggaccacttccccctccccaaagggataggtgctttacttgtggtcttaggataaggggccaaagcaagtatcactttgggaaagatgagaggaggggaaaaaggtgggagtagccctccaaagaggtactagggaccaagggggtgatttcagaacacaaagccttacttcaggtctccatccagg

SEQ ID NO: 382898 - DNA, 305 bp, Homo sapiens
ctttttctgtaaaaatggctgctcataatatctcttcatcattcacagattttatgtgcaaaaataacctctccctatccataggagtatactgacaactccacattttatgatatgtgagcctcacaataatcccttcaggctgacagagtcgttattccaatctccagtgaataggtgggaatttccaatattttcatctctaatttcctttccagttctgatcgactgcagtgcagtttaatagtagaagagaagctaagattggtgaactagcttcacatgaacctccaaaacagtctccc

SEQ ID NO: 382899 - DNA, 1062 bp, Homo sapiens
cagtaattctcatctagcctgttgtctttcatacgaagacaacagaaaggctttctcagatctgcaagagctcacagagtctgtaatacccatgtgccctgagtgaatagacctgaggtaaggttctggcagccccacatgcaaacggtagaaacccaagccagtttttaagctcttgaagccctagtttctttatttgtaaaccaagtaaaagtaaatgatttacttcataaaattgttataaaggttaaagggacagaatatatgccaagctctttgttcactgcttagtactcttttaaaaaaataatagaatttattggaacaaccaatcttagccaaccatgagaggaatcacaaacaagaagaaaagaaagccactgcaccccgctaaaatttagacttttagagattattacaaacaaaattaaaaagcaattgctgtacataataaaaaattgacattcaataagaaagataaacctcctaataaggaggctttattcaccaaaggacgtgaaagtgcagttcaccaaagaatatctctaaatgatcagcacacacacacaaactaatattgctgataattaaagaagtagggacaaactaaatgcctaaccatagaccattggttaagcattaaattattagttaagcattatgttatggcacatccataggaataagtatgccatatcattaaaaatcatgtcatagaagaatattttataaggtgggaaataatttgctatgaaaaaatgcttggttaggccgggcacagtggctcacgcctgtaatcccagcactttgagaggcctaggcgggtggatcacctgaggtctggagttcaagaccagcctggccaacatggtgaaacctcgttgctactaaaaatacaaaaattagctgggcatggtggcacatgcctgtaatcccaactactcaggaggctgaggcaggagaatcgcttgaacccaggagctggaggctggagtgagctgagatcgcgccactgcactccagcctgggtgacagagtgagactctgtctcaaaaaaaaaaa

SEQ ID NO: 382900 - DNA, 401 bp, Homo sapiens
ttgaatcttgagaatctcatccaagtccaaaatcatttttaataatccctccttctgattaaaatagcaaagaaaaaaattaggtaacaatcattgtctactcattaagtggatatagattattcattgtttggcatatgaagcaataaatttgaaagccatcaaggagatgtatgagactgggctactcattgaacatctgcaaatcaagacgggtctagccttggattctgaagatactgggagatgggagggatggttctgcttcttctctgccctttgggtttatatggataaagtcatcttgggtaatcttaaatttgaggatttctgagggttctcagggtcagcgttgtgcacaagttgcacttggagttagaggttaaaaacagcttagtcct

SEQ ID NO: 382901 - DNA, 445 bp, Homo sapiens
tctcagtttccccctctataacaacagcaccagcctcacagggatgtcttaaagatgaaatgggttattacatatgctcatgggaatgctcattaagccctagctattattataatttattattccatctctactttcaaccagcatggaagagtgctttgaaaatacttcacttaggccgggcgcggtggctcacgcctgtaatcccagcactttgggaggccgaggcgggcggatcacgaggtcaggagatcaagaccacggtgaaaccccgtctctactaaaaaatataaaaaattagccgggcgcagtggcgggcgcctgtagtcccagctactcgggaggctgaggcaggagaatggcgtgaacccggaaggcggagcttacagtgagcggagatcgcgccacaacactcccgcctaggcgacagaacgagactccgtct

SEQ ID NO: 382902 - DNA, 485 bp, Homo sapiens
gtcatctcatcagttagcataaactcaggtgtaatctaaggagctcataaataacaaagacactcctgctacttaggaagttctaagggtttaaagtctctttaccagaaaccagggacaaaggccagtcaagttatttattacacaataggtaggcactattattattattttatttaatagagacagggggctgggcacagtggctcacatctgtaatcccagcactttgggaggccaaggtgggtggggatcacttgaggtcaggagttcgagaccagcctggccaacatggtaaaaccccatctctaccaaaaatataaaaaatcagctgggtgtggtgacgcacacctgtaatcccagctacttgggaggctgaggcaagagaatcacttgaacctgggaggtggaggttgcagtgaaccaaaattgtgccactgcactccatcctgggtgacagagcgacactccatctcaaaaaaaaa

SEQ ID NO: 382903 - DNA, 552 bp, Homo sapiens
ggtctttttcatcttttgtatttccacgcttaattgtagatattttcttctgatttacttttcatatcattaattttctcttcacctgaagagaagcatctgacctgttattaaacctccctattttattttatagtaagactattgtaatttttagtttgagaacatatatttggttcaatttccaatctgctatatcacccttttataatttccggatacctgctgataatttcaagctttggttctatttctttggacacagaaagtataattcttatagcatgtatctaataatgccattatctgtagtctctagaagtttttattggaaaatataatgcctgtcttcccaaatagtgctcttacaaaattctctagtgctgctgattcttctggcttttgctttgtttgattcctgtcccttcatgtgcctggttatcttggattttgtgctgcatattatgtttaaattttatttgtagaatctcttttctaaaaactataaaaatttgtgaaagaaaataaagaagtctaaataaatggaaaaaa

SEQ ID NO: 382904 - DNA, 278 bp, Homo sapiens
ttgtcagtcagaataggatgtaaaagactatttcaaagagttaaattatttgttaatatcagagatcagccacagacaagaagtttatggatgagtgcagcagtggtccattggacatgttaaatacttatggatatccacaatttgaattgacattaaaaatgaatggatacccaactttgaattccatatcgtttttcatatcaaaaatattattttaactactgataaaccaggcaaccaccgcaagtttatcgaaatcctgccgctactaaaca

SEQ ID NO: 382905 - DNA, 277 bp, Homo sapiens
ctcagctcccaccagtggtgtccatctgggaatcagacaggtattaccgtatcttcctttttcgaagacaaatttcaaatataaatttgtatgtgaaatgtcctgacttgcaaatattggtaactaattcacatttgaaacaaaacaaaacattgtccaggccaaacaaaacagcatcaagggtcaccagtttgggtcttttgctctaggtgtttgggtttcttcaagttctgtccctggccttatcttctcatgctacaatcacttcctattaaaa

SEQ ID NO: 382906 - DNA, 578 bp, Homo sapiens
atgtttgaagtttgtaagttctgctgctttcaaccccacagatgtctcttactgcccacttgggccctggtgattaagcaactagatttggagccagtcaggcttttgtttagacattttaactttttcttgctttccttgcaaactcctcagccttcagactggttggaaagtaaatgtacaatcttacataaattttcaggtaatagcatttcagctttttccccaagattttttgcttgggaggagacagattagactggattcggagtcttgattttgcaaaggtaacaaaagacatgtttttttataagacttttcatcataagtttattttattcaacagaagcaaaatctaatataatggaaaaaataaagatctgtgataaatctgatctgtgtggataaacacaattagaaagatttaaagattaagtattgaaacaaactaccaaaatattttaatactgatttgtaaaaatttcagtacatttttcttctttgcttaattctactgggtcctgtttttcatcaaaacattctatcatgttagtatacaatagccaaaaaaaaaaaaa

SEQ ID NO: 382907 - DNA, 365 bp, Homo sapiens
gaagtaagaagctagaactggaccacctagatcacaagtgagggtagaatttgggtgggatgtcaggggtgggggcagaataggaaggtggaatgcagcaagagcaagtagataggactaagtttatatatgtatatgaaatgtttagtgtttctgcaggtgtgccagtgaccactcctacactgctggtaacctatacactcctataatctttctttagtgtagtttcacagtaggtatcaaaagcctaaaaatgtatttgccttttcaccaacatttctacccctataagtttgtcctaagtaaataatctgccatgttcattttagttgtattgtaataagaaaaagctgggcggaaaagat

SEQ ID NO: 382908 - DNA, 751 bp, Homo sapiens
aaaaaaaatcttacttctatagacaataaaacattggaaactgaagttaaaaacacagtagctcctgagagagagagagaggtataaatctaacaagacaaaacaggatctgtatgctaaaaagactatgtatgtggagagacggcacacagcacgctcatagactggaagactgaacataagatgccagtctcagaaggatctgtgaaattaacaaaattccaaaacattgcagtaggactctttttagatttagaaaagatgattttaaaatgtatacagaatggtgaaggagctagctaaaacagtaaaaaggatagataaaacaatgttttaaaaagaacaaaaaagttagatgaatcacattacacagttttaacagactttaaagccacaaaaatcaagactgtcgtattggcaaagaacagacagatgggtcagtgatcagagagtctagaaacagacccacataaatagggccatttgatctttgacagcagtgcaaacaaaagcaaccctgtggagaaaggattgtccattcaacagagcagtggggcagttggtcatccatatggtagaaatggaaccttggcctaaacctcacattgtacacaattaactccaatcatatgtaaacgtaaaacaaaactataaaatgtttggaagaaaacagaaaaatacctttgtacctgatgacatttggtagagttcttagacatgatcccaaaggcataatccacagaagaatcca

SEQ ID NO: 382909 - DNA, 237 bp, Homo sapiens
acacatattgttactacagtaacagaaaacatgtaaagaacatttgttttgatttatatatcagtctgcactgtttaattttttgtgtcataaatgctcttatttaaaaaaacaggactagttaacagtgtcaattactagtaattcatggtataaataattaaacaaggaagtgttcaaaaaaacagtgtttcaaataaagttttattttacatctttacttacacagaaattgtc

SEQ ID NO: 382910 - DNA, 502 bp, Homo sapiens
ctgtctctaataaaaacacaaaaaattagccgggcgtggtggtgggtgcctgtagtcccagctactagggaggctgaggcaggagaatggtgtgaacccgggaggtggagcttgcagtgagccgagatggcgccactgcactccagcctgggcgacagagcgagactctgtcccaaaaaaaaaaaaaaaaaaaacaaaaaagatatatatatgaatgtaaattctggtaattggttacaggaaattggaagtcaccaaagccaagccttcccaagacatcttgacctctgcctgtcagccatccagcagcgatgggtctttgctccctacagaactctgtggattctatttcttccataagaaataaaatgctatatgctgaataagtaaaatagggtgaagtagacacaatgacaatgtgtctatggaggagtaattggaaagaagctatccacactagcttttttggaaaagcctcaaaaaatctgtgaaattccaccct

SEQ ID NO: 382911 - DNA, 87 bp, Homo sapiens
aaagaaaccaaaaaacacagaaaataaaagaaaggttcctctttaacttaacagacttcacttcagtataaaaacagtaagagttaa

SEQ ID NO: 382912 - DNA, 222 bp, Homo sapiens
aacatcttaaaagtttcaaatgaaggaaaataatataaatagatatttcaaaattaaagcataaaatatacgtatttaaaaagtgttaacaaaattactactataatgattaagaaataaattttcaaaaatacagaatggaatgcaattcagattttagagaaaagttttaaaagaggcaagtttagaataattcaagacaaaaagacaaaatgtgtttaa

SEQ ID NO: 382913 - DNA, 200 bp, Homo sapiens
caaaaccacaaggtgaaagacctttatggacatgacagagaggacctgagttaagagggaaaatacatcttcatagctaggttcacattcagttatgttagtcccaaacctacaaattcaacatgatccctattaaaatcctaccaatatagttcaaaagcttgacaagttgattgtgacatttatatgagagaataatt

SEQ ID NO: 382914 - DNA, 192 bp, Homo sapiens
tttgagcacagcttgaattaagctttactttgaataagtaacaaattgaagaacagagagggaaagatgtatagaatcctaggactaattcaccaggtgtggtggctcacgcctgtaatcccagccctttgggagaccgaggtgggcagatcacgagatcaggagttctaggactcctgggactcattcttc

SEQ ID NO: 382915 - DNA, 723 bp, Homo sapiens
tgtggactaggcggcatccacccctccagtatgtctcatgcgcaggaaggacaaacccaacaggctgccctctcaggccaggttgttgtccacacaggtcttgctagctttgactccctcctaccattcaccttgggtaaaaagcccattacatttgcagggaggaaggggaggtgagtgaacaatacttgctggttaaaacatatatatgttgtatttaggaggcttttttaaaaggagcttatagcacctattatatactccactctcatttcaaaccccctgaggataaagaacagggattaagacagccctattcatccttgagacacccccaaggaggtgttgaggaaacagcattatgtctctctaacaaaaagaccaaacctacaggtgatttgccttcaaggtcatacatcaagtccatttcagaatttatggcagtgaactggtattctggttctgaaattggtgtcctccaaaagcttcaagctgcccgtagtaaatgatgcacacagtcaccctaactgccctggctctcatttgtaagggtggtccaggatccacagccccccaggaaatggccctctgacaaggtcttgcatacttttgggtgtgcccccacgcagtgtcttaaaccagcagcatgctctcagggacaccacagcaaggggaaggggtggtttatggacattccattgaaacctcagtttcctcctctgt

SEQ ID NO: 382916 - DNA, 405 bp, Homo sapiens
agttgaaccagatatgcagtggttaccatcacacagataaacgctgccttctgtacataccccttatgctgtactaattaacaaaccccttgccagggctggggaggtgagggtgaaggagaatcttagcagaagggcagagtcaggacttgcatctgccactgctgggcactgaagccctggagcagcttcagatagtacctgtactttctcatgcagactccctctgaacaagagccttgtaggcccctctccttcatttcccaccagcctcttatcaggcgggctttccaccatacacccaggaggccacggtctgaggaacaaccaaacccatgcaaagggccgggcgcgatagctcacgcctgtaatgccagcactttgggaggctggggcaggcagatc

SEQ ID NO: 382917 - DNA, 217 bp, Homo sapiens
aatcaggagaactgttagagccataccagagaaaatcacaagaaaggcaggactgcaaagatctagtggaggctgtgagaaaaggtaaaccccttcttaagctcatctgcccctttagttaccactggctgtctcactcctggatttatgtgactcccttagctatactttcccagccccctgggatgttccccactcatcctattcacccacaaag

SEQ ID NO: 382918 - DNA, 407 bp, Homo sapiens
ggaagatgacttctcccgaggaagtgtattcagtcccgtctaatctaatgtttttcagtcccatttaaaggctggtgagctcggtgacagcccactcacaacctggtcactctgggacacacacaaccttcagggtgtccttccttccccactacccccttgaaagcctcatggcacttggggaggaaacttcccatctgtcactgtcctcttggcctcagcagcctcaccagcagaagagctggtcagtttagtccccaggcatggttcccagagttcctccctagcctatggcatcaaggtcccattttctgtcctctttgtcccagccccaggcccttcggagtccccagacatctcccagcggcttccatatctttttccggtcttgctcaagaccattcatg

SEQ ID NO: 382919 - DNA, 321 bp, Homo sapiens
taagaaatatgataataacttatcaattaaaagaaactatccacaacctgttaatgaaactaaaaactattttgaattatatattttccgggtttatgatcatcttaaaatgaaatcatattttgagatagtagctttaaaccattttgaaatatgttgattttttccaggtaatttaaaaatattattaaatagttaattataaaatttatactggtattgtacccattagtggcatgtttttcattgtattttcttccattcatttaatgattggctaatactacttgtttttaaagaagtaattgaaatgtagaagag

SEQ ID NO: 382920 - DNA, 486 bp, Homo sapiens
ctcccctgaaccttccagaagggccttctggctcagaaccagacccctgcctggttactccgtctgcccttctgcctgattagagcaagggtctcgcacaggctggacaatgcccaagtctgtgctgagcacaaaacaaggccatgtgatggaggggcagggtttctggatgctgtcattaatgataacagcctgaactatatccatgacctttaaaaacatctttaactgaaggaagttaaaatacagaaagagggaagattaggacaaaccttatggttggattagatttagagatattggtaggagctcatgatttcattacatgcacacacacacacagagattgatatagaaatttggctgggcgcagtggctcacgcctgcaatcccagcactttgggaggccgaggtgggcagatgacttgaagtcaggagttcaagaccagcttggccaacatggcaaaatccagtctctactaaaaa

SEQ ID NO: 382921 - DNA, 966 bp, Homo sapiens
cggctgcagctcgggcggcggccgcgggggacaaagggcgggcggatcggcggggagggggcggggcgcggccaggccaagcccgggggctccgcaatgctgcagctgcccccgggcgcccccgccgccgccctcgccgcggagccgcgcggagcggagccggcgagctaacccgagccagccggcgggcgtcccggaggcggtggcgcagggaggggcccgacgctcgcacgtggccccggcggccgccatggcggacagcggcaccgcggggggcgcggcgttggcggccccggcccccgggccgggcagtggcggcccaggaccacgcgtctactttcagagcccccccggggccgcaggagagggcccgggcggggcggacgatgagggcccagtgaggcgccaagggaaggtcaccgtcaagtatgaccgcaaggagctacggaagcgcctcaacctagaggagtggatcctggagcagctcacgcgcctctacgactgccaggaagaggagatcccagaactggagattgacgtggatgagctcctggacatggagagtgacgatgcccgggctgccagggtcaaggagctgctggttgactgttacaaacccacagaggccttcatttctggcctgctggacaagatccggggcatgcagaagctgagcacaccccagaagaagtgagggtccccgacccaggagaacggtggctcccacaggacaatcgctgccccccaacctcgtagcaacagcaataccgggggaccctgcggccaggcctggtgccatgagcagggctcctcgtgcccctggcccaggggtctcttcccctgccccctcagttttccacttttggggttttttattgttattaaactgatgggactttttgtgtttttatattgactctgcggcgcgggccctttaataaagctaggatacgcctttggtgcagc

SEQ ID NO: 382922 - DNA, 541 bp, Homo sapiens
aggggcctcaacccagagcccctctcacaccctctctccaactcaggcttatgtctctccctcctcccccacccccaccccaggaagaggagatcccagaactggagattgacgtggatgagctcctggacatggagagtgacgatgcccgggctgccagggtcaaggagctgctggttgactgttacaaacccacagaggccttcatttctggcctgctggacaagatccggggcatgcagaagctgagcacaccccagaagaagtgagggtccccgacccaggagaacggtggctcccacaggacaatcgctgccccccaacctcgtagcaacagcaataccgggggaccctgcggccaggcctggtgccatgagcagggctcctcgtgcccctggcccaggggtctcttcccctgccccctcagttttccacttttggggttttttattgttattaaactgatgggactttttgtgtttttatattgactctgcggcgcgggccctttaataaagctaggatacgcctttggtgcagc

SEQ ID NO: 382923 - DNA, 228 bp, Homo sapiens
gcggccgcctactactactactactgctcgaattcaagcttctaacgatgtacggggacatgagcagggctcctcgtgcccctggcccaggggtctcttcccctgccccctcagttttccacttttggggttttttattgttattaaactgatgggactttttgtgtttttatattgactctgcggcgcgggccctttaataaagctaggatacgcctttggtgcagc

SEQ ID NO: 382924 - DNA, 925 bp, Homo sapiens
cggctgcagctcgggcggcggccgcgggggacaaagggcgggcggatcggcggggagggggcggggcgcggccaggccaagcccgggggctccgcaatgctgcagctgcccccgggcgcccccgccgccgccctcgccgcggagccgcgcggagcggagccggcgagctaacccgagccagccggcgggcgtcccggaggcggtggcgcagggaggggcccgacgctcgcacgtggccccggcggccgccatggcggacagcggcaccgcggggggcgcggcgttggcggccccggcccccgggccgggcagtggcggcccaggaccacgcgtctactttcagagcccccccggggccgcaggagagggcccgggcggggcggacgatgagggcccagtgaggcgccaagggaaggtcaccgtcaagtatgaccgcaaggagctacggaagcgcctcaacctagaggagtggatcctggagcagctcacgcgcctctacgactgccaggaagaggagatcccagaactggagattgacgtggatgagctcctggacatggagagtgacgatgcccgggctgccagggtcaaggagctgctggttgactgttacaaacccacagaggccttcatttctggcctgctggacaagatccggggcatgcagaagctgagcacaccccagaagaagtgagggtccccgacccaggagaacggtggctcccacaggacaatcgctgccccccaacctcgtagcaacagcaataccgggggaccctgcggccaggcctggtgccatgagcagggctcctcgtgcccctggcccaggggtctcttcccctgccccctcagttttccacttttggggttttttattgttattaaactgatgggactttttgtgtaaaaaaaaaccttcgtgccg

SEQ ID NO: 382925 - DNA, 600 bp, Homo sapiens
gctgccgccggggcacgtgcgagcgtcgggcccctccctgcgccaccgcctccgggacggcgggtggcggcccaggaccacgcgtctactttcagagcccccccggggccgcaggagagggcccgggcggggcggacgatgagggcccagtgaggcgccaagggaaggtcaccgtcaagtatgaccgcaaggagctacggaagcgcctcaacctagaggagtggatcctggagcagctcacgcgcctctacgactgccaggaagaggagatcccagaactggagattgacgtggatgagctcctggacatggagagtgacgatgcccgggctgccagggtcaaggagctgctggttgactgttacaaacccacagaggccttcatttctggcctgctggacaagatccggggcatgcagaagctgagcacaccccagaagaagtgagggtccccgacccaggagaacggtggctcccacaggacaatcgctgccccccaacctcgtagcaacagcaataccgggggtctcttcccctgccccctcagttttccacttttggggttttttattgttattaaactgatgggactttttgtgt

SEQ ID NO: 382926 - DNA, 884 bp, Homo sapiens
ggacggcgtgggtcgacccacgcgtccggcagctcacgcgcctctacgactgccaggaagaggagatcccagaactggagattgacgtggatgagctcctggacatggagagtgacgatgcccgggctgccagggtcaaggagctgctggttgactgttacaaacccacagaggccttcatttctggcctgctggacaagatccggggcatgcagaagctgagcacaccccagaagaagtgagggtccccgacccaggagaacggtggctcccacaggacaatcgctgccccccaacctcgtagcaacagcaataccgggggaccctgcggccaggcctggtgccatgagcagggctcctcgtgcccctggcccaggggtctcttcccctgccccctcagttttccacttttggggttttttattgttattaaactgatgggactttttgtgtttttatattgactctgcggcgcgggccctttaataaagctaggatacgcctttggtgcagcaaaaacaaacaagcaaaaaaaaacacacaaaaaaaacaaaaaacacagaagaggggggaggcagcaaagagaaataccacacaggggggcaccaaaaatacgaagatcacacgagaatacgtggaacaaaggggccacaaaaagaggacagcgcaaaaaaagcagaagagacacgagccgccgcgatataacaacacgaccgactaagaaggcggggaacaacaaagcggcaaccgagggacaccacttgcgggagaagacccccacacacacgcgggggagggcacaacgatggggcacaaccaacccgcagagcagattagcgcgaccaccagcggaacagacaacaacatcagagggacaaaaggga

SEQ ID NO: 382927 - DNA, 848 bp, Homo sapiens
cggctgcagctcgggcggcggccgcgggggacaaagggcgggcggatcggcggggagggggcggggcgcggccaggccaagcccgggggctccgcaatgctgcagctgcccccgggcgcccccgccgccgccctcgccgcggagccgcgcggagcggagccggcgagctaacccgagccagccggcgggcgtcccggaggcggtggcgcagggaggggcccgacgctcgcacgtggccccggcggccgccatggcggacagcggcaccgcggggggcgcggcgttggcggccccggcccccgggccgggcagtggcggcccaggaccacgcgtctactttcagagcccccccggggccgcaggagagggcccgggcggggcggacgatgagggcccagtgaggcgccaagggaaggtcaccgtcaagtatgaccgcaaggagctacggaagcgcctcaacctagaggagtggatcctggagcagctcacgcgcctctacgactgccaggaagaggagatcccagaactggagattgacgtggatgagctcctggacatggagagtgacgatgcccgggctgccagggtcaaggagctgctggttgactgttacaaacccacagaggccttcatttctggcctgctggacaagatccggggcatgcagaagctgagcacaccccagaagaagtgagggtccccgacccaggagaacggtggctcccacaggacaatcgctgccccccaacctcgtagcaacagcaataccgggggtctcttcccctgccccctcagttttccacttttggggttttttattgttattaaactgatgggactttttgtgt

SEQ ID NO: 382928 - DNA, 718 bp, Homo sapiens
gctgccgccggggcacgtgcgagcgtcgggcccctccctgcgccaccgcctccgggacggcgggtggcggcccaggaccacgcgtctactttcagagcccccccggggccgcaggagagggcccgggcggggcggacgatgagggcccagtgaggcgccaagggaaggtcaccgtcaagtatgaccgcaaggagctacggaagcgcctcaacctagaggagtggatcctggagcagctcacgcgcctctacgactgccaggaagaggagatcccagaactggagattgacgtggatgagctcctggacatggagagtgacgatgcccgggctgccagggtcaaggagctgctggttgactgttacaaacccacagaggccttcatttctggcctgctggacaagatccggggcatgcagaagctgagcacaccccagaagaagtgagggtccccgacccaggagaacggtggctcccacaggacaatcgctgccccccaacctcgtagcaacagcaataccgggggaccctgcggccaggcctggtgccatgagcagggctcctcgtgcccctggcccaggggtctcttcccctgccccctcagttttccacttttggggttttttattgttattaaactgatgggactttttgtgtttttatattgactctgcggcgcgggccctttaataaagctaggatacgcctttggtgcagc

SEQ ID NO: 382929 - DNA, 528 bp, Homo sapiens
ggatcccccccccgactagcccgacagggagtggatcctggagcagctcacgcgcctctacgactgccaggaagaggagatcccagaactggagattgacgtggatgagctcctggacatggagagtgacgatgcccgggctgccagggtcaaggagctgctggttgactgttacaaacccacagaggccttcatttctggcctgctggacaagatccggggcatgcagaagctgagcacaccccagaagaagtgagggtccccgacccaggagaacggtggctcccacaggacaatcgctgccccccaacctcgtagcaacagcaataccgggggaccctgcggccaggcctggtgccatgagcagggctcctcgtgcccctggcccaggggtctcttcccctgccccctcagttttccacttttggggttttttattgttattaaactgatgggactttttgtgtttttatattgactctgcggcgcgggccctttaataaagctaggatacgcctttggtgcagc

SEQ ID NO: 382930 - DNA, 1011 bp, Homo sapiens
cggctgcagctcgggcggcggccgcgggggacaaagggcgggcggatcggcggggagggggcggggcgcggccaggccaagcccgggggctccgcaatgctgcagctgcccccgggcgcccccgccgccgccctcgccgcggagccgcgcggagcggagccggcgagctaacccgagccagccggcgggcgtcccggaggcggtggcgcagggaggggcccgacgctcgcacgtggccccggcggccgccatggcggacagcggcaccgcggggggcgcggcgttggcggccccggcccccgggccgggcagtggcggcccaggaccacgcgtctactttcagagcccccccggggccgcaggagagggcccgggcggggcggacgatgagggcccagtgaggcgccaagggaaggtcaccgtcaagtatgaccgcaaggagctacggaagcgcctcaacctagaggagtggatcctggagcagctcacgcgcctctacgactgccaggaagaggagatcccagaactggagattgacgtggatgagctcctggacatggagagtgacgatgcccgggctgccagggtcaaggagctgctggttgactgttacaaacccacagaggtaagagatttcctggggggctggcgggggtggcagggtgaggggagcccggctcctgtcatcttggggtctggtctccttaatgtttaccctcccaccccatccagccttcatttctggcctgctggacaagatccggggcatgcagaagctgagcacaccccagaagaagtgagggtccccgacccaggagaacggtggctcccacaggacaatcgctgccccccaacctcgtagcaacagcaataccgggggaccctgcggccaggcctggtgccatgagcagggctcctcgtgcccctggcccaggggtctcttcccctgccccctcagttttccacttttggggttttttattgttattaaactgatgggactttttgtgt

SEQ ID NO: 382931 - DNA, 582 bp, Homo sapiens
gggggccctttacacattgatctccggctctctcacagacacacaacggatgacctacaccaatcatatacttttatatctcccccgggaccaacagatagggccctgtcggggtatacgatgagggcccagtgaggcgccaagggaaggtcaccgtcaagtatgaccgcaaggagctacggaagcgcctcaacctagaggagtggatcctggagcagctcacgcgcctctacgactgccaggaagaggagatcccagaactggagattgacgtggatgagctcctggacatggagagtgacgatgcccgggctgccagggtcaaggagctgctggttgactgttacaaacccacagaggccttcatttctggcctgctggacaagatccggggcatgcagaagctgagcacaccccagaagaagtgagggtccccgacccaggagaacggtggctcccacaggacaatcgctgccccccaacctcgtagcaacagcaataccgggggtctcttcccctgccccctcagttttccacttttggggttttttattgttattaaactgatgggactttttgtgt

SEQ ID NO: 382932 - DNA, 640 bp, Homo sapiens
  misc_feature (620)..(620): n is a, c, g, or t
  misc_feature (625)..(625): n is a, c, g, or t
cggctgcagctcgggcggcggccgcgggggacaaagggcgggcggatcggcggggagggggcggggcgcggccaggccaagcccgggggctccgcaatgctgcagctgcccccgggcgcccccgccgccgccctcgccgcggagccgcgcggagcggagccggcgagctaacccgagccagccggcgggcgtcccggaggcggtggcgcagggaggggcccgacgctcgcacgtggccccggcggccgccatggcggacagcggcaccgcggggggcgcggcgttggcggccccggcccccgggccgggcagtggcggcccaggaccacgcgtctactttcagagcccccccggggccgcaggagagggcccgggcggggcggacgatgagggcccagtgaggcgccaagggaaggtcaccgtcaagtatgaccgcaaggagctacggaagcgcctcaacctagaggagtggatcctggagcagctcacgcgcctctacgactgccaggaagaggagatcccagaactggagattgacgtggatgagctcctggacatggagagtgacgatgcccgggctgccagggtcaaggagctgctccaggatccactcctctagnttganggccgcttctcgtgc

SEQ ID NO: 382933 - DNA, 688 bp, Homo sapiens
  misc_feature (9)..(9): n is a, c, g, or t
  misc_feature (14)..(14): n is a, c, g, or t
ggggccgcngtttngcggccggcccccgggcacgtggcggcccaggaccacgcgtctactttcagagcccccccggggccgcaggagagggcccgggcggggcggacgatgagggcccagtgaggcgccaagggaaggtcaccgtcaagtatgaccgcaaggagctacggaagcgcctcaacctagaggagtggatcctggagcagctcacgcgcctctacgactgccaggaagaggagatcccagaactggagattgacgtggatgagctcctggacatggagagtgacgatgcccgggctgccagggtcaaggagctgctggttgactgttacaaacccacagaggccttcatttctggcctgctggacaagatccggggcatgcagaagctgagcacaccccagaagaagtgagggtccccgacccaggagaacggtggctcccacaggacaatcgctgccccccaacctcgtagcaacagcaataccgggggaccctgcggccaggcctggtgccatgagcagggctcctcgtgcccctggcccaggggtctcttcccctgccccctcagttttccacttttggggttttttattgttattaaactgatgggactttttgtgtttttatattgactctgcggcgcgggccctttaataaagctaggatacgcctttggtgcagc

SEQ ID NO: 382934 - DNA, 905 bp, Homo sapiens
cggctgcagctcgggcggcggccgcgggggacaaagggcgggcggatcggcggggagggggcggggcgcggccaggccaagcccgggggctccgcaatgctgcagctgcccccgggcgcccccgccgccgccctcgccgcggagccgcgcggagcggagccggcgagctaacccgagccagccggcgggcgtcccggaggcggtggcgcagggaggggcccgacgctcgcacgtggccccggcggccgccatggcggacagcggcaccgcggggggcgcggcgttggcggccccggcccccgggccgggcagtggcggcccaggaccacgcgtctactttcagagcccccccggggccgcaggagagggcccgggcggggcggacgatgagggcccagtgaggcgccaagggaaggtcaccgtcaagtatgaccgcaaggagctacggaagcgcctcaacctagaggagtggatcctggagcagctcacgcgcctctacgactgccaggaagaggagatcccagaactggagattgacgtggatgagctcctggacatggagagtgacgatgcccgggctgccagggtcaaggagctgctggttgactgttacaaacccacagaggccttcatttctggcctgctggacaagatccggggcatgcagaagctgagcacaccccagaagaagtgagggtccccgacccaggagaacggtggctcccacaggacaatcgctgccccccaacctcgtagcaacagcaataccgggggaccctgcggccaggcctggtgccatgagcagggctcctcgtgcccctggcccaggggtctcttcccctgccccctcagttttccacttttggggttttttattgttattaaactgatgggactttttgtgt

SEQ ID NO: 382935 - DNA, 864 bp, Homo sapiens
ggcgccgctggagcctgctgcggagcgggagcctggttgatgctacaccctgatgccatgcctggctggtgctgttccctgtgagtgcgtgtgtgctgcatgtggatgtgtgtgccctgactgctctgcactgtgtgcccctgtgctgtgcctggccatggctggacatgctgtgcacctgctggtggtgtgctgctggctgtttgtgctgtgcccctgtgccccctgtgtgcctgtggcatgttgtgctgtgcccatgtgaccactgctgtctacatttcaagatgcacccccctgtgtggcctgcatgtgacgatgtgtgccctggtgctgtggggctggacgatgagggcccagtgaggcgccaagggaaggtcaccgtcaagtatgaccgcaaggagctacggaagcgcctcaacctagaggagtggatcctggagcagctcacgcgcctctacgactgccaggaagaggagatcccagaactggagattgacgtggatgagctcctggacatggagagtgacgatgcccgggctgccagggtcaaggagctgctggttgactgttacaaacccacagaggccttcatttctggcctgctggacaagatccggggcatgcagaagctgagcacaccccagaagaagtgagggtccccgacccaggagaacggtggctcccacaggacaatcgctgccccccaacctcgtagcaacagcaataccgggggaccctgcggccaggcctggtgccatgagcagggctcctcgtgcccctggcccaggggtctcttcccctgccccctcagttttccacttttggggttttttattgttattaaactgatgggactttttgtgt

SEQ ID NO: 382936 - DNA, 1219 bp, Homo sapiens
  misc_feature (980)..(980): n is a, c, g, or t
  misc_feature (986)..(986): n is a, c, g, or t
  misc_feature (1059)..(1059): n is a, c, g, or t
cggctgcagctcgggcggcggccgcgggggacaaagggcgggcggatcggcggggagggggcggggcgcggccaggccaagcccgggggctccgcaatgctgcagctgcccccgggcgcccccgccgccgccctcgccgcggagccgcgcggagcggagccggcgagctaacccgagccagccggcgggcgtcccggaggcggtggcgcagggaggggcccgacgctcgcacgtggccccggcggccgccatggcggacagcggcaccgcggggggcgcggcgttggcggccccggcccccgggccgggcagtggcggcccaggaccacgcgtctactttcagagcccccccggggccgcaggagagggcccgggcggggcggacgatgagggcccagtgaggcgccaagggaaggtcaccgtcaagtatgaccgcaaggagctacggaagcgcctcaacctagaggagtggatcctggagcagctcacgcgcctctacgactgccaggaagaggagatcccagaactggagattgacgtggatgagctcctggacatggagagtgacgatgcccgggctgccagggtcaaggagctgctggttgactgttacaaacccacagaggccttcatttctggcctgctggacaagatccggggcatgcagaagctgagcacaccccagaagaagtgagggtccccgacccaggagaacggtggctcccacaggacaatcgctgccccccaacctcgtagcaacagcaataccgggggaccctgcggccaggcctggtgccatgagcagggctcctcgtgcccctggcccaggggtctcttcccctgccccctcagttttccacttttggggttttttattgttattaaactgatgggactttttgtgtttttatattgactctgcggcgcgggccctttaataaagctaggatacgcctttggtgcagcgtaccatgtctttngttttncctcatgaaaggctcaacccagcattttgtataggctatgtacaacaggcaaagttttgtattcaagaatttnacgttagctgcctcaatttatagctgtggtagtttgtccactggggtgtcaaatttgaagtctgtaggaaacagatctggggctcgagggtagatccagtctataggactgtctgattgtaaacatcagcaacacccagcaatatctccaatttcttttt

SEQ ID NO: 382937 - DNA, 765 bp, Homo sapiens
cggctgcagctcgggcggcggccgcgggggacaaagggcgggcggatcggcggggagggggcggggcgcggccaggccaagcccgggggctccgcaatgctgcagctgcccccgggcgcccccgccgccgccctcgccgcggagccgcgcggagcggagccggcgagctaacccgagccagccggcgggcgtcccggaggcggtggcgcagggaggggcccgacgctcgcacgtggccccggcggccgccatggcggacagcggcaccgcggggggcgcggcgttggcggccccggcccccgggccgggcagtggcggcccaggaccacgcgtctactttcagagcccccccggggccgcaggagagggcccgggcggggcggacgatgagggcccagtgaggcgccaagggaaggtcaccgtcaagtatgaccgcaaggagctacggaagcgcctcaacctagaggagtggatcctggagcagctcacgcgcctctacgactgccaggaagaggagatcccagaactggagattgacgtggatgagctcctggacatggagagtgacgatgcccgggctgccagggtcaaggagctgctggttgactgttacaaacccacagaggccttcatttctggcctgctggacaagatccggggcatgcagaagctgagcacaccccagaagaagtgagggtccccgacccaggagaacggtggctcccacaggacatcgtcggccgctgtggatcctatagagtcggg

SEQ ID NO: 382938 - DNA, 1072 bp, Homo sapiens
cggctgcagctcgggcggcggccgcgggggacaaagggcgggcggatcggcggggagggggcggggcgcggccaggccaagcccgggggctccgcaatgctgcagctgcccccgggcgcccccgccgccgccctcgccgcggagccgcgcggagcggagccggcgagctaacccgagccagccggcgggcgtcccggaggcggtggcgcagggaggggcccgacgctcgcacgtggccccggcggccgccatggcggacagcggcaccgcggggggcgcggcgttggcggccccggcccccgggccgggcagtggcggcccaggaccacgcgtctactttcagagcccccccggggccgcaggagagggcccgggcggggcggacgatgagggcccagtgaggcgccaagggaaggtcaccgtcaagtatgaccgcaaggagctacggaagcgcctcaacctagaggagtggatcctggagcagctcacgcgcctctacgactgccaggaagaggagatcccagaactggagattgacgtggatgagctcctggacatggagagtgacgatgcccgggctgccagggtcaaggagctgctggttgactgttacaaacccacagaggtaagagatttcctggggggctggcgggggtggcagggtgaggggagcccggctcctgtcatcttggggtctggtctccttaatgtttaccctcccaccccatccagccttcatttctggcctgctggacaagatccggggcatgcagaagctgagcacaccccagaagaagtgagggtccccgacccaggagaacggtggctcccacaggacaatcgctgccccccaacctcgtagcaacagcaataccgggggaccctgcggccaggcctggtgccatgagcagggctcctcgtgcccctggcccaggggtctcttcccctgccccctcagttttccacttttggggttttttattgttattaaactgatgggactttttgtgtttttatattgactctgcggcgcgggccctttaataaagctaggatacgcctttggtgcagc

SEQ ID NO: 382939 - DNA, 888 bp, Homo sapiens
cggctgcagctcgggcggcggccgcgggggacaaagggcgggcggatcggcggggagggggcggggcgcggccaggccaagcccgggggctccgcaatgctgcagctgcccccgggcgcccccgccgccgccctcgccgcggagccgcgcggagcggagccggcgagctaacccgagccagccggcgggcgtcccggaggcggtggcgcagggaggggcccgacgctcgcacgtggccccggcggccgccatggcggacagcggcaccgcggggggcgcggcgttggcggccccggcccccgggccgggcagtggcggcccaggaccacgcgtctactttcagagcccccccggggccgcaggagagggcccgggcggggcggacgatgagggcccagtgaggcgccaagggaaggtcaccgtcaagtatgaccgcaaggagctacggaagcgcctcaacctagaggagtggatcctggagcagctcacgcgcctctacgactgccaggaagaggagatcccagaactggagattgacgtggatgaggccttcatttctggcctgctggacaagatccggggcatgcagaagctgagcacaccccagaagaagtgagggtccccgacccaggagaacggtggctcccacaggacaatcgctgccccccaacctcgtagcaacagcaataccgggggaccctgcggccaggcctggtgccatgagcagggctcctcgtgcccctggcccaggggtctcttcccctgccccctcagttttccacttttggggttttttattgttattaaactgatgggactttttgtgtttttatattgactctgcggcgcgggccctttaataaagctaggatacgcctttggtgcagc

SEQ ID NO: 382940 - DNA, 344 bp, Homo sapiens
cgaactcctgacctcaggtagtccacctgcctcggcctcccaaagtgccaagattacaggcgtgagccaccacacccggccaagcctgttaaattaacaaatgctctggataatgagaccgggcacttggtaggcatcttaactcaaagataggatgtgttaagtaaaagaatgataattccaatctcaagaaccttctttaacatgcttaaaagaactaaccttttaagcgtttagaaaggtgaacacctgatatgctaattacagttcattcccatctattcctgaagccaggcctctagaatcaggcattatatagcccttctcaatagcatgtgaatacc

SEQ ID NO: 382941 - DNA, 335 bp, Homo sapiens
aaagccaaacctaagaaagtgactttgggtccagctggggcctgagggacaatcagggtcagggctggggatccagggtgtcctgcctgtgccagcccggaaaacaaggcacatcagcaccaagtcaccaaggccctccttctctcacaagctcccctccctgtgggctctttccccgcctgctggacccaggttccagctggaggggaggaagccactaagatgcagtgggggaaagtgatgccctcacaaacataataccacgacaccacaccccgggacaccccccagtcaccacccacagcctcccagtggcttcgtgggggatgtgggtt

SEQ ID NO: 382942 - DNA, 511 bp, Homo sapiens
agctattgaatacatttaagtagctaggaaacaaggtggtataggaaatagggaaaagaatagagaaagaaaatggttttaaagaattcttccctttggagtgaatttgaagcttcttgttctattttcaatgcaaaatctccaatattcaccttatagcaatacaaaaatagagtttggactacagaaaccacagttgtgcatatataaaatgttctcaataaatctttgcttattgagtcacagttacttccataataacttaagaaataaagagaatgcagatgcttcctaaagtgagcatatgggaaaatgggtaagttttgataactcttttattcaaggtttttcctccattatagaaataatatgctagaaataaagcatgtacctataatggagtaatttttttgagagaaattgaacacttttttttcttttaactaccttcttttattcacttgtactatcaggaatatccatatagacaaaaataaagcaagtttggggt

SEQ ID NO: 382943 - DNA, 429 bp, Homo sapiens
ctctaggttattagtatttggttcttctgatactaagctgagtgattttttttaaaacaatgtctctggtagtctgattgagatatgaaacttttgggaagaaaaccattatgtaacaagaatcctatgtaacaactgggtaaatgttttagaatgagagataggaaagaacatctaaatagtacttttttgtgggacgcatgagcctttatacagcctagctaatttgcaaggtaatgataaataaaagtgtattttgttactgtgcttaattcagaaattcaaattcatgtatttcctattggataatttgtaggcgggcagtttactttatagtcaggttagtttttgtgatccttagtgtttatatttgcattgcttttgtaataaggatgtatataagatcttaaacgcctttcaacttctgtt

SEQ ID NO: 382944 - DNA, 168 bp, Homo sapiens
ctgacatgctgtggtacacacttatagtcccagcgacttggaaagctgaggcaggaggattgcttgatcccaggagtttgaggtagtgtgcgatgatcgttcttgtgaatagccactagccactgaactccagcttgggcaacattgagacaccctgtctcttaattt

SEQ ID NO: 382945 - DNA, 385 bp, Homo sapiens
cccggatcctgcatgggttccagtaggccctcctgggacttggaagtgagctggtgtgctcggggttcatcagctccgtccagtcacctgactggcttttccttccactccaccatcccagcccagatgacaagggcacagtatggccttgtgacttgggaagtcctgggtaggttctctgtggctcacttcaagaggaggccagggtgacgcacagtgtacttcagagaccccagagccacctggacctgagtccctgtgaatggacacgtgacgggcctcactgggtgtgcagtaagataaaacatctccttaatctcagagagagcctgtgttaataagcacgtgcctggcctggcaccagatgcggcacagagaagagacg

SEQ ID NO: 382946 - DNA, 377 bp, Homo sapiens
ttcttccagagagtattgagttccacgagagaaaggcctttgttggttcactgctggattgctggtttctataatatttcatggcacatagtaaactgccaataaatatttgctgaatgaattcacttattcagaaaatatttattgagtgtctcttgtatgccacatatctaggcactgaggatagaacagtgaatgggccaaagtcctgactttttggaatttattttcaagtgggaagagagagattataaaatacgtgaccctgaaaatatatgtcatatgtctgatgttgatagtgccaagaagaaaaataaagcaggacaaggtgtggggagagagaattattatcctagctaaggaattaagtgaaggcc

SEQ ID NO: 382947 - DNA, 1109 bp, Homo sapiens
ggaaagagaagctatgggagagacaaagggaagtaaaaaatggttgttcggctcagcataacaatcacttttgtggggcttattggttgtgcataaatttcatccatttgggcacacacacagatgtgacacccagaccactcagacacttggctaacactgatgccgtcatcctgaatgttgtttctggaaggactttcatgaatagaatctatttcagattggccgtaagtctcgatttattgatccgcaccactggactggggtggggttgtgtccactttttccctgccccttccctgctttggctcttgtgattgtgtcctccgtgtgtcaggcagagccctgtgaaggtgtggatatgtggccatattttacctgcataatctgcagttcatatgattcagcctaatgggttgcaatgccctgaggacagagaccatactttttcttcctttgtctttttagcgaaattcaatcctgttctgcgcctgcgccacagttgcaggctgtactgtctgccctgtgcatctcacacacccccactgcactgtgcacctagtgatggccgcagatttgcttttactcatcttccagggcctaccctgttaattccatcacagttgcaggctgtactgtctgccctgtgcatctcacacacccccactgcactgtgcacctagtgatggccgcagatttgcttttactcatctgtttgcagggcctaccctgttaattccatcacagttgcaggctctactgtctgccctgtgcatgcatctcacacacccactggactgtgcacctagttgatgaccacagatttgctcttacccatctatttccagggcctgccactgttaattcctaggaaaaaagaaaaaacaagcatggtggattggttaaattggcattttatattgtttgtgttcatgccatgccaatgataaacaagagctggtcatgggcattcagatcagatgagcaattaaatcccctccaaaaaacagaaacctacttttagagaagaaaagaattaaaccaagatctttcagggttttgcttctccttttgtttttaaggcacttaaataaatggaagaacatgta

SEQ ID NO: 382948 - DNA, 407 bp, Homo sapiens
tcaaaaaaaaaaaaaaaaaaaggaaatctttcctttcagccaagcaaaatgatcgttagatattatccactcttaaaggttagcctaggttctgaataaagaactagaagccggctgggtacagtggctcatgcctgttaatcccagtactttgggaggccaaggcgggcagagcacctgaggtcaggagttcaagaccagcctggccaatgtagtgaaaccccgtctctactaaaaaaatacaaaaattagctgggcgtggcggtgtgcgcctgtaatcccaactactagggaggctgaggcaggagaattgcttgaacccaggaggtggaggttgcaatgagccaagatcgcgccattacactccagcctggggaacaggagcaaaactccgtctcaaaaaaaga

SEQ ID NO: 382949 - DNA, 695 bp, Homo sapiens
  misc_feature (688)..(688): n is a, c, g, or t
  misc_feature (691)..(695): n is a, c, g, or t
catggctatgactgaaatcaatgttgggaagctaatgttttcatgactagcattctctctctgttcaagcaccgacaactccttttggctgggccttgcctcttttggccacagaccttctatatgaccccaggtgcatcagtcacagttgctcagaaccctgctcagtgataaacatcttactaaagctgggtcaatcagggtcactctctggaatgttaaacatgaagcctgagacaagatctctcttttatctggggtccccaaaggcaatgctgtacacttggagctgcctgctgccctgcaactactcccatttaccaattatctggaagaaccagtctacaatagaagacaacgaggccaacacacaaaaacacagtaaaagtatggacaaattagtgggatccctgaaatctattccaactatgtgcttccaagtcacatgactcaataaatgcttcagctggttgagttgtgcttggcgttcactaccaggagagttctgattaataaaaactcattccatcaattaataatttagtagctctctttcaacctgagccaaattcaagcataagctaaaggataagcagtgacccatggccaatttcctatgtcatacacttgccattagtgacgtaagttaagccattcttcaaaacattaaacagccttcaagaacaanaannnnn

SEQ ID NO: 382950 - DNA, 7037 bp, Homo sapiens
cgccacccccgggctcgggtggccccgcttcagtcccagggcagggatccttccatgaagactgaggcaggcggagctgctaagagcctgctgacatgacatcggccacagagtttgaaaatgtgggcaaccagccaccttacagcaggatcaatgcccgctgggacgccccagacgacgagctggataatgacaatagctcagccaggctctttgagaggtcccggataaaggccttggcagatgagcgggaagttgttcagaaaaagaccttcacgaaatgggtgaactcgcacctggctcgagtgtcctgccgcatcaccgatctctacaaggacctgcgggatgggcgcatgctcatcaagctgctggaggtgctctctggagagatgctgccaaagcccaccaaggggaagatgcgcatccactgcctggagaatgtggacaaggctctccagttcctcaaggagcagcgtgtacacctggagaacatgggctcccatgacattgtagatggcaaccaccgcctggtcctgggcctcatctggaccatcatcctccgcttccagattcaggacattgtggtccaaactcaggaaggtcgtgaaacacgctcagccaaggatgcgttgctgttgtggtgtcagatgaagacggcaggctaccctcatgttaatgtcaccaactttacctccagctggaaggatggcttggcctttaatgccctgatacacaagcaccggcccgacctgatcgactttgataagctgaaggactccaatgcccggcacaacctggagcacgcattcaatgtggctgagcgccagctgggcatcatcccgctcctcgaccccgaagatgtctttacggaaaaccctgatgagaaatccatcatcacctatgtggtggccttttaccactacttctccaagatgaaggtgctggcagtggagggcaagcgtgtcggcaaggttattgaccatgccattgagactgagaagatgattgaaaagtacagcgggctagcctcggacctgctcacctggatcgagcagaccatcactgtcctgaacagccgcaagtttgccaactcgctgacgggcgtccagcagcagctgcaggccttcagcacctaccgcaccgtggagaagccgcccaagtttcaagagaaggggaatctggaagttctactttttaccatccagtcccggatgagagccaacaatcagaaagtgtacacaccccacgatgggaaactagtgtctgacatcaacagggcctgggaaagcctggaggaagctgggtatcggcgggagctggccctgagaaatgagctcattcggcaggagaagctagagcaactagcccggcgctttgaccggaaggccgcaatgagagagacctggctcaatgaaaaccagcgcctcgtggcccaggataactttgggtatgacctggcagctgtggaggccgccaagaagaagcatgaggccatcgagaccgacacggctgcctacgaggagcgggtgagagccctggaggacctggctcaggagctggagaaagagaactaccatgaccagaagcgcatcacggcccgcaaggacaatatactgcgcctatggagctacctgcaggagctgctgcagtcccggcgccagaggctcgagaccaccctggcactgcagaagctcttccaggacatgctgcacagcatcgactggatggatgagatcaaggctcacctcttgtctgccgagtttgggaagcacttgttggaggttgaagacctgctacagaagcacaagttgatggaagctgacatcgccatccaaggggacaaagtgaaggccatcaccgcagccaccctgaagttcaccgaggggaaagggtaccagccttgtgacccccaggtcatccaggaccgcatgagccacttggagcagtgctttgaggagctgagcaacatggcagctggcgcaaggacccaactggagcagtccaaacgactctggaagttcttctgggagatggatgaggctgagagctggatcaaggagaaggagcagatctattcttccctggactatggcaaagacctgaccagtgtgctcatcttacagcgcaagcacaaggcctttgaggatgagctccgtgggctggatgctcacctggagcagatcttccaggaggctcatggcatggttgcgcgcaagcagtttgggcacccgcagatcgaggcccgcatcaaggaggtgtcggcacagtgggaccagctgaaggacctggctgccttctgcaagaagaacctccaggatgctgagaactttttccagttccagggcgatgcggatgacctgaaggcttggctgcaagacgcccaccggctgctctctggtgaagatgtggggcaggacgaaggggccacgcgggccctggggaaaaagcacaaggacttcctggaggagctggaggagagccgtggggtgatggagcacctggagcagcaggcccagggattccccgaagagtttcgggattccccagatgtgacccatcggctgcaggccctgcgggagctctaccaacaggtggtggcccaggcggacctgcgtcagcagaggctgcaggaagccctggacctgtacacggtgttcggggagacagacgcctgtgagctgtggatgggagagaaggagaagtggctggccgagatggaaatgccagacaccctggaggacctggaggtcgtgcagcacaggttcgacatcctggaccaggagatgaagaccttgatgactcagattgatggtgtgaacctcgctgccaacagcttggtagagagtggccacccacgcagcagggaggtgaagcagtaccaggaccatctgaacaccaggtggcaggcatttcagaccctggtgtcggagcggcgggaggctgtggactcagccctccgagtgcacacactactgcgtagattgcgaggagaccagcaagtggatcacggacaagacaaaggtagtggagtccacaaaagacctggggcgggacctggcaggtatcatcgccatccagaggaagttgtcagggctggagcgtgacgtggccgccatccaggcccgtgtggatgccctggagcgtgagtcccagcagctgatggactcgcaccctgagcagaaggaggatattggtcagcggcaaaaacacttggaggagctgtggcagggcctgcagcaatccctgcagggccaggaggacttgctgggggaagtcagccagctgcaggccttcctgcaggatctggatgacttccaggcctggctctccatcacccagaaggctgtggcctctgaggacatgcccgaatccctcccagaggctgagcagctcctgcagcagcatgcaggtatcaaggatgagattgacgggcaccaagacagctaccagcgtgttaaggagtctggggagaaagtgatccaaggccagacggacccagagtatctgcttctgggccagcggctggagggcctggatactggctgggatgccctgggcaggatgtgggagagccgcagccacaccctcgctcagtgccttggcttccaggagttccagaaagatgccaagcaggctgaagccatcctcagcaaccaggaatacactctggctcacttggagcccccagactccctggaagctgcagaggctgggatccggaagtttgaggatttcttggggtctatggagaacaaccgggataaggtcttgagtcctgtggactctggaaacaagctggtagctgagggaaacctatactcagacaagatcaaggagaaggtgcagctgattgaggacaggcacaggaagaacaacgagaaggcccaggaggcctctgtcctactgagagacaacctggagctacagaacttcctccagaactgccaggagctcactctctggatcaacgacaagctgctgacatctcaggatgtctcctatgatgaagcacgaaaccttcacaataaatggctaaagcaccaggcgtttgtggcagagctggcttcccatgaagggtggctagagaacatcgatgcggaaggaaagcagctgatggatgagaagccccagtttacagccctggtgtcccaaaagctggaagccctgcaccggctctgggacgagctgcaggccaccacaaaggagaagacccagcacctctcggctgccaggagctccgacctgcgcttgcagacccatgctgacctcaacaagtggatcagcgccatggaggaccagctgcggtcagacgacccgggcaaggacctgaccagtgtcaatcggatgttggctaagctgaagcgagtggaggaccaagtgaatgtgcggaaagaggagctgggggagctgtttgcccaggtgccttcaatgggagaggagggaggagatgcagacttgagcatcgagaagcggttcctggacctcctggaacccctaggaaggaggaagaagcagctggaatcatccagagccaagctgcagatcagccgggacttagaggatgagacgctttgggtggaggagaggctgcctctggcccagtcagccgactatggcactaatctgcaaactgtgcaactgttcatgaagaagaaccagacactgcagaatgagattctgggccatacgccgcgggttgaggatgtgctgcagagagggcagcagctggtggaggcggcggagatcgactgccaggaccttgaggagcgcctggggcacctgcagagctcctgggacaggctgcgggaggcagcggccgggaggctgcagcgactgagggacgccaatgaggcacagcagtactacctggatgcggacgaggctgaggcctggattggcgagcaggagctctatgtcatctccgatgagatccccaaggatgaagagggcgccatcgtgatgctgaagcgacatttgcggcagcagcgtgcggtggaggactacggccggaacatcaagcagctggccagccgggcccagggcctgctgtctgcaggccaccctgagggggaacagatcatcagacttcaggggcaagtggacaagcactacgcagggctgaaggacgtggcggaagagcgcaagcgcaagctggagaacatgtaccacctgttccagctcaagcgggagaccgacgacctggagcagtggatttcagaaaaggagctagtggcctcttccccggaaatggggcaagactttgaccacgtgactcttctgcgggacaagttccgggactttgcccgggagaccggggcgattgggcaggagcgggtggacaatgtgaatgccttcatcgagcgactcatcgacgcgggccacagcgaggcggccaccatcgccgagtggaaggacgggctgaacgagatgtgggcagacctcctggagctcattgacacgcgcatgcagctgctggccgcctcctatgacctgcaccgctacttctacacgggtgccgagatcctgggcctcatcgacgagaagcaccgcgagctgcccgaggacgtggggctggacgccagcacggccgagtccttccaccgggtgcacacagccttcgagcgggacgttcacctgctgggtgtccaggtgcagcagttccaggacgtggccacccgtctgcagacagcatatgctggggagaaggcagaggccatccagaacaaggagcaggaggtgtctgccgcgtggcaggcgctgctcgatgcctgtgccgggcgccggacccagctagtggacacggcggataaattccgcttcttcagcatggcccgtgacctcctctcctggatggagagcatcatccggcagatcgagacccaggagaggcccagggatgtctcctctgtggaactgctcatgaagtatcaccagggcatcaatgcagagattgaaacccggagcaagaacttcagtgcctgcctggagcttggcgagtccctgctgcagcggcagcaccaggcctcagaggagatccgcgagaaactgcagcaggtgatgtccaggaggaaagagatgaatgagaagtgggaagcccgctgggagcggctccgcatgttgctggaggtgtgccagttctcgagggatgcctctgtggctgaggcgtggctgattgcccaggagccctacctggccagcggggactttggacacacagtggacagtgtggagaagctcatcaagaggcatgaggcttttgagaagtccacggccagctgggcagagcgctttgctgccctggagaagcccaccacgcttgagctgaaagaacgccagattgcagagagacccgcagaggagactgggcctcaagaggaggaaggcgagacagcaggggaggctccagtttcccaccatgcggccaccgagagaacgtccccggtcagtctctggtctcgtttgtctagttcctgggagtcactgcagccagagccctctcacccctactaggctcagcccaggtggaggcgagatgagctgcgcagccccgccctccatcctccccacatccctgcagccacctcccagcagagcaggctacgtcctcactgaggtgttcttcatgagagtactagcctcctccactcctccccacagcgcagaggaaacaggccagcccagtgacatgacgttattagttttgttttacctaatgtaataaattttattgtataaatatatcaccatttacatgaggggaaacactagccagagatgattagtgcatttctgtacaccgtccttttccccattttccaactccttcctctaggcagtactcaccccctgcacccacacctacacacaggcacatgcccacacacacatgcatgcacacacaaatacacacccacatgcacacacaccacacacccccatatatacagacacctcacgcacaaccacacacccacatacacatacacacacacatacacatacacacaaacacaccacacccacccacatgcacccac

SEQ ID NO: 382951 - DNA, 7437 bp, Homo sapiens
cgccacccccgggctcgggtggccccgcttcagtcccagggcagggatccttccatgaagactgaggcaggcggagctgctaagagcctgctgacatgacatcggccacagagtttgaaaatgtgggcaaccagccaccttacagcaggatcaatgcccgctgggacgccccagacgacgagctggataatgacaatagctcagccaggctctttgagaggtcccggataaaggccttggcagatgagcgggaagttgttcagaaaaagaccttcacgaaatgggtgaactcgcacctggctcgagtgtcctgccgcatcaccgatctctacaaggacctgcgggatgggcgcatgctcatcaagctgctggaggtgctctctggagagatgctgccaaagcccaccaaggggaagatgcgcatccactgcctggagaatgtggacaaggctctccagttcctcaaggagcagcgtgtacacctggagaacatgggctcccatgacattgtagatggcaaccaccgcctggtcctgggcctcatctggaccatcatcctccgcttccagattcaggacattgtggtccaaactcaggaaggtcgtgaaacacgctcagccaaggatgcgttgctgttgtggtgtcagatgaagacggcaggctaccctcatgttaatgtcaccaactttacctccagctggaaggatggcttggcctttaatgccctgatacacaagcaccggcccgacctgatcgactttgataagctgaaggactccaatgcccggcacaacctggagcacgcattcaatgtggctgagcgccagctgggcatcatcccgctcctcgaccccgaagatgtctttacggaaaaccctgatgagaaatccatcatcacctatgtggtggccttttaccactacttctccaagatgaaggtgctggcagtggagggcaagcgtgtcggcaaggttattgaccatgccattgagactgagaagatgattgaaaagtacagcgggctagcctcggacctgctcacctggatcgagcagaccatcactgtcctgaacagccgcaagtttgccaactcgctgacgggcgtccagcagcagctgcaggccttcagcacctaccgcaccgtggagaagccgcccaagtttcaagagaaggggaatctggaagttctactttttaccatccagtcccggatgagagccaacaatcagaaagtgtacacaccccacgatgggaaactagtgtctgacatcaacagggcctgggaaagcctggaggaagctgggtatcggcgggagctggccctgagaaatgagctcattcggcaggagaagctagagcaactagcccggcgctttgaccggaaggccgcaatgagagagacctggctcaatgaaaaccagcgcctcgtggcccaggataactttgggtatgacctggcagctgtggaggccgccaagaagaagcatgaggccatcgagaccgacacggctgcctacgaggagcgggtgagagccctggaggacctggctcaggagctggagaaagagaactaccatgaccagaagcgcatcacggcccgcaaggacaatatactgcgcctatggagctacctgcaggagctgctgcagtcccggcgccagaggctcgagaccaccctggcactgcagaagctcttccaggacatgctgcacagcatcgactggatggatgagatcaaggctcacctcttgtctgccgagtttgggaagcacttgttggaggttgaagacctgctacagaagcacaagttgatggaagctgacatcgccatccaaggggacaaagtgaaggccatcaccgcagccaccctgaagttcaccgaggggaaagggtaccagccttgtgacccccaggtcatccaggaccgcatgagccacttggagcagtgctttgaggagctgagcaacatggcagctggcgcaaggacccaactggagcagtccaaacgactctggaagttcttctgggagatggatgaggctgagagctggatcaaggagaaggagcagatctattcttccctggactatggcaaagacctgaccagtgtgctcatcttacagcgcaagcacaaggcctttgaggatgagctccgtgggctggatgctcacctggagcagatcttccaggaggctcatggcatggttgcgcgcaagcagtttgggcacccgcagatcgaggcccgcatcaaggaggtgtcggcacagtgggaccagctgaaggacctggctgccttctgcaagaagaacctccaggatgctgagaactttttccagttccagggcgatgcggatgacctgaaggcttggctgcaagacgcccaccggctgctctctggtgaagatgtggggcaggacgaaggggccacgcgggccctggggaaaaagcacaaggacttcctggaggagctggaggagagccgtggggtgatggagcacctggagcagcaggcccagggattccccgaagagtttcgggattccccagatgtgacccatcggctgcaggccctgcgggagctctaccaacaggtggtggcccaggcggacctgcgtcagcagaggctgcaggaagccctggacctgtacacggtgttcggggagacagacgcctgtgagctgtggatgggagagaaggagaagtggctggccgagatggaaatgccagacaccctggaggacctggaggtcgtgcagcacaggttcgacatcctggaccaggagatgaagaccttgatgactcagattgatggtgtgaacctcgctgccaacagcttggtagagagtggccacccacgcagcagggaggtgaagcagtaccaggaccatctgaacaccaggtggcaggcatttcagaccctggtgtcggagcggcgggaggctgtggactcagccctccgagtgcacacactactgcgtagattgcgaggagaccagcaagtggatcacggacaagacaaaggtagtggagtccacaaaagacctggggcgggacctggcaggtatcatcgccatccagaggaagttgtcagggctggagcgtgacgtggccgccatccaggcccgtgtggatgccctggagcgtgagtcccagcagctgatggactcgcaccctgagcagaaggaggatattggtcagcggcaaaaacacttggaggagctgtggcagggcctgcagcaatccctgcagggccaggaggacttgctgggggaagtcagccagctgcaggccttcctgcaggatctggatgacttccaggcctggctctccatcacccagaaggctgtggcctctgaggacatgcccgaatccctcccagaggctgagcagctcctgcagcagcatgcaggtatcaaggatgagattgacgggcaccaagacagctaccagcgtgttaaggagtctggggagaaagtgatccaaggccagacggacccagagtatctgcttctgggccagcggctggagggcctggatactggctgggatgccctgggcaggatgtgggagagccgcagccacaccctcgctcagtgccttggcttccaggagttccagaaagatgccaagcaggctgaagccatcctcagcaaccaggaatacactctggctcacttggagcccccagactccctggaagctgcagaggctgggatccggaagtttgaggatttcttggggtctatggagaacaaccgggataaggtcttgagtcctgtggactctggaaacaagctggtagctgagggaaacctatactcagacaagatcaaggagaaggtgcagctgattgaggacaggcacaggaagaacaacgagaaggcccaggaggcctctgtcctactgagagacaacctggagctacagaacttcctccagaactgccaggagctcactctctggatcaacgacaagctgctgacatctcaggatgtctcctatgatgaagcacgaaaccttcacaataaatggctaaagcaccaggcgtttgtggcagagctggcttcccatgaagggtggctagagaacatcgatgcggaaggaaagcagctgatggatgagaagccccagtttacagccctggtgtcccaaaagctggaagccctgcaccggctctgggacgagctgcaggccaccacaaaggagaagacccagcacctctcggctgccaggagctccgacctgcgcttgcagacccatgctgacctcaacaagtggatcagcgccatggaggaccagctgcggtcagacgacccgggcaaggacctgaccagtgtcaatcggatgttggctaagctgaagcgagtggaggaccaagtgaatgtgcggaaagaggagctgggggagctgtttgcccaggtgccttcaatgggagaggagggaggagatgcagacttgagcatcgagaagcggttcctggacctcctggaacccctaggaaggaggaagaagcagctggaatcatccagagccaagctgcagatcagccgggacttagaggatgagacgctttgggtggaggagaggctgcctctggcccagtcagccgactatggcactaatctgcaaactgtgcaactgttcatgaagaagaaccagacactgcagaatgagattctgggccatacgccgcgggttgaggatgtgctgcagagagggcagcagctggtggaggcggcggagatcgactgccaggaccttgaggagcgcctggggcacctgcagagctcctgggacaggctgcgggaggcagcggccgggaggctgcagcgactgagggacgccaatgaggcacagcagtactacctggatgcggacgaggctgaggcctggattggcgagcaggagctctatgtcatctccgatgagatccccaaggatgaagagggcgccatcgtgatgctgaagcgacatttgcggcagcagcgtgcggtggaggactacggccggaacatcaagcagctggccagccgggcccagggcctgctgtctgcaggccaccctgagggggaacagatcatcagacttcaggggcaagtggacaagcactacgcagggctgaaggacgtggcggaagagcgcaagcgcaagctggagaacatgtaccacctgttccagctcaagcgggagaccgacgacctggagcagtggatttcagaaaaggagctagtggcctcttccccggaaatggggcaagactttgaccacgtgactcttctgcgggacaagttccgggactttgcccgggagaccggggcgattgggcaggagcgggtggacaatgtgaatgccttcatcgagcgactcatcgacgcgggccacagcgaggcggccaccatcgccgagtggaaggacgggctgaacgagatgtgggcagacctcctggagctcattgacacgcgcatgcagctgctggccgcctcctatgacctgcaccgctacttctacacgggtgccgagatcctgggcctcatcgacgagaagcaccgcgagctgcccgaggacgtggggctggacgccagcacggccgagtccttccaccgggtgcacacagccttcgagcgggacgttcacctgctgggtgtccaggtgcagcagttccaggacgtggccacccgtctgcagacagcatatgctggggagaaggcagaggccatccagaacaaggagcaggaggtgtctgccgcgtggcaggcgctgctcgatgcctgtgccgggcgccggacccagctagtggacacggcggataaattccgcttcttcagcatggcccgtgacctcctctcctggatggagagcatcatccggcagatcgagacccaggagaggcccagggatgtctcctctgtggaactgctcatgaagtatcaccagggcatcaatgcagagattgaaacccggagcaagaacttcagtgcctgcctggagcttggcgagtccctgctgcagcggcagcaccaggcctcagaggagatccgcgagaaactgcagcaggtgatgtccaggaggaaagagatgaatgagaagtgggaagcccgctgggagcggctccgcatgttgctggaggtgtgccagttctcgagggatgcctctgtggctgaggcgtggctgattgcccaggagccctacctggccagcggggactttggacacacagtggacagtgtggagaagctcatcaagaggcatgaggcttttgagaagtccacggccagctgggcagagcgctttgctgccctggagaagcccaccacgcttgagctgaaagaacgccagattgcagagagacccgcagaggagactgggcctcaagaggaggaaggcgagacagcaggggaggctccagtttcccaccatgcggccaccgagagaacgtccccgggggaagaagagggaacgtggcctcagaacctgcagcagccaccaccgccgggtcagcacaaggatgggcagaaatccactggggatgagaggcccaccacggagcccctctttaaggtcctagatacgcctctgagcgagggtgatgagcccgcaacgctgccggccccgcgggaccatgggcagagtgtgcagatggaaggctacctgggccgcaagcatgacctggaggggcccaacaagaaggcttccaacaggtcctggaacaacctgtactgtgtgctcaggaacagtgagctaaccttctacaaggatgccaagaacctggccctggggatgccctaccatggggaggaacccctggccctgagacatgccatctgtgagattgctgccaactacaagaagaagaagcacgtctttaagctgaggctgagtaatggcagcgagtggctcttccatggcaaggatgaggaggagatgctgtcctggctgcagggcgtgagcaccgccatcaacgagtcccagagcatccgcgtcaaggcgcagagcctgcccctgccttccctctccggccccgacgccagcctcggcaagaaagacaaggagaagagattcagcttcttccccaaaaagaagtagcaggtggggctggcgggcgcggcggagtcgggacgcgcagagaccgggcagcccaggccttggcctcctctcgccgccgcccgccggtcgaatcgagatgagtcgagtcgcgggccgggcccccgggccccacgctgcactgcaaaagctgccttcgcccgcgtgtcctgggccgacgccccctccatgccctcgcccgcgctggctccgctccagggacaggggctcccagctcctctggcgcctttggggcctccaggcctgggggcaggaaacggttctctgaggcacacgccctcctctcccaccctcctcctgagccgagggggcacaggccccttacccccaaccaaa

SEQ ID NO: 382952 - DNA, 6985 bp, Homo sapiens
cgccacccccgggctcgggtggccccgcttcagtcccagggcagggatccttccatgaagactgaggcaggcggagctgctaagagcctgctgacatgacatcggccacagagtttgaaaatgtgggcaaccagccaccttacagcaggatcaatgcccgctgggacgccccagacgacgagctggataatgacaatagctcagccaggctctttgagaggtcccggataaaggccttggcagatgagcgggaagttgttcagaaaaagaccttcacgaaatgggtgaactcgcacctggctcgagtgtcctgccgcatcaccgatctctacaaggacctgcgggatgggcgcatgctcatcaagctgctggaggtgctctctggagagatgctgccaaagcccaccaaggggaagatgcgcatccactgcctggagaatgtggacaaggctctccagttcctcaaggagcagcgtgtacacctggagaacatgggctcccatgacattgtagatggcaaccaccgcctggtcctgggcctcatctggaccatcatcctccgcttccagattcaggacattgtggtccaaactcaggaaggtcgtgaaacacgctcagccaaggatgcgttgctgttgtggtgtcagatgaagacggcaggctaccctcatgttaatgtcaccaactttacctccagctggaaggatggcttggcctttaatgccctgatacacaagcaccggcccgacctgatcgactttgataagctgaaggactccaatgcccggcacaacctggagcacgcattcaatgtggctgagcgccagctgggcatcatcccgctcctcgaccccgaagatgtctttacggaaaaccctgatgagaaatccatcatcacctatgtggtggccttttaccactacttctccaagatgaaggtgctggcagtggagggcaagcgtgtcggcaaggttattgaccatgccattgagactgagaagatgattgaaaagtacagcgggctagcctcggacctgctcacctggatcgagcagaccatcactgtcctgaacagccgcaagtttgccaactcgctgacgggcgtccagcagcagctgcaggccttcagcacctaccgcaccgtggagaagccgcccaagtttcaagagaaggggaatctggaagttctactttttaccatccagtcccggatgagagccaacaatcagaaagtgtacacaccccacgatgggaaactagtgtctgacatcaacagggcctgggaaagcctggaggaagctgggtatcggcgggagctggccctgagaaatgagctcattcggcaggagaagctagagcaactagcccggcgctttgaccggaaggccgcaatgagagagacctggctcaatgaaaaccagcgcctcgtggcccaggataactttgggtatgacctggcagctgtggaggccgccaagaagaagcatgaggccatcgagaccgacacggctgcctacgaggagcgggtgagagccctggaggacctggctcaggagctggagaaagagaactaccatgaccagaagcgcatcacggcccgcaaggacaatatactgcgcctatggagctacctgcaggagctgctgcagtcccggcgccagaggctcgagaccaccctggcactgcagaagctcttccaggacatgctgcacagcatcgactggatggatgagatcaaggctcacctcttgtctgccgagtttgggaagcacttgttggaggttgaagacctgctacagaagcacaagttgatggaagctgacatcgccatccaaggggacaaagtgaaggccatcaccgcagccaccctgaagttcaccgaggggaaagggtaccagccttgtgacccccaggtcatccaggaccgcatgagccacttggagcagtgctttgaggagctgagcaacatggcagctggcgcaaggacccaactggagcagtccaaacgactctggaagttcttctgggagatggatgaggctgagagctggatcaaggagaaggagcagatctattcttccctggactatggcaaagacctgaccagtgtgctcatcttacagcgcaagcacaaggcctttgaggatgagctccgtgggctggatgctcacctggagcagatcttccaggaggctcatggcatggttgcgcgcaagcagtttgggcacccgcagatcgaggcccgcatcaaggaggtgtcggcacagtgggaccagctgaaggacctggctgccttctgcaagaagaacctccaggatgctgagaactttttccagttccagggcgatgcggatgacctgaaggcttggctgcaagacgcccaccggctgctctctggtgaagatgtggggcaggacgaaggggccacgcgggccctggggaaaaagcacaaggacttcctggaggagctggaggagagccgtggggtgatggagcacctggagcagcaggcccagggattccccgaagagtttcgggattccccagatgtgacccatcggctgcaggccctgcgggagctctaccaacaggtggtggcccaggcggacctgcgtcagcagaggctgcaggaagccctggacctgtacacggtgttcggggagacagacgcctgtgagctgtggatgggagagaaggagaagtggctggccgagatggaaatgccagacaccctggaggacctggaggtcgtgcagcacaggttcgacatcctggaccaggagatgaagaccttgatgactcagattgatggtgtgaacctcgctgccaacagcttggtagagagtggccacccacgcagcagggaggtgaagcagtaccaggaccatctgaacaccaggtggcaggcatttcagaccctggtgtcggagcggcgggaggctgtggactcagccctccgagtgcacacactactgcgtagattgcgaggagaccagcaagtggatcacggacaagacaaaggtagtggagtccacaaaagacctggggcgggacctggcaggtatcatcgccatccagaggaagttgtcagggctggagcgtgacgtggccgccatccaggcccgtgtggatgccctggagcgtgagtcccagcagctgatggactcgcaccctgagcagaaggaggatattggtcagcggcaaaaacacttggaggagctgtggcagggcctgcagcaatccctgcagggccaggaggacttgctgggggaagtcagccagctgcaggccttcctgcaggatctggatgacttccaggcctggctctccatcacccagaaggctgtggcctctgaggacatgcccgaatccctcccagaggctgagcagctcctgcagcagcatgcaggtatcaaggatgagattgacgggcaccaagacagctaccagcgtgttaaggagtctggggagaaagtgatccaaggccagacggacccagagtatctgcttctgggccagcggctggagggcctggatactggctgggatgccctgggcaggatgtgggagagccgcagccacaccctcgctcagtgccttggcttccaggagttccagaaagatgccaagcaggctgaagccatcctcagcaaccaggaatacactctggctcacttggagcccccagactccctggaagctgcagaggctgggatccggaagtttgaggatttcttggggtctatggagaacaaccgggataaggtcttgagtcctgtggactctggaaacaagctggtagctgagggaaacctatactcagacaagatcaaggagaaggtgcagctgattgaggacaggcacaggaagaacaacgagaaggcccaggaggcctctgtcctactgagagacaacctggagctacagaacttcctccagaactgccaggagctcactctctggatcaacgacaagctgctgacatctcaggatgtctcctatgatgaagcacgaaaccttcacaataaatggctaaagcaccaggcgtttgtggcagagctggcttcccatgaagggtggctagagaacatcgatgcggaaggaaagcagctgatggatgagaagccccagtttacagccctggtgtcccaaaagctggaagccctgcaccggctctgggacgagctgcaggccaccacaaaggagaagacccagcacctctcggctgccaggagctccgacctgcgcttgcagacccatgctgacctcaacaagtggatcagcgccatggaggaccagctgcggtcagacgacccgggcaaggacctgaccagtgtcaatcggatgttggctaagctgaagcgagtggaggaccaagtgaatgtgcggaaagaggagctgggggagctgtttgcccaggtgccttcaatgggagaggagggaggagatgcagacttgagcatcgagaagcggttcctggacctcctggaacccctaggaaggaggaagaagcagctggaatcatccagagccaagctgcagatcagccgggacttagaggatgagacgctttgggtggaggagaggctgcctctggcccagtcagccgactatggcactaatctgcaaactgtgcaactgttcatgaagaagaaccagacactgcagaatgagattctgggccatacgccgcgggttgaggatgtgctgcagagagggcagcagctggtggaggcggcggagatcgactgccaggaccttgaggagcgcctggggcacctgcagagctcctgggacaggctgcgggaggcagcggccgggaggctgcagcgactgagggacgccaatgaggcacagcagtactacctggatgcggacgaggctgaggcctggattggcgagcaggagctctatgtcatctccgatgagatccccaaggatgaagagggcgccatcgtgatgctgaagcgacatttgcggcagcagcgtgcggtggaggactacggccggaacatcaagcagctggccagccgggcccagggcctgctgtctgcaggccaccctgagggggaacagatcatcagacttcaggggcaagtggacaagcactacgcagggctgaaggacgtggcggaagagcgcaagcgcaagctggagaacatgtaccacctgttccagctcaagcgggagaccgacgacctggagcagtggatttcagaaaaggagctagtggcctcttccccggaaatggggcaagactttgaccacgtgactcttctgcgggacaagttccgggactttgcccgggagaccggggcgattgggcaggagcgggtggacaatgtgaatgccttcatcgagcgactcatcgacgcgggccacagcgaggcggccaccatcgccgagtggaaggacgggctgaacgagatgtgggcagacctcctggagctcattgacacgcgcatgcagctgctggccgcctcctatgacctgcaccgctacttctacacgggtgccgagatcctgggcctcatcgacgagaagcaccgcgagctgcccgaggacgtggggctggacgccagcacggccgagtccttccaccgggtgcacacagccttcgagcgggacgttcacctgctgggtgtccaggtgcagcagttccaggacgtggccacccgtctgcagacagcatatgctggggagaaggcagaggccatccagaacaaggagcaggaggtgtctgccgcgtggcaggcgctgctcgatgcctgtgccgggcgccggacccagctagtggacacggcggataaattccgcttcttcagcatggcccgtgacctcctctcctggatggagagcatcatccggcagatcgagacccaggagaggcccagggatgtctcctctgtggaactgctcatgaagtatcaccagggcatcaatgcagagattgaaacccggagcaagaacttcagtgcctgcctggagcttggcgagtccctgctgcagcggcagcaccaggcctcagaggagatccgcgagaaactgcagcaggtgatgtccaggaggaaagagatgaatgagaagtgggaagcccgctgggagcggctccgcatgttgctggaggtgtgccagttctcgagggatgcctctgtggctgaggcgtggctgattgcccaggagccctacctggccagcggggactttggacacacagtggacagtgtggagaagctcatcaagaggcatgaggcttttgagaagtccacggccagctgggcagagcgctttgctgccctggagaagcccaccacgcttgagctgaaagaacgccagattgcagagagacccgcagaggagactgggcctcaagaggaggaaggcgagacagcaggggaggctccagtttcccaccatgcggccaccgagagaacgtccccgggggaagaagagggaacgtggcctcagaacctgcagcagccaccaccgccgggtcagcacaaggatgggcagaaatccactggggatgagaggcccaccacggagcccctctttaaggtcctagatacgcctctgagcgagggtgatgagcccgcaacgctgccggccccgcgggaccatgggcagagtgtgcagatggaaggctacctgggccgcaagcatgacctggaggggcccaacaagaaggcttccaacaggtcctggaacaacctgtactgtgtgctcaggaacagtgagctaaccttctacaaggatgccaagaacctggccctggggatgccctaccatggggaggaacccctggccctgagacatgccatctgtgagattgctgccaactacaagaagaagaagcacgtctttaagctgaggctgaataatggcagtgagtggcttttttcattgcaaggatgaggaggatatgcttttctggctgtatggcgggaccacccatctcaaaaagtgcaaaaatatttaatttagt

SEQ ID NO: 382953 - DNA, 7250 bp, Homo sapiens
  misc_feature (3751)..(3751): n is a, c, g, or t
  misc_feature (3787)..(3787): n is a, c, g, or t
cgccacccccgggctcgggtggccccgcttcagtcccagggcagggatccttccatgaagactgaggcaggcggagctgctaagagcctgctgacatgacatcggccacagagtttgaaaatgtgggcaaccagccaccttacagcaggatcaatgcccgctgggacgccccagacgacgagctggataatgacaatagctcagccaggctctttgagaggtcccggataaaggccttggcagatgagcgggaagttgttcagaaaaagaccttcacgaaatgggtgaactcgcacctggctcgagtgtcctgccgcatcaccgatctctacaaggacctgcgggatgggcgcatgctcatcaagctgctggaggtgctctctggagagatgctgccaaagcccaccaaggggaagatgcgcatccactgcctggagaatgtggacaaggctctccagttcctcaaggagcagcgtgtacacctggagaacatgggctcccatgacattgtagatggcaaccaccgcctggtcctgggcctcatctggaccatcatcctccgcttccagattcaggacattgtggtccaaactcaggaaggtcgtgaaacacgctcagccaaggatgcgttgctgttgtggtgtcagatgaagacggcaggctaccctcatgttaatgtcaccaactttacctccagctggaaggatggcttggcctttaatgccctgatacacaagcaccggcccgacctgatcgactttgataagctgaaggactccaatgcccggcacaacctggagcacgcattcaatgtggctgagcgccagctgggcatcatcccgctcctcgaccccgaagatgtctttacggaaaaccctgatgagaaatccatcatcacctatgtggtggccttttaccactacttctccaagatgaaggtgctggcagtggagggcaagcgtgtcggcaaggttattgaccatgccattgagactgagaagatgattgaaaagtacagcgggctagcctcggacctgctcacctggatcgagcagaccatcactgtcctgaacagccgcaagtttgccaactcgctgacgggcgtccagcagcagctgcaggccttcagcacctaccgcaccgtggagaagccgcccaagtttcaagagaaggggaatctggaagttctactttttaccatccagtcccggatgagagccaacaatcagaaagtgtacacaccccacgatgggaaactagtgtctgacatcaacagggcctgggaaagcctggaggaagctgggtatcggcgggagctggccctgagaaatgagctcattcggcaggagaagctagagcaactagcccggcgctttgaccggaaggccgcaatgagagagacctggctcaatgaaaaccagcgcctcgtggcccaggataactttgggtatgacctggcagctgtggaggccgccaagaagaagcatgaggccatcgagaccgacacggctgcctacgaggagcgggtgagagccctggaggacctggctcaggagctggagaaagagaactaccatgaccagaagcgcatcacggcccgcaaggacaatatactgcgcctatggagctacctgcaggagctgctgcagtcccggcgccagaggctcgagaccaccctggcactgcagaagctcttccaggacatgctgcacagcatcgactggatggatgagatcaaggctcacctcttgtctgccgagtttgggaagcacttgttggaggttgaagacctgctacagaagcacaagttgatggaagctgacatcgccatccaaggggacaaagtgaaggccatcaccgcagccaccctgaagttcaccgaggggaaagggtaccagccttgtgacccccaggtcatccaggaccgcatgagccacttggagcagtgctttgaggagctgagcaacatggcagctggcgcaaggacccaactggagcagtccaaacgactctggaagttcttctgggagatggatgaggctgagagctggatcaaggagaaggagcagatctattcttccctggactatggcaaagacctgaccagtgtgctcatcttacagcgcaagcacaaggcctttgaggatgagctccgtgggctggatgctcacctggagcagatcttccaggaggctcatggcatggttgcgcgcaagcagtttgggcacccgcagatcgaggcccgcatcaaggaggtgtcggcacagtgggaccagctgaaggacctggctgccttctgcaagaagaacctccaggatgctgagaactttttccagttccagggcgatgcggatgacctgaaggcttggctgcaagacgcccaccggctgctctctggtgaagatgtggggcaggacgaaggggccacgcgggccctggggaaaaagcacaaggacttcctggaggagctggaggagagccgtggggtgatggagcacctggagcagcaggcccagggattccccgaagagtttcgggattccccagatgtgacccatcggctgcaggccctgcgggagctctaccaacaggtggtggcccaggcggacctgcgtcagcagaggctgcaggaagccctggacctgtacacggtgttcggggagacagacgcctgtgagctgtggatgggagagaaggagaagtggctggccgagatggaaatgccagacaccctggaggacctggaggtcgtgcagcacaggttcgacatcctggaccaggagatgaagaccttgatgactcagattgatggtgtgaacctcgctgccaacagcttggtagagagtggccacccacgcagcagggaggtgaagcagtaccaggaccatctgaacaccaggtggcaggcatttcagaccctggtgtcggagcggcgggaggctgtggactcagccctccgagtgcacacactactgcgtagattgcgaggagaccagcaagtggatcacggacaagacaaaggtagtggagtccacaaaagacctggggcgggacctggcaggtatcatcgccatccagaggaagttgtcagggctggagcgtgacgtggccgccatccaggcccgtgtggatgccctggagcgtgagtcccagcagctgatggactcgcaccctgagcagaaggaggatattggtcagcggcaaaaacacttggaggagctgtggcagggcctgcagcaatccctgcagggccaggaggacttgctgggggaagtcagccagctgcaggccttcctgcaggatctggatgacttccaggcctggctctccatcacccagaaggctgtggcctctgaggacatgcccgaatccctcccagaggctgagcagctcctgcagcagcatgcaggtatcaaggatgagattgacgggcaccaagacagctaccagcgtgttaaggagtctggggagaaagtgatccaaggccagacggacccagagtatctgcttctgggccagcggctggagggcctggatactggctgggatgccctgggcaggatgtgggagagccgcagccacaccctcgctcagtgccttggcttccaggagttccagaaagatgccaagcaggctgaagccatcctcagcaaccagaatacactctggctcacttggagcccccagactccctggaagctgcagaggctgggatccggaagtttgaggatttctggttgctgaggatggntactggctggaatgccctgggcaggatgtgggaganccgcagccacaccctcgctcagtgccttggcttccaggagttccagaaagatgccaagcaggctgaagccatcctcagcaaccgaatacactctggctcacttggagcccccagactccctggaagctgcagaggctgggatccggaagtttgaggatttcttggggtctatggagaacaaccgggataaggtcttgagtcctgtggactctggaaacaagctggtagctgagggaaacctatactcagacaagatcaaggagaaggtgcagctgattgaggacaggcacaggaagaacaacgagaaggcccaggaggcctctgtcctactgagagacaacctggagctacagaacttcctccagaactgccaggagctcactctctggatcaacgacaagctgctgacatctcaggatgtctcctatgatgaagcacgaaaccttcacaataaatggctaaagcaccaggcgtttgtggcagagctggcttcccatgaagggtggctagagaacatcgatgcggaaggaaagcagctgatggatgagaagccccagtttacagccctggtgtcccaaaagctggaagccctgcaccggctctgggacgagctgcaggccaccacaaaggagaagacccagcacctctcggctgccaggagctccgacctgcgcttgcagacccatgctgacctcaacaagtggatcagcgccatggaggaccagctgcggtcagacgacccgggcaaggacctgaccagtgtcaatcggatgttggctaagctgaagcgagtggaggaccaagtgaatgtgcggaaagaggagctgggggagctgtttgcccaggtgccttcaatgggagaggagggaggagatgcagacttgagcatcgagaagcggttcctggacctcctggaacccctaggaaggaggaagaagcagctggaatcatccagagccaagctgcagatcagccgggacttagaggatgagacgctttgggtggaggagaggctgcctctggcccagtcagccgactatggcactaatctgcaaactgtgcaactgttcatgaagaagaaccagacactgcagaatgagattctgggccatacgccgcgggttgaggatgtgctgcagagagggcagcagctggtggaggcggcggagatcgactgccaggaccttgaggagcgcctggggcacctgcagagctcctgggacaggctgcgggaggcagcggccgggaggctgcagcgactgagggacgccaatgaggcacagcagtactacctggatgcggacgaggctgaggcctggattggcgagcaggagctctatgtcatctccgatgagatccccaaggatgaagagggcgccatcgtgatgctgaagcgacatttgcggcagcagcgtgcggtggaggactacggccggaacatcaagcagctggccagccgggcccagggcctgctgtctgcaggccaccctgagggggaacagatcatcagacttcaggggcaagtggacaagcactacgcagggctgaaggacgtggcggaagagcgcaagcgcaagctggagaacatgtaccacctgttccagctcaagcgggagaccgacgacctggagcagtggatttcagaaaaggagctagtggcctcttccccggaaatggggcaagactttgaccacgtgactcttctgcgggacaagttccgggactttgcccgggagaccggggcgattgggcaggagcgggtggacaatgtgaatgccttcatcgagcgactcatcgacgcgggccacagcgaggcggccaccatcgccgagtggaaggacgggctgaacgagatgtgggcagacctcctggagctcattgacacgcgcatgcagctgctggccgcctcctatgacctgcaccgctacttctacacgggtgccgagatcctgggcctcatcgacgagaagcaccgcgagctgcccgaggacgtggggctggacgccagcacggccgagtccttccaccgggtgcacacagccttcgagcgggacgttcacctgctgggtgtccaggtgcagcagttccaggacgtggccacccgtctgcagacagcatatgctggggagaaggcagaggccatccagaacaaggagcaggaggtgtctgccgcgtggcaggcgctgctcgatgcctgtgccgggcgccggacccagctagtggacacggcggataaattccgcttcttcagcatggcccgtgacctcctctcctggatggagagcatcatccggcagatcgagacccaggagaggcccagggatgtctcctctgtggaactgctcatgaagtatcaccagggcatcaatgcagagattgaaacccggagcaagaacttcagtgcctgcctggagcttggcgagtccctgctgcagcggcagcaccaggcctcagaggagatccgcgagaaactgcagcaggtgatgtccaggaggaaagagatgaatgagaagtgggaagcccgctgggagcggctccgcatgttgctggaggtgtgccagttctcgagggatgcctctgtggctgaggcgtggctgattgcccaggagccctacctggccagcggggactttggacacacagtggacagtgtggagaagctcatcaagaggcatgaggcttttgagaagtccacggccagctgggcagagcgctttgctgccctggagaagcccaccacgcttgagctgaaagaacgccagattgcagagagacccgcagaggagactgggcctcaagaggaggaaggcgagacagcaggggaggctccagtttcccaccatgcggccaccgagagaacgtccccggtcagtctctggtctcgtttgtctagttcctgggagtcactgcagccagagccctctcacccctactaggctcagcccaggtggaggcgagatgagctgcgcagccccgccctccatcctccccacatccctgcagccacctcccagcagagcaggctacgtcctcactgaggtgttcttcatgagagtactagcctcctccactcctccccacagcgcagaggaaacaggccagcccagtgacatgacgttattagttttgttttacctaatgtaataaattttattgtataaatatatcaccatttacatgaggggaaacactagccagagatgattagtgcatttctgtacaccgtccttttccccattttccaactccttcctctaggcagtactcaccccctgcacccacacctacacacaggcacatgcccacacacacatgcatgcacacacaaatacacacccacatgcacacacaccacacacccccatatatacagacacctcacgcacaaccacacacccacatacacatacacacacacatacacatacacacaaacacaccacacccacccacatgcacccac

SEQ ID NO: 382954 - DNA, 1220 bp, Homo sapiens
agaaggaatacataaaatgttaataatagctaattttttgtaatgaaattacatgcagatgattttttaacaataaaacatgttactatgtatcagaacaaacatggtgtaattttttttaatggtgaagctataggaattgactctagagataccatatcaggatgtgggtgacctgcctgtctgcatctttgcaggtcctggaacaacctgtactgtgtgctcaggaacagtgagctaaccttctacaaggatgccaagaacctggccctggggatgccctaccatggggaggaacccctggccctgagacatgccatctgtgagattgctgccaactacaagaagaagaagcacgtctttaagctgaggtgaggccttcctggcctttgaaagctcgggttgatggcttgatttggcattagtggcagggcagaggccctctgtaggggaccagtgccaggcctgagctgctcctcaggggtttttcaaatcaaagaggctgatggtccagactttgacctctcagaaagtgctgggctgcctgagaggggtctggatgttcggctcagggtattgtgggatcagagccagccctctgcccagcgccccctccagaggtgtctccatgacaggaaaccctttgtcctcctaggctgagtaatggcagcgagtggctcttccatggcaaggatgaggaggagatgctgtcctggctgcagggcgtgagcaccgccatcaacgagtcccagagcatccgcgtcaaggcgcagagcctgcccctgccttccctctccggccccgacgccagcctcggcaagaaagacaaggagaagagattcagcttcttccccaaaaagaagtagcaggtggggctggcgggcgcggcggagtcgggacgcgcagagaccgggcagcccaggccttggcctcctctcgccgccgcccgccggtcgaatcgagatgagtcgagtcgcgggccgggcccccgggccccacgctgcactgcaaaagctgccttcgcccgcgtgtcctgggccgacgccccctccatgccctcgcccgcgctggctccgctccagggacaggggctcccagctcctctggcgcctttggggcctccaggcctgggggcaggaaacggttctctgaggcacacgccctcctctcccaccctcctcctgagccgagggggcacaggccccttacccccaaccaaa

SEQ ID NO: 382955 - DNA, 1316 bp, Homo sapiens
tcgcccaggctagagtacaagtggcaagatctcagctcactgcaacctccacctcctgggtttttgcgattcttctgcctcagccacttggtaggctgagatgggaggatcacttgaacccaggaggctgaggctgccatgagccataatcacatcactgcactccagcctgggtgacagattgaagccctccctctaaaaaaatataactattgtgaagatcggttaggggcccagtgtcggaatggggtggctgcaggcagcaagcgtatccatgtggtttagggacacctattcaggccacctgcctgaccactggccccaatcaggagtgaacgattgggtgctaacaggccctgggccttgtggggggtctgtgtcctgttccccctggcagtgctggaggtgtgccagttctcgagggatgcctctgtggctgaggcgtggctgattgcccaggagccctacctggccagcggggactttggacacacagtggacagtgtggagaagctcatcaagaggcatgaggcttttgagaagtccacggccagctgggcagagcgctttgctgccctggagaagcccaccacgcttgagctgaaagaacgccagattgcagagagacccgcagaggagactgggcctcaagaggaggaaggcgagacagcaggggaggctccagtttcccaccatgcggccaccgagagaacgtccccggtcagtctctggtctcgtttgtctagttcctgggagtcactgcagccagagccctctcacccctactaggctcagcccaggtggaggcgagatgagctgcgcagccccgccctccatcctccccacatccctgcagccacctcccagcagagcaggctacgtcctcactgaggtgttcttcatgagagtactagcctcctccactcctccccacagcgcagaggaaacaggccagcccagtgacatgacgttattagttttgttttacctaatgtaataaattttattgtataaatatatcaccatttacatgaggggaaacactagccagagatgattagtgcatttctgtacaccgtccttttccccattttccaactccttcctctaggcagtactcaccccctgcacccacacctacacacaggcacatgcccacacacacatgcatgcacacacaaatacacacccacatgcacacacaccacacacccccatatatacagacacctcacgcacaaccacacacccacatacacatacacacacacatacacatacacacaaacacaccacacccacccacatgcacccac

SEQ ID NO: 382956 - DNA, 6987 bp, Homo sapiens
cgccacccccgggctcgggtggccccgcttcagtcccagggcagggatccttccatgaagactgaggcaggcggagctgctaagagcctgctgacatgacatcggccacagagtttgaaaatgtgggcaaccagccaccttacagcaggatcaatgcccgctgggacgccccagacgacgagctggataatgacaatagctcagccaggctctttgagaggtcccggataaaggccttggcagatgagcgggaagttgttcagaaaaagaccttcacgaaatgggtgaactcgcacctggctcgagtgtcctgccgcatcaccgatctctacaaggacctgcgggatgggcgcatgctcatcaagctgctggaggtgctctctggagagatgctgccaaagcccaccaaggggaagatgcgcatccactgcctggagaatgtggacaaggctctccagttcctcaaggagcagcgtgtacacctggagaacatgggctcccatgacattgtagatggcaaccaccgcctggtcctgggcctcatctggaccatcatcctccgcttccagattcaggacattgtggtccaaactcaggaaggtcgtgaaacacgctcagccaaggatgcgttgctgttgtggtgtcagatgaagacggcaggctaccctcatgttaatgtcaccaactttacctccagctggaaggatggcttggcctttaatgccctgatacacaagcaccggcccgacctgatcgactttgataagctgaaggactccaatgcccggcacaacctggagcacgcattcaatgtggctgagcgccagctgggcatcatcccgctcctcgaccccgaagatgtctttacggaaaaccctgatgagaaatccatcatcacctatgtggtggccttttaccactacttctccaagatgaaggtgctggcagtggagggcaagcgtgtcggcaaggttattgaccatgccattgagactgagaagatgattgaaaagtacagcgggctagcctcggacctgctcacctggatcgagcagaccatcactgtcctgaacagccgcaagtttgccaactcgctgacgggcgtccagcagcagctgcaggccttcagcacctaccgcaccgtggagaagccgcccaagtttcaagagaaggggaatctggaagttctactttttaccatccagtcccggatgagagccaacaatcagaaagtgtacacaccccacgatgggaaactagtgtctgacatcaacagggcctgggaaagcctggaggaagctgggtatcggcgggagctggccctgagaaatgagctcattcggcaggagaagctagagcaactagcccggcgctttgaccggaaggccgcaatgagagagacctggctcaatgaaaaccagcgcctcgtggcccaggataactttgggtatgacctggcagctgtggaggccgccaagaagaagcatgaggccatcgagaccgacacggctgcctacgaggagcgggtgagagccctggaggacctggctcaggagctggagaaagagaactaccatgaccagaagcgcatcacggcccgcaaggacaatatactgcgcctatggagctacctgcaggagctgctgcagtcccggcgccagaggctcgagaccaccctggcactgcagaagctcttccaggacatgctgcacagcatcgactggatggatgagatcaaggctcacctcttgtctgccgagtttgggaagcacttgttggaggttgaagacctgctacagaagcacaagttgatggaagctgacatcgccatccaaggggacaaagtgaaggccatcaccgcagccaccctgaagttcaccgaggggaaagggtaccagccttgtgacccccaggtcatccaggaccgcatgagccacttggagcagtgctttgaggagctgagcaacatggcagctggcgcaaggacccaactggagcagtccaaacgactctggaagttcttctgggagatggatgaggctgagagctggatcaaggagaaggagcagatctattcttccctggactatggcaaagacctgaccagtgtgctcatcttacagcgcaagcacaaggcctttgaggatgagctccgtgggctggatgctcacctggagcagatcttccaggaggctcatggcatggttgcgcgcaagcagtttgggcacccgcagatcgaggcccgcatcaaggaggtgtcggcacagtgggaccagctgaaggacctggctgccttctgcaagaagaacctccaggatgctgagaactttttccagttccagggcgatgcggatgacctgaaggcttggctgcaagacgcccaccggctgctctctggtgaagatgtggggcaggacgaaggggccacgcgggccctggggaaaaagcacaaggacttcctggaggagctggaggagagccgtggggtgatggagcacctggagcagcaggcccagggattccccgaagagtttcgggattccccagatgtgacccatcggctgcaggccctgcgggagctctaccaacaggtggtggcccaggcggacctgcgtcagcagaggctgcaggaagccctggacctgtacacggtgttcggggagacagacgcctgtgagctgtggatgggagagaaggagaagtggctggccgagatggaaatgccagacaccctggaggacctggaggtcgtgcagcacaggttcgacatcctggaccaggagatgaagaccttgatgactcagattgatggtgtgaacctcgctgccaacagcttggtagagagtggccacccacgcagcagggaggtgaagcagtaccaggaccatctgaacaccaggtggcaggcatttcagaccctggtgtcggagcggcgggaggctgtggactcagccctccgagtgcacacactactgcgtagattgcgaggagaccagcaagtggatcacggacaagacaaaggtagtggagtccacaaaagacctggggcgggacctggcaggtatcatcgccatccagaggaagttgtcagggctggagcgtgacgtggccgccatccaggcccgtgtggatgccctggagcgtgagtcccagcagctgatggactcgcaccctgagcagaaggaggatattggtcagcggcaaaaacacttggaggagctgtggcagggcctgcagcaatccctgcagggccaggaggacttgctgggggaagtcagccagctgcaggccttcctgcaggatctggatgacttccaggcctggctctccatcacccagaaggctgtggcctctgaggacatgcccgaatccctcccagaggctgagcagctcctgcagcagcatgcaggtatcaaggatgagattgacgggcaccaagacagctaccagcgtgttaaggagtctggggagaaagtgatccaaggccagacggacccagagtatctgcttctgggccagcggctggagggcctggatactggctgggatgccctgggcaggatgtgggagagccgcagccacaccctcgctcagtgccttggcttccaggagttccagaaagatgccaagcaggctgaagccatcctcagcaaccaggaatacactctggctcacttggagcccccagactccctggaagctgcagaggctgggatccggaagtttgaggatttcttggggtctatggagaacaaccgggataaggtcttgagtcctgtggactctggaaacaagctggtagctgagggaaacctatactcagacaagatcaaggagaaggtgcagctgattgaggacaggcacaggaagaacaacgagaaggcccaggaggcctctgtcctactgagagacaacctggagctacagaacttcctccagaactgccaggagctcactctctggatcaacgacaagctgctgacatctcaggatgtctcctatgatgaagcacgaaaccttcacaataaatggctaaagcaccaggcgtttgtggcagagctggcttcccatgaagggtggctagagaacatcgatgcggaaggaaagcagctgatggatgagaagccccagtttacagccctggtgtcccaaaagctggaagccctgcaccggctctgggacgagctgcaggccaccacaaaggagaagacccagcacctctcggctgccaggagctccgacctgcgcttgcagacccatgctgacctcaacaagtggatcagcgccatggaggaccagctgcggtcagacgacccgggcaaggacctgaccagtgtcaatcggatgttggctaagctgaagcgagtggaggaccaagtgaatgtgcggaaagaggagctgggggagctgtttgcccaggtgccttcaatgggagaggagggaggagatgcagacttgagcatcgagaagcggttcctggacctcctggaacccctaggaaggaggaagaagcagctggaatcatccagagccaagctgcagatcagccgggacttagaggatgagacgctttgggtggaggagaggctgcctctggcccagtcagccgactatggcactaatctgcaaactgtgcaactgttcatgaagaagaaccagacactgcagaatgagattctgggccatacgccgcgggttgaggatgtgctgcagagagggcagcagctggtggaggcggcggagatcgactgccaggaccttgaggagcgcctggggcacctgcagagctcctgggacaggctgcgggaggcagcggccgggaggctgcagcgactgagggacgccaatgaggcacagcagtactacctggatgcggacgaggctgaggcctggattggcgagcaggagctctatgtcatctccgatgagatccccaaggatgaagagggcgccatcgtgatgctgaagcgacatttgcggcagcagcgtgcggtggaggactacggccggaacatcaagcagctggccagccgggcccagggcctgctgtctgcaggccaccctgagggggaacagatcatcagacttcaggggcaagtggacaagcactacgcagggctgaaggacgtggcggaagagcgcaagcgcaagctggagaacatgtaccacctgttccagctcaagcgggagaccgacgacctggagcagtggatttcagaaaaggagctagtggcctcttccccggaaatggggcaagactttgaccacgtgactcttctgcgggacaagttccgggactttgcccgggagaccggggcgattgggcaggagcgggtggacaatgtgaatgccttcatcgagcgactcatcgacgcgggccacagcgaggcggccaccatcgccgagtggaaggacgggctgaacgagatgtgggcagacctcctggagctcattgacacgcgcatgcagctgctggccgcctcctatgacctgcaccgctacttctacacgggtgccgagatcctgggcctcatcgacgagaagcaccgcgagctgcccgaggacgtggggctggacgccagcacggccgagtccttccaccgggtgcacacagccttcgagcgggacgttcacctgctgggtgtccaggtgcagcagttccaggacgtggccacccgtctgcagacagcatatgctggggagaaggcagaggccatccagaacaaggagcaggaggtgtctgccgcgtggcaggcgctgctcgatgcctgtgccgggcgccggacccagctagtggacacggcggataaattccgcttcttcagcatggcccgtgacctcctctcctggatggagagcatcatccggcagatcgagacccaggagaggcccagggatgtctcctctgtggaactgctcatgaagtatcaccagggcatcaatgcagagattgaaacccggagcaagaacttcagtgcctgcctggagcttggcgagtccctgctgcagcggcagcaccaggcctcagaggagatccgcgagaaactgcagcaggtgatgtccaggaggaaagagatgaatgagaagtgggaagcccgctgggagcggctccgcatgttgctggaggtgtgccagttctcgagggatgcctctgtggctgaggcgtggctgattgcccaggagccctacctggccagcggggactttggacacacagtggacagtgtggagaagctcatcaagaggcatgaggcttttgagaagtccacggccagctgggcagagcgctttgctgccctggagaagcccaccacggcctcaagaggaggaaggcgagacagcaggggaggctccagtttcccaccatgcggccaccgagagaacgtccccggtcagtctctggtctcgtttgtctagttcctgggagtcactgcagccagagccctctcacccctactaggctcagcccaggtggaggcgagatgagctgcgcagccccgccctccatcctccccacatccctgcagccacctcccagcagagcaggctacgtcctcactgaggtgttcttcatgagagtactagcctcctccactcctccccacagcgcagaggaaacaggccagcccagtgacatgacgttattagttttgttttacctaatgtaataaattttattgtataaatatatcaccatttacatgaggggaaacactagccagagatgattagtgcatttctgtacaccgtccttttccccattttccaactccttcctctaggcagtactcaccccctgcacccacacctacacacaggcacatgcccacacacacatgcatgcacacacaaatacacacccacatgcacacacaccacacacccccatatatacagacacctcacgcacaaccacacacccacatacacatacacacacacatacacatacacacaaacacaccacacccacccacatgcacccac

SEQ ID NO: 382957 - DNA, 7721 bp, Homo sapiens
cgccacccccgggctcgggtggccccgcttcagtcccagggcagggatccttccatgaagactgaggcaggcggagctgctaagagcctgctgacatgacatcggccacagagtttgaaaatgtgggcaaccagccaccttacagcaggatcaatgcccgctgggacgccccagacgacgagctggataatgacaatagctcagccaggctctttgagaggtcccggataaaggccttggcagatgagcgggaagttgttcagaaaaagaccttcacgaaatgggtgaactcgcacctggctcgagtgtcctgccgcatcaccgatctctacaaggacctgcgggatgggcgcatgctcatcaagctgctggaggtgctctctggagagatgctgccaaagcccaccaaggggaagatgcgcatccactgcctggagaatgtggacaaggctctccagttcctcaaggagcagcgtgtacacctggagaacatgggctcccatgacattgtagatggcaaccaccgcctggtcctgggcctcatctggaccatcatcctccgcttccagattcaggacattgtggtccaaactcaggaaggtcgtgaaacacgctcagccaaggatgcgttgctgttgtggtgtcagatgaagacggcaggctaccctcatgttaatgtcaccaactttacctccagctggaaggatggcttggcctttaatgccctgatacacaagcaccggcccgacctgatcgactttgataagctgaaggactccaatgcccggcacaacctggagcacgcattcaatgtggctgagcgccagctgggcatcatcccgctcctcgaccccgaagatgtctttacggaaaaccctgatgagaaatccatcatcacctatgtggtggccttttaccactacttctccaagatgaaggtgctggcagtggagggcaagcgtgtcggcaaggttattgaccatgccattgagactgagaagatgattgaaaagtacagcgggctagcctcggacctgctcacctggatcgagcagaccatcactgtcctgaacagccgcaagtttgccaactcgctgacgggcgtccagcagcagctgcaggccttcagcacctaccgcaccgtggagaagccgcccaagtttcaagagaaggggaatctggaagttctactttttaccatccagtcccggatgagagccaacaatcagaaagtgtacacaccccacgatgggaaactagtgtctgacatcaacagggcctgggaaagcctggaggaagctgggtatcggcgggagctggccctgagaaatgagctcattcggcaggagaagctagagcaactagcccggcgctttgaccggaaggccgcaatgagagagacctggctcaatgaaaaccagcgcctcgtggcccaggataactttgggtatgacctggcagctgtggaggccgccaagaagaagcatgaggccatcgagaccgacacggctgcctacgaggagcgggtgagagccctggaggacctggctcaggagctggagaaagagaactaccatgaccagaagcgcatcacggcccgcaaggacaatatactgcgcctatggagctacctgcaggagctgctgcagtcccggcgccagaggctcgagaccaccctggcactgcagaagctcttccaggacatgctgcacagcatcgactggatggatgagatcaaggctcacctcttgtctgccgagtttgggaagcacttgttggaggttgaagacctgctacagaagcacaagttgatggaagctgacatcgccatccaaggggacaaagtgaaggccatcaccgcagccaccctgaagttcaccgaggggaaagggtaccagccttgtgacccccaggtcatccaggaccgcatgagccacttggagcagtgctttgaggagctgagcaacatggcagctggcgcaaggacccaactggagcagtccaaacgactctggaagttcttctgggagatggatgaggctgagagctggatcaaggagaaggagcagatctattcttccctggactatggcaaagacctgaccagtgtgctcatcttacagcgcaagcacaaggcctttgaggatgagctccgtgggctggatgctcacctggagcagatcttccaggaggctcatggcatggttgcgcgcaagcagtttgggcacccgcagatcgaggcccgcatcaaggaggtgtcggcacagtgggaccagctgaaggacctggctgccttctgcaagaagaacctccaggatgctgagaactttttccagttccagggcgatgcggatgacctgaaggcttggctgcaagacgcccaccggctgctctctggtgaagatgtggggcaggacgaaggggccacgcgggccctggggaaaaagcacaaggacttcctggaggagctggaggagagccgtggggtgatggagcacctggagcagcaggcccagggattccccgaagagtttcgggattccccagatgtgacccatcggctgcaggccctgcgggagctctaccaacaggtggtggcccaggcggacctgcgtcagcagaggctgcaggaagccctggacctgtacacggtgttcggggagacagacgcctgtgagctgtggatgggagagaaggagaagtggctggccgagatggaaatgccagacaccctggaggacctggaggtcgtgcagcacaggttcgacatcctggaccaggagatgaagaccttgatgactcagattgatggtgtgaacctcgctgccaacagcttggtagagagtggccacccacgcagcagggaggtgaagcagtaccaggaccatctgaacaccaggtggcaggcatttcagaccctggtgtcggagcggcgggaggctgtggactcagccctccgagtgcacacactactgcgtagattgcgaggagaccagcaagtggatcacggacaagacaaaggtagtggagtccacaaaagacctggggcgggacctggcaggtatcatcgccatccagaggaagttgtcagggctggagcgtgacgtggccgccatccaggcccgtgtggatgccctggagcgtgagtcccagcagctgatggactcgcaccctgagcagaaggaggatattggtcagcggcaaaaacacttggaggagctgtggcagggcctgcagcaatccctgcagggccaggaggacttgctgggggaagtcagccagctgcaggccttcctgcaggatctggatgacttccaggcctggctctccatcacccagaaggctgtggcctctgaggacatgcccgaatccctcccagaggctgagcagctcctgcagcagcatgcaggtatcaaggatgagattgacgggcaccaagacagctaccagcgtgttaaggagtctggggagaaagtgatccaaggccagacggacccagagtatctgcttctgggccagcggctggagggcctggatactggctgggatgccctgggcaggatgtgggagagccgcagccacaccctcgctcagtgccttggcttccaggagttccagaaagatgccaagcaggctgaagccatcctcagcaaccaggaatacactctggctcacttggagcccccagactccctggaagctgcagaggctgggatccggaagtttgaggatttcttggggtctatggagaacaaccgggataaggtcttgagtcctgtggactctggaaacaagctggtagctgagggaaacctatactcagacaagatcaaggagaaggtgcagctgattgaggacaggcacaggaagaacaacgagaaggcccaggaggcctctgtcctactgagagacaacctggagctacagaacttcctccagaactgccaggagctcactctctggatcaacgacaagctgctgacatctcaggatgtctcctatgatgaagcacgaaaccttcacaataaatggctaaagcaccaggcgtttgtggcagagctggcttcccatgaagggtggctagagaacatcgatgcggaaggaaagcagctgatggatgagaagccccagtttacagccctggtgtcccaaaagctggaagccctgcaccggctctgggacgagctgcaggccaccacaaaggagaagacccagcacctctcggctgccaggagctccgacctgcgcttgcagacccatgctgacctcaacaagtggatcagcgccatggaggaccagctgcggtcagacgacccgggcaaggacctgaccagtgtcaatcggatgttggctaagctgaagcgagtggaggaccaagtgaatgtgcggaaagaggagctgggggagctgtttgcccaggtgccttcaatgggagaggagggaggagatgcagacttgagcatcgagaagcggttcctggacctcctggaacccctaggaaggaggaagaagcagctggaatcatccagagccaagctgcagatcagccgggacttagaggatgagacgctttgggtggaggagaggctgcctctggcccagtcagccgactatggcactaatctgcaaactgtgcaactgttcatgaagaagaaccagacactgcagaatgagattctgggccatacgccgcgggttgaggatgtgctgcagagagggcagcagctggtggaggcggcggagatcgactgccaggaccttgaggagcgcctggggcacctgcagagctcctgggacaggctgcgggaggcagcggccgggaggctgcagcgactgagggacgccaatgaggcacagcagtactacctggatgcggacgaggctgaggcctggattggcgagcaggagctctatgtcatctccgatgagatccccaaggatgaagagggcgccatcgtgatgctgaagcgacatttgcggcagcagcgtgcggtggaggactacggccggaacatcaagcagctggccagccgggcccagggcctgctgtctgcaggccaccctgagggggaacagatcatcagacttcaggggcaagtggacaagcactacgcagggctgaaggacgtggcggaagagcgcaagcgcaagctggagaacatgtaccacctgttccagctcaagcgggagaccgacgacctggagcagtggatttcagaaaaggagctagtggcctcttccccggaaatggggcaagactttgaccacgtgactcttctgcgggacaagttccgggactttgcccgggagaccggggcgattgggcaggagcgggtggacaatgtgaatgccttcatcgagcgactcatcgacgcgggccacagcgaggcggccaccatcgccgagtggaaggacgggctgaacgagatgtgggcagacctcctggagctcattgacacgcgcatgcagctgctggccgcctcctatgacctgcaccgctacttctacacgggtgccgagatcctgggcctcatcgacgagaagcaccgcgagctgcccgaggacgtggggctggacgccagcacggccgagtccttccaccgggtgcacacagccttcgagcgggacgttcacctgctgggtgtccaggtgcagcagttccaggacgtggccacccgtctgcagacagcatatgctggggagaaggcagaggccatccagaacaaggagcaggaggtgtctgccgcgtggcaggcgctgctcgatgcctgtgccgggcgccggacccagctagtggacacggcggataaattccgcttcttcagcatggcccgtgacctcctctcctggatggagagcatcatccggcagatcgagacccaggagaggcccagggatgtctcctctgtggaactgctcatgaagtatcaccagggcatcaatgcagagattgaaacccggagcaagaacttcagtgcctgcctggagcttggcgagtccctgctgcagcggcagcaccaggcctcagaggagatccgcgagaaactgcagcaggtgatgtccaggaggaaagagatgaatgagaagtgggaagcccgctgggagcggctccgcatgttgctggaggtgtgccagttctcgagggatgcctctgtggctgaggcgtggctgattgcccaggagccctacctggccagcggggactttggacacacagtggacagtgtggagaagctcatcaagaggcatgaggcttttgagaagtccacggccagctgggcagagcgctttgctgccctggagaagcccaccacgcttgagctgaaagaacgccagattgcagagagacccgcagaggagactgggcctcaagaggaggaaggcgagacagcaggggaggctccagtttcccaccatgcggccaccgagagaacgtccccgggggaagaagagggaacgtggcctcagaacctgcagcagccaccaccgccgggtcagcacaaggatgggcagaaatccactggggatgagaggcccaccacggagcccctctttaaggtcctagatacgcctctgagcgagggtgatgagcccgcaacgctgccggccccgcgggaccatgggcagagtgtgcagatggaaggctacctgggccgcaagcatgacctggaggggcccaacaagaaggcttccaacaggtcctggaacaacctgtactgtgtgctcaggaacagtgagctaaccttctacaaggatgccaagaacctggccctggggatgccctaccatggggaggaacccctggccctgagacatgccatctgtgagattgctgccaactacaagaagaagaagcacgtctttaagctgaggtgaggccttcctggcctttgaaagctcgggttgatggcttgatttggcattagtggcagggcagaggccctctgtaggggaccagtgccaggcctgagctgctcctcaggggtttttcaaatcaaagaggctgatggtccagactttgacctctcagaaagtgctgggctgcctgagaggggtctggatgttcggctcagggtattgtgggatcagagccagccctctgcccagcgccccctccagaggtgtctccatgacaggaaaccctttgtcctcctaggctgagtaatggcagcgagtggctcttccatggcaaggatgaggaggagatgctgtcctggctgcagggcgtgagcaccgccatcaacgagtcccagagcatccgcgtcaaggcgcagagcctgcccctgccttccctctccggccccgacgccagcctcggcaagaaagacaaggagaagagattcagcttcttccccaaaaagaagtagcaggtggggctggcgggcgcggcggagtcgggacgcgcagagaccgggcagcccaggccttggcctcctctcgccgccgcccgccggtcgaatcgagatgagtcgagtcgcgggccgggcccccgggccccacgctgcactgcaaaagctgccttcgcccgcgtgtcctgggccgacgccccctccatgccctcgcccgcgctggctccgctccagggacaggggctcccagctcctctggcgcctttggggcctccaggcctgggggcaggaaacggttctctgaggcacacgccctcctctcccaccctcctcctgagccgagggggcacaggccccttacccccaaccaaa

SEQ ID NO: 382958 - DNA, 5587 bp, Homo sapiens
cgccacccccgggctcgggtggccccgcttcagtcccagggcagggatccttccatgaagactgaggcaggcggagctgctaagagcctgctgacatgacatcggccacagagtttgaaaatgtgggcaaccagccaccttacagcaggatcaatgcccgctgggacgccccagacgacgagctggataatgacaatagctcagccaggctctttgagaggtcccggataaaggccttggcagatgagcgggaagttgttcagaaaaagaccttcacgaaatgggtgaactcgcacctggctcgagtgtcctgccgcatcaccgatctctacaaggacctgcgggatgggcgcatgctcatcaagctgctggaggtgctctctggagagatgctgccaaagcccaccaaggggaagatgcgcatccactgcctggagaatgtggacaaggctctccagttcctcaaggagcagcgtgtacacctggagaacatgggctcccatgacattgtagatggcaaccaccgcctggtcctgggcctcatctggaccatcatcctccgcttccagattcaggacattgtggtccaaactcaggaaggtcgtgaaacacgctcagccaaggatgcgttgctgttgtggtgtcagatgaagacggcaggctaccctcatgttaatgtcaccaactttacctccagctggaaggatggcttggcctttaatgccctgatacacaagcaccggcccgacctgatcgactttgataagctgaaggactccaatgcccggcacaacctggagcacgcattcaatgtggctgagcgccagctgggcatcatcccgctcctcgaccccgaagatgtctttacggaaaaccctgatgagaaatccatcatcacctatgtggtggccttttaccactacttctccaagatgaaggtgctggcagtggagggcaagcgtgtcggcaaggttattgaccatgccattgagactgagaagatgattgaaaagtacagcgggctagcctcggacctgctcacctggatcgagcagaccatcactgtcctgaacagccgcaagtttgccaactcgctgacgggcgtccagcagcagctgcaggccttcagcacctaccgcaccgtggagaagccgcccaagtttcaagagaaggggaatctggaagttctactttttaccatccagtcccggatgagagccaacaatcagaaagtgtacacaccccacgatgggaaactagtgtctgacatcaacagggcctgggaaagcctggaggaagctgggtatcggcgggagctggccctgagaaatgagctcattcggcaggagaagctagagcaactagcccggcgctttgaccggaaggccgcaatgagagagacctggctcaatgaaaaccagcgcctcgtggcccaggataactttgggtatgacctggcagctgtggaggccgccaagaagaagcatgaggccatcgagaccgacacggctgcctacgaggagcgggtgagagccctggaggacctggctcaggagctggagaaagagaactaccatgaccagaagcgcatcacggcccgcaaggacaatatactgcgcctatggagctacctgcaggagctgctgcagtcccggcgccagaggctcgagaccaccctggcactgcagaagctcttccaggacatgctgcacagcatcgactggatggatgagatcaaggctcacctcttgtctgccgagtttgggaagcacttgttggaggttgaagacctgctacagaagcacaagttgatggaagctgacatcgccatccaaggggacaaagtgaaggccatcaccgcagccaccctgaagttcaccgaggggaaagggtaccagccttgtgacccccaggtcatccaggaccgcatgagccacttggagcagtgctttgaggagctgagcaacatggcagctggcgcaaggacccaactggagcagtccaaacgactctggaagttcttctgggagatggatgaggctgagagctggatcaaggagaaggagcagatctattcttccctggactatggcaaagacctgaccagtgtgctcatcttacagcgcaagcacaaggcctttgaggatgagctccgtgggctggatgctcacctggagcagatcttccaggaggctcatggcatggttgcgcgcaagcagtttgggcacccgcagatcgaggcccgcatcaaggaggtgtcggcacagtgggaccagctgaaggacctggctgccttctgcaagaagaacctccaggatgctgagaactttttccagttccagggcgatgcggatgacctgaaggcttggctgcaagacgcccaccggctgctctctggtgaagatgtggggcaggacgaaggggccacgcgggccctggggaaaaagcacaaggacttcctggaggagctggaggagagccgtggggtgatggagcacctggagcagcaggcccagggattccccgaagagtttcgggattccccagatgtgacccatcggctgcaggccctgcgggagctctaccaacaggtggtggcccaggcggacctgcgtcagcagaggctgcaggaagccctggacctgtacacggtgttcggggagacagacgcctgtgagctgtggatgggagagaaggagaagtggctggccgagatggaaatgccagacaccctggaggacctggaggtcgtgcagcacaggttcgacatcctggaccaggagatgaagaccttgatgactcagattgatggtgtgaacctcgctgccaacagcttggtagagagtggccacccacgcagcagggaggtgaagcagtaccaggaccatctgaacaccaggtggcaggcatttcagaccctggtgtcggagcggcgggaggctgtggactcagccctccgagtgcacacactactgcgtagattgcgaggagaccagcaagtggatcacggacaagacaaaggtagtggagtccacaaaagacctggggcgggacctggcaggtatcatcgccatccagaggaagttgtcagggctggagcgtgacgtggccgccatccaggcccgtgtggatgccctggagcgtgagtcccagcagctgatggactcgcaccctgagcagaaggaggatattggtcagcggcaaaaacacttggaggagctgtggcagggcctgcagcaatccctgcagggccaggaggacttgctgggggaagtcagccagctgcaggccttcctgcaggatctggatgacttccaggcctggctctccatcacccagaaggctgtggcctctgaggacatgcccgaatccctcccagaggctgagcagctcctgcagcagcatgcaggtatcaaggatgagattgacgggcaccaagacagctaccagcgtgttaaggagtctggggagaaagtgatccaaggccagacggacccagagtatctgcttctgggccagcggctggagggcctggatactggctgggatgccctgggcaggatgtgggagagccgcagccacaccctcgctcagtgccttggcttccaggagttccagaaagatgccaagcaggctgaagccatcctcagcaaccaggaatacactctggctcacttggagcccccagactccctggaagctgcagaggctgggatccggaagtttgaggatttcttggggtctatggagaacaaccgggataaggtcttgagtcctgtggactctggaaacaagctggtagctgagggaaacctatactcagacaagatcaaggagaaggtgcagctgattgaggacaggcacaggaagaacaacgagaaggcccaggaggcctctgtcctactgagagacaacctggagctacagaacttcctccagaactgccaggagctcactctctggatcaacgacaagctgctgacatctcaggatgtctcctatgatgaagcacgaaaccttcacaataaatggctaaagcaccaggcgtttgtggcagagctggcttcccatgaagggtggctagagaacatcgatgcggaaggaaagcagctgatggatgagaagccccagtttacagccctggtgtcccaaaagctggaagccctgcaccggctctgggacgagctgcaggccaccacaaaggagaagacccagcacctctcggctgccaggagctccgacctgcgcttgcagacccatgctgacctcaacaagtggatcagcgccatggaggaccagctgcggtcagacgacccgggcaaggacctgaccagtgtcaatcggatgttggctaagctgaagcgagtggaggaccaagtgaatgtgcggaaagaggagctgggggagctgtttgcccaggtgccttcaatgggagaggagggaggagatgcagacttgagcatcgagaagcggttcctggacctcctggaacccctaggaaggaggaagaagcagctggaatcatccagagccaagctgcagatcagccgggacttagaggatgagacgctttgggtggaggagaggctgcctctggcccagtcagccgactatggcactaatctgcaaactgtgcaactgttcatgaagaagaaccagacactgcagaatgagattctgggccatacgccgcgggttgaggatgtgctgcagagagggcagcagctggtggaggcggcggagatcgactgccaggaccttgaggagcgcctggggcacctgcagagctcctgggacaggctgcgggaggcagcggccgggaggctgcagcgactgagggacgccaatgaggcacagcagtactacctggatgcggacgaggctgaggcctggattggcgagcaggagctctatgtcatctccgatgagatccccaaggatgaagagggcgccatcgtgatgctgaagcgacatttgcggcagcagcgtgcggtggaggactacggccggaacatcaagcagctggccagccgggcccagggcctgctgtctgcaggccaccctgagggggaacagatcatcagacttcaggggcaagtggacaagcactacgcagggctgaaggacgtggcggaagagcgcaagcgcaagctggagaacatgtaccacctgttccagctcaagcgggagaccgacgacctggagcagtggatttcagaaaaggagctagtggcctcttccccggaaatggggcaagactttgaccacgtgactcttctgcgggacaagttccgggactttgcccgggagaccggggcgattgggcaggagcgggtggacaatgtgaatgccttcatcgagcgactcatcgacgcgggccacagcgaggcggccaccatcgccgagtggaaggacgggctgaacgagatgtgggcagacctcctggagctcattgacacgcgcatgcagctgctggccgcctcctatgacctgcaccgctacttctacacgggtgccgagatcctgggccctattaacgaaaaagtctctctagcttgtccgaggatattgggtttgtattctatct

SEQ ID NO: 382959 - DNA, 392 bp, Homo sapiens
tccattatattcaactgtttctcaaaccacatggccttccaaactcttcattattttggttattttctctctagaaagactccagtttgagtagatattagaacctattgaaacaatttgttctttttttttctgggcactgtgcttttattaatgcagcctaagattaccttagttttggcagccagattgcaccaacgactcacactgatttatcttttaagtgtagtttttaaatttatttttgtgtgaattttttactggtttcctccattctgtgctttccagctatgttctctctttttttttaatccaagtataggtgtttacatttttactgtaacagtgtgatgattttggtccattttttcatcctgttgaaatattgctat

SEQ ID NO: 382960 - DNA, 1104 bp, Homo sapiens
tcccatccccaccctgcacattcctagccctttgcagaatttgtcccaccccctggtcccctgttcaccccttgtagcaacccctgtttgaagctcctgggctgggctctgctggcctaggtgggtcctcctcacccttcactgagcctccctgaagcagaggggaaactgaggcactgaggggacatgtgacttccctgagaggcagagctgggactggaacccaggtgtgtttcaggaaggagctgtgggctttgagggaggaggcctgggtccccacagtccccccctcaagcctcagtgtccttatatgcaaaccagcagtcacagtggtgaccttttctgtgcatcctccctcaatgaagcagtgagcactgaagaccaggaacagggcctggtgcgggcggggtccacctgctgctgctctctgtgcttgcgactcatggcaacacagttaattgaatgctctggcctcttgcgtgctgtgcccgggggctggtctcccactgggctcaggtccagttcctgatctgggtctccgggtcccatcctgcgaggggacaggcccagctccgggtgacgggggctgtagtggaggcagtactaggtgccagaactgcaggctccttggcgggggctgacaccagcgaggggatcttttctgtagcgcagtggccacattgataaggcagtaacagctgattatctcagccctcacagagaccctgttatccgccccatttttcagaaggggagactgaggcctagggaagcaaaacctcttgctcatagtttgtcagcggcagaggtctgattggaacatgactgaaaccccagcccagatcctcagacatgagacggtgcactcagccttaatggctagcaggcaacagcacttccactgtgtaggaagcaatgtcctaggccaagaaggggagagggagaggggcaggtaggcttcgtggaggaggtgtctgaaccgggtagaagggttcctacgtggagcaagacggggaggggcactgctggcagtgggcatcgcagggcacaggtggcagggcagggacgtgctagaagtgggcttggagcccgggtgcacccctg

SEQ ID NO: 382961 - DNA, 193 bp, Homo sapiens
ctcagtgggaattctataaatttgatttcatgcctccaaagtcattccatagccctttttaaggcagacctctctctgttgtgtcagggtgctgtgggacattgtctttaagattttagaaaactttagtttaattgagaggggctaactaggtactctgttaaatctttctgaggttttaactaaaggtctt

SEQ ID NO: 382962 - DNA, 281 bp, Homo sapiens
catgattgttggtcttgggtgcatgccaggggctggaggacaatgccttgccctcaccaggtgtcatctccaagctggcgcctcccctgcactttcaacaggccgctccgtccttcttccagtctggcagctgctgggtggtgcagggtgggatacgaccaggggggtcccgccttcactgtcagtgggcccattggtctggcaccatgtgatacggcgtctctactagtttgtcggggctgctgtagcaaagtagcactcgttgcgcagctgtaacaacg

SEQ ID NO: 382963 - DNA, 271 bp, Homo sapiens
ccactaccattttgcactaaagtacaagtgcagattaagtgagttattcagttggttgcaacagcataccactacaggggtagctggtcttctaaacagagcttgggatattactttacttacatttttttttttttttgaaacagggtctcactctgtcacctaggctgcagtgcagtggtacaatcacagttcactgcagccttgacctcttgggctcaagcaatcttcctgccttagcctcctgagtagctgggactacaggtgagcc

SEQ ID NO: 382964 - DNA, 407 bp, Homo sapiens
aactaaagaaagaaatcttagtgaattgaaatttcaaaggctcgtggtgataatattttctagcaaagcaaggtttggtatttcaataaagcaagacttagtggttcatgagtaaaatgcatatgcttttgtgcaactttttcaagaaaatgtaatggaaataaacgtctgcagtgtgttttgggtgctgtagttaaacagtccacgtgtatttgactgcagtagttgtactgtgtgcagttctattatttctaagtgaatctgtggtaaaaacacccttattccaagatctaaactatataatctgtgttgttttatttccacttgaattcgttgtcatttttcacttttaatgtttgaactactgccttttctacaaaaaaaaaagcattggggagaaatcgtta

SEQ ID NO: 382965 - DNA, 743 bp, Homo sapiens
tcaggcaagagtggagcacagaggaaaggggtgtctttctcaagagagaagcaaactgcgggtcaaagtgcaccaccagccaccaacagctagcttccggatcaagtaggatggaaatggtttattcctccaaagactcttaaaagagcagcccctgctgcagaatagaaagaggctccagaggagcagtgagctcgaggaacccccctgaagatccccagtttctgtatgcagctgcatcaggcccagacaaattcttccatctggggcgtgtccccgcagatcttcccagccgcggctgtggtccgcgttatctcaggctgtcaggtctcagaaattagaaaccatctcatttcatcagggtcatccccacaccgtctgccaccatagatgggagaggatttcaagtgatgttttctgaagatggttctgttgtcccgggagagcccttggcggacatggtagtgccagtcagagcccttgacgctgtgcagccaggtggcttattgtcccagtgactttccaaccagatactctcagtcagagtgaagggctccacttagaaactccctttcccattaactcgtcagagttatgccattcctctttattctttttaaaatatttatactcaaagaaattgtatggggagtgagcacacaccaatcatataactgtcaaatgaaagcctttccttaaatgttcaagggcgccggaggaataaatttggagtcatgcagatc

SEQ ID NO: 382966 - DNA, 758 bp, Homo sapiens
tcacgacaataagctcaataaagattgaacacgacccaccgacatcccgctcttgtgagtatatagcaaactgcgggtcaaagtgcaccaccagccaccaacagctagcttccggatcaagtaggatggaaatggtttattcctccaaagactcttaaaagagcagcccctgctgcagaatagaaagaggctccagaggagcagtgagctcgaggaacccccctgaagatccccagtttctgtatgcagctgcatcaggcccagacaaattcttccatctggggcgtgtccccgcagatcttcccagccgcggctgtggtccgcgttatctcaggctgtcaggtctcagaaattagaaaccatctcatttcatcagggtcatccccacaccgtctgccaccatagatgggagaggatttcaagtgatgttttctgaagatggttctgttgtcccgggagagcccttggcggacatggtagtgccagtcagagcccttgacgctgtgcagccaggtggcttattgtcccagtgactttccaaccagatactctcagtcagagtgaagggctccacttagaaactccctttcccattaactcgtcagagttatgccattcctctttattctttttaaaatatttatactcaaagaaattgtatggggagtgagcacacaccaatcatataactgtcaaatgaaagcctttccttaaatgttcaagggcgccggaggaataaatttggagtcatgcagatc

SEQ ID NO: 382967 - DNA, 395 bp, Homo sapiens
ccaccaaatctggtacagttctgctgttttctaatggcaatgggtatttttattttgccttagtagatgttgtggtaaagatgatggaaaagtatgtcacctgaaatgaagaataggcatttaaaaaataataaggcatagtgtgcagaagtgtgggtaaggtgagagatgcgttaggcaattgggctggagattcagagcccagggtggtttgagctctgtgtggatgggaatcatgactccatccagcctgtcttcagagggttgttgctcttgccataaccctcctggtacctggcatggaggcatcagtctcctttagcttttatcaagaaaccaaaaaggcagctaacagtatgaaaagctgttcagcttcactcagaatgaaagaaatg

SEQ ID NO: 382968 - DNA, 936 bp, Homo sapiens
ctgcactctagcctgggtgatagaacaagaccctgtctcttaaaaaaaaaaaatgtattatgcaccaggtacaatgtgctaggtactggggagagatcttaaaaaaatgtattatacaccaggtacaatgtgctaggtgctggggagagatcaggggataaagcagagcaaaatttctgtcctcatggagcttgtggtctaaaggaggaaaaaaggcaataaacaaattaaaaaagaggaatacaaagtatgtgggtagggatgagtacaacagaggaaaatcaagcaggaaagatagaactctggaaagaagtagggccagtgtcaaataggatggccagggaatgccacactgagaaggtgacaccaaagcaaagacctacaggaggtgaagtggtgagccattcaggtcactaaaggaggcatgttcccaggagaggggacgacaatgcaaaggcaagaaggagcaccagcctgtgtgttgagaaaagcatggggacccaagcagctaaagtggaacacatgtaagaagaataaccgtaatgaggtctgagagacaactgggtgggaagtgtcttaatctgtttgtgttactataaaggaatatctgagtctgggtgatttataaagaaaaggaggtttgtttaggtcacaattctataggctgtacaaaaatcagcaccagtatctacatcaggtaaaggctggaggttgcttccactcatggcaaaaggggaagaggagccagtgtgtgcagaaatcacagggtgagagaggaagcaagagagagagggaagcaccgggctcttttaaaaaaccagctcttgggaaaactaatagagaactcactcactactctcaccatggcagggcattaatctatttatgagggatccatccttatgatccaaacacctcccactaaacccgacttcc

SEQ ID NO: 382969 - DNA, 357 bp, Homo sapiens
aaattaaaatgtcagtgtccacaaataaagttttaattggaacagagccatgatctttcaattacaggttgtctatagctgctttcgtactattacagctccgccaagcctgcaatgtttgccacctagccctttacagaagaagcatgctgaacccgggactagagcatctctctatgctcctggttgcattgcctttctcagaggcactgcttcacaaggttgagccttcaagcttgacaggtgtccatctcaggactgtgtcatccaaagttacattaataaaatcataggatttagtgtaattcattagggtgggtacaaagacaaagtaacatattacctgcacacataagg

SEQ ID NO: 382970 - DNA, 1184 bp, Homo sapiens
gccaaccctcttaagacaaataagccctcctgatccttgggaccatcagacatttaggatctaatgcttgaaagtgttgcttcgcttgttagatgttggatgccatctgttcaaatccaaatgctctccttctctgatgttgattattatttactgtggggagagcgtaataaaatagactcttcccctggctgcctttggacaagccccaagagtggcacctggtaccgtttttgatttttcattttccttgatggagctgtcacatctgggagatcatggatagattgcacatatttatcaaacgtgtggaagatggctgtaattttacaagaaaatttatctgtctccagaaagttcccattctaaaagactatttttatcccaacaaggaatgtcctgcattgatcttgttcttctcttggtgttgcacacgctgcctttcctatgcctttctcatctatttgttttaaaatggtcagttggatcagtcttctgcatctgaaaatgcacattccctgtctcagtgtgaaggaaaagcagatttcagtgagatatttcatttcctttcaagaatattgttttaagtgccaagtgaaattacgcatgctgagaatattagaacctagcaaggctggtcagaaaatgatgtcagaggcctttggtggaaattagagaagggggaagtggtgcatttggttgattagttagaagaataacaatgactaaaacctactatcaggttggggggcgggtcaccaaacaagactagaagagacaaaacctccactgtgactgtgggcccactgtgccaaataaatgaactgttaaactttcctgttcccctgccagttgtgtagaatagagtaaaaactgaccccaacacagaaccttggcctgggccagctactactaaccccacgacatgaaagctttattgacagtcggaaggcagcccatttgccctaccaaaccttcatagaaaaagtaaacataaggaaacctaccaaacatttcaaacattcctaagtgtcagccctattaactttgatgttcgtttggttattactacaaatccccacgtttatttcttttcaagagaaagttgttcgaaatgtgaacgttttccatctttacctgactggccaggagtaatcttataaaaatttgaaatttactcaaaa

SEQ ID NO: 382971 - DNA, 274 bp, Homo sapiens
gccaaccctcttaagacaaataagccctcctgatccttgggaccatcagacatttaggatctaatgcttgaaagtgttgcttcgcttgttagatgttggatgccatctgttccatttctataactttgtcatttcaaaaatgttattaattggaatcgtacagtatatggcctttggagattgactcccctccccctgcgcagcatcattaaggcttattaccttttggttaaaatgaatttctgttgttagtgaatagtttggccttgtgctt

SEQ ID NO: 382972 - DNA, 295 bp, Homo sapiens
gtggcacacagataaagcagtacatcagagggacctttatagctcggtgctcaagctagaataggagtaaaaaaattaaagagtgcctacctgaacaagtcagggagagaagaacaaagtaagctcaaagaaaacagaaaaagggaactagtaagaaattcaacctgtattaattacatataacggcaggtacacaaagataaacattggttctttgaaaagacaatgcagtgaaccagtgatctctggcaagactcatggaaacacagaaagggaacacaagagaaaaagccca

SEQ ID NO: 382973 - DNA, 347 bp, Homo sapiens
ctctagattctttataatacctgatacaatgtaaatgccatgtaaatagttgctataccatggttttttgtattattattattattttttattgttggatttttttcatattttcagttcatagttggttgaatgtggatgcagatacagtgggccaactgtatacatattttgggatcattttagtgggtagtaaaacttggttttccccaactgtttctgttaattcacagccagttatgaaatatgccacatttgtcctgattaaatagtgaaatgtcttagccctttccactgattatattgatagaaaagattaaaaagtggtggataaacctaaccaaaaa

SEQ ID NO: 382974 - DNA, 744 bp, Homo sapiens
ataatgtgagaaggagaggtgctttttattggatgtttctggaaaaacgttagtttgttatgagttacaggtctcaaacaatgtgtactgctttgcaaactactcttggaagaaggaacagcttgtcctctactggcaccatagtgtatctgcatttacattttccctgtcgtgcatgagcacctcttgggcacaatctgagatgcactttcagaacaccctaagatgaacttttcaagtttatttaaaaaccaacaacaacagcaaacaactccattggggttgtcaggaaactattaacatctccttggattatgagcgttgattttcagaacacagttgggaagtgctacactagaatattaatgtccttatccctaattttactttttagtctaaaaacataactagcttataaacttaattttgtttctaatgtactagctttttttttttagttaattcaattgtcagtaacttctactttaaaagcagcaaatttacactcataataatgtcactttcctctctcacttaaaacaatagttgaaatcaaattgtgtttcagcacaaactggactctgactctgtctaaagtcctgagctttggcacctactgagtaatcattcaatgtttgtattcagccaaggtcctaaatccttgagttaaaaaaccactccactttggctagagtccctggcttcttttgaattcaaaagattctgatgtttctataagattca

SEQ ID NO: 382975 - DNA, 860 bp, Homo sapiens
gattttttaggtttaggtgttgacagtagctctcacctcagcctgttctctctccttgtcatgcagcccacaggggagatggtcaggccagtgtgggggctaatgaataaatgctacactgtgcccactcaggtgggtaagggctggcactcctcttcccctggagtggggcggctgtgctggcacccttggcagacacagtaagggggactgcacctggaaaggatgggccagtcggggcaggactactcatcactcatagtgtgggtgtcagggttgtgtcacccctcccacctccctctgcagagacgcaaagtcaagagtaggaagaagccaacctctgaggtaaggcttcccctggaaggcccagggctggggctctctcctttcagagctcagttagacccagacacacggcagggagtcccaagggtagtggcaggccccctccaggaaactcacaaggttaccacagctcaactgaaaaggaagaacttcccaggactgtgacaccccagtgtgagaacaggaggatgaggtgctctgaaggcctttctgcccagtctgccctcttattcctcctgcaggtcacgacccccaggagacctggaggactgaatgctgctgcccccaaggaggaggctgccgtcttatcccaggagggagagcagaaaggttcaaaaggaagttgctgcgtatccatctgaggcctctgaggacagcaaagagcaaaggccctgggaccgggtctacgtgcccatgacagagctctggctggactggttctgagcctctaacacccccaagactcagaaccgtgaagaaaatctttccaataaatccaagagttgctgctgcta

SEQ ID NO: 382976 - DNA, 639 bp, Homo sapiens
atgctcatctacagaaacgccgcttggcctttggactacaccatctgtcgctcgctctaacgagccggcgttgcctgccaggggacgctcgggccgcaggaggtcgctgggtcgtgagctggcgccggggacgccgagcgactgcggggtttccctcagcgtcctgctatccggctgcccgccgcgctccttggtagtgtccgtgggcgcgcaggccttgaagaacctcctcgtggcgggaccccgagcgcaggagaggtgtcaaagagctggcgcgtctccagagccccgggaggaaggctgtaacggcagccccatcgtagacagggacattcgcatcccgagccctggatctctgaaaaccagcccagaatttggaagctggaaggaactttagatcgtccattctgagtgtctctcttcgctggcgttttcccactgaggttatgtaaacatgaagaggagcctacaagtgtcaaggaaaaaacgacagctaaccacagggcaggccatgggcaagatatctcagtgttctccgctctcataggtcagactcacctaggctggaggttgcggtgagccaagattgcgccgctggactccagtctgggcgacagagtgagaccctgtctcaaaagg

SEQ ID NO: 382977 - DNA, 2037 bp, Homo sapiens
atgctcatctacagaaacgccgcttggcctttggactacaccatctgtcgctcgctctaacgagccggcgttgcctgccaggggacgctcgggccgcaggaggtcgctgggtcgtgagctggcgccggggacgccgagcgactgcggggtttccctcagcgtcctgctatccggctgcccgccgcgctccttggtagtgtccgtgggcgcgcaggccttgaagaacctcctcgtggcgggaccccgaggtaactgctgaggcagataatggcgcctgggctgcggtggggcttgtcctgccgcctggcggctttctgcagggccaggatatacttacttttctgtaaaccaactcttccttagcgcaggagaggtgtcaaagagctggcgcgtctccagagccccgggaggaaggctgtaacggcagccccatcgtagacagggacattcgcatcccgagccctggatctctgaaaaccagcccagaatttggaagctggaaggaactttagatcgtccattctgagtgtctctcttcgctggcgttttcccactgaggttatgtaaacatgaagaggagcctacaagtgtcaaggaaaaaacgacagctaaccacagggcaggccatgggcaagatatctcagtgttctccgctctcataggtcaggtcacgacccccaggagacctggaggactgaatgctgctgcccccaaggaggaggctgccgtcttatcccaggagggagagcaggtgaagtccccaggggaggaagcacctagccccattcctgctgagcaggaggtggcaggtaccccagactgggaggtaaggacagcccggggcttcgactgaacgtctccagcgtgggtccaactgagcagccatggagcactgcagagtgggaggcagcagggcagggaggcagtgctggaggctggctcaaccccaagaccagcaggccaagctgccatcccaggggagcgaggacgtctgtgcagagctgagaggcagcagccatgtgtgaacagactgggcctcatcctggccccaccgactttgtgtggacagagcctgtttccctgtctgtgcaacacagaacctgcctgatctcactgctggatccctcttcttcctgccaggaaaataaaaaggttcaaaaggaagttgctgcgtatccatctgaggcctctgaggacagcaaagagcaaaggccctgggaccgggtctacgtgcccatgacagagctctggctggactggttctgagcctctaacacccccaagactcagaaccgtgaagaaaatctttccaataaatccaagagttgctgctgctataggccaggctgccacctttcggggcctccgtcttcagacaaacccagcctggcttcatccacactccctgtccccacagctgcaggaacagcacttcctgccaccgagccgtgtgaccacagtggattgtctctggaggggcccaagggggccctggccacccttctgactgactcggtgccaggggacagaccaacgtccctctcgtgctgacagccgggccgcaccctggcatgagggcatttacagaaatgctggcggaactgctgccagggaggctgtagggtcctctggcaaaagaggcctcaggtggctcctcagagtgtctgtggttctctgtcccaggctgttccctaagaaggtctgcccaggactcaggtaatcatatgctcattagaaactcttgggcactgcctgtgtgcccagcccagcccattatgtcggtgaggacagacgtggaggacagcagtccctgcccttggttggggctccaggccagcaagggccacagcccagaaggcagagcaggaagacaggactcggggcaggcagcctggcctgagtggactcgcctggtcggggccagacagagctcctggggccaaagggccgctgggtggtggagggcacggggggccgcaaaggcaggcattgggccttgacctccccgggggaccttggtggggcacccccgggaag

SEQ ID NO: 382978 - DNA, 2406 bp, Homo sapiens
atgctcatctacagaaacgccgcttggcctttggactacaccatctgtcgctcgctctaacgagccggcgttgcctgccaggggacgctcgggccgcaggaggtcgctgggtcgtgagctggcgccggggacgccgagcgactgcggggtttccctcagcgtcctgctatccggctgcccgccgcgctccttggtagtgtccgtgggcgcgcaggccttgaagaacctcctcgtggcgggaccccgagcgcaggagaggtgtcaaagagctggcgcgtctccagagccccgggaggaaggctgtaacggcagccccatcgtagacagggacattcgcatcccgagccctggatctctgaaaaccagcccagaatttggaagctggaaggaactttagatcgtccattctgagtgtctctcttcgctggcgttttcccactgaggttatgtaaacatgaagaggagcctacaagtgtcaaggaaaaaacgacagctaaccacagggcaggccatgggcaagatatctcagtgttctccgctctcataggtcaggtcacgacccccaggagacctggaggactgaatgctgctgcccccaaggaggaggctgccgtcttatcccaggagggagagcaggtgaagtccccaggggaggaagcacctagccccattcctgctgagcaggaggtggcaggtaccccagactgggaggtaaggacagcccggggcttcgactgaacgtctccagcgtgggtccaactgagcagccatggagcactgcagagtgggaggcagcagggcagggaggcagtgctggaggctggctcaaccccaagaccagcaggccaagctgccatcccaggggagcgaggacgtctgtgcagagctgagaggcagcagccatgtgtgaacagactgggcctcatcctggccccaccgactttgtgtggacagagcctgtttccctgtctgtgcaacacagaacctgcctgatctcactgctggatccctcttcttcctgccaggaaaataaaaaggttcaaaaggaagttgctgcgtatccatctgaggcctctgaggacagcaaagagcaaaggccctgggaccgggtctacgtgcccatgacagagctctggctggactggttctgagcctctaacacccccaagactcagaaccgtgaagaaaatctttccaataaatccaagagttgctgctgctataggccaggctgccacctttcggggcctccgtcttcagacaaacccagcctggcttcatccacactccctgtccccacagctgcaggaacagcacttcctgccaccgagccgtgtgaccacagtggattgtctctggaggggcccaagggggccctggccacccttctgactgactcggtgccaggggacagaccaacgtccctctcgtgctgacagccgggccgcaccctggcatgagggcatttacagaaatgctggcggaactgctgccagggaggctgtagggtcctctggcaaaagaggcctcaggtggctcctcagagtgtctgtggttctctgtcccaggctgttccctaagaaggtctgcccaggactcaggtaatcatatgctcattagaaactcttgggcactgcctgtgtgcccagcccagcccattatgtcggtgaggacagacgtggaggacagcagtccctgcccttggttggggctccaggccagcaagggccacagcccagaaggcagagcaggaagacaggactcggggcaggccagcctggccctgagtgcgaactcgtcactggtcaggggtccagacagcagcatccctgagggcccagagaggtggccagtcctgtggtgaggttgagaggtgtcaacgtgctggtggtcctcgctcgctctcagcgcctcctcggcctcagcttctgctctgaccacacttgaggagcccttcagcccagcgctgcactgtgggagcccctctctggactggtggaggctggagccggctccgtctgcttgcggggaggtatggagggagaggcgtgtgcgggaacctgggttgctcgcgggccagcaccagttctgggtgggcaggggctcagcgggccctgcactcggagcggccggctggtgcctctggccccaggcagtgaggggcttagcacctgggccagcagctgcagagggggcaccgggtcccccagtactgctggcctgccggcgctcaccacacttgaattgtcgccaggcctcagtcacctccccgcggggcagggctcaggacttgcagcctgccatgcccaagcctccctacggtgggctccctgcgaggcccgagcctcccggatgggtgcctcccactgctccacggcacctggtcccgtccactgcccaagggct

SEQ ID NO: 382979 - DNA, 1957 bp, Homo sapiens
gattttttaggtttaggtgttgacagtagctctcacctcagcctgttctctctccttgtcatgcagcccacaggggagatggtcaggccagtgtgggggctaatgaataaatgctacactgtgcccactcaggtgggtaagggctggcactcctcttcccctggagtggggcggctgtgctggcacccttggcagacacagtaagggggactgcacctggaaaggatgggccagtcggggcaggactactcatcactcatagtgtgggtgtcagggttgtgtcacccctcccacctccctctgcagagacgcaaagtcaagagtaggaagaagccaacctctgaggtaaggcttcccctggaaggcccagggctggggctctctcctttcagagctcagttagacccagacacacggcagggagtcccaagggtagtggcaggccccctccaggaaactcacaaggttaccacagctcaactgaaaaggaagaacttcccaggactgtgacaccccagtgtgagaacaggaggatgaggtgctctgaaggcctttctgcccagtctgccctcttattcctcctgcaggtcacgacccccaggagacctggaggactgaatgctgctgcccccaaggaggaggctgccgtcttatcccaggagggagagcaggtgaagtccccaggggaggaagcacctagccccattcctgctgagcaggaggtggcaggtaccccagactgggaggtaaggacagcccggggcttcgactgaacgtctccagcgtgggtccaactgagcagccatggagcactgcagagtgggaggcagcagggcagggaggcagtgctggaggctggctcaaccccaagaccagcaggccaagctgccatcccaggggagcgaggacgtctgtgcagagctgagaggcagcagccatgtgtgaacagactgggcctcatcctggccccaccgactttgtgtggacagagcctgtttccctgtctgtgcaacacagaacctgcctgatctcactgctggatccctcttcttcctgccaggaaaataaaaaggttcaaaaggaagttgctgcgtatccatctgaggcctctgaggacagcaaagagcaaaggccctgggaccgggtctacgtgcccatgacagagctctggctggactggttctgagcctctaacacccccaagactcagaaccgtgaagaaaatctttccaataaatccaagagttgctgctgctataggccaggctgccacctttcggggcctccgtcttcagacaaacccagcctggcttcatccacactccctgtccccacagctgcaggaacagcacttcctgccaccgagccgtgtgaccacagtggattgtctctggaggggcccaagggggccctggccacccttctgactgactcggtgccaggggacagaccaacgtccctctcgtgctgacagccgggccgcaccctggcatgagggcatttacagaaatgctggcggaactgctgccagggaggctgtagggtcctctggcaaaagaggcctcaggtggctcctcagagtgtctgtggttctctgtcccaggctgttccctaagaaggtctgcccaggactcaggtaatcatatgctcattagaaactcttgggcactgcctgtgtgcccagcccagcccattatgtcggtgaggacagacgtggaggacagcagtccctgcccttggttggggctccaggccagcaagggccacagcccagaaggcagagcaggaagacaggactcggggcaggcagcctggcctgagtggactcgcctggtcggggccagacagagctcctggggccaaagggccgctgggtggtggagggcacggggggccgcaaaggcaggcattgggccttgacctccccgggggaccttggtggggcacccccgggaag

SEQ ID NO: 382980 - DNA, 1222 bp, Homo sapiens
atgctcatctacagaaacgccgcttggcctttggactacaccatctgtcgctcgctctaacgagccggcgttgcctgccaggggacgctcgggccgcaggaggtcgctgggtcgtgagctggcgccggggacgccgagcgactgcggggtttccctcagcgtcctgctatccggctgcccgccgcgctccttggtagtgtccgtgggcgcgcaggccttgaagaacctcctcgtggcgggaccccgagcgcaggagaggtgtcaaagagctggcgcgtctccagagccccgggaggaaggctgtaacggcagccccatcgtagacagggacattcgcatcccgagccctggatctctgaaaaccagcccagaatttggaagctggaaggaactttagatcgtccattctgagtgtctctcttcgctggcgttttcccactgaggttatgtaaacatgaagaggagcctacaagtgtcaaggaaaaaacgacagctaaccacagggcaggccatgggcaagatatctcagtgttctccgctctcataggtcaggtcacgacccccaggagacctggaggactgaatgctgctgcccccaaggaggaggctgccgtcttatcccaggagggagagcaggtgaagtccccaggggaggaagcacctagccccattcctgctgagcaggaggtggcaggtaccccagactgggaggtaaggacagcccggggcttcgactgaacgtctccagcgtgggtccaactgagcagccatggagcactgcagagtgggaggcagcagggcagggaggcagtgctggaggctggctcaaccccaagaccagcaggccaagctgccatcccaggggagcgaggacgtctgtgcagagctgagaggcagcagccatgtgtgaacagactgggcctcatcctggccccaccgactttgtgtggacagagcctgtttccctgtctgtgcaacacagaacctgcctgatctcactgctggatccctcttcttcctgccaggaaaataaaaaggttcaaaaggaagttgctgcgtatccatctgaggcctctgaggacagcaaagagcaaaggccctgggaccgggtctacgtgcccatgacagagctctggctggactggttctgagcctctaacacccccaagactcagaaccgtgaagaaaatctttccaataaatccaagagttgctgctgcta

SEQ ID NO: 382981 - DNA, 825 bp, Homo sapiens
atgctcatctacagaaacgccgcttggcctttggactacaccatctgtcgctcgctctaacgagccggcgttgcctgccaggggacgctcgggccgcaggaggtcgctgggtcgtgagctggcgccggggacgccgagcgactgcggggtttccctcagcgtcctgctatccggctgcccgccgcgctccttggtagtgtccgtgggcgcgcaggccttgaagaacctcctcgtggcgggaccccgagcgcaggagaggtgtcaaagagctggcgcgtctccagagccccgggaggaaggctgtaacggcagccccatcgtagacagggacattcgcatcccgagccctggatctctgaaaaccagcccagaatttggaagctggaaggaactttagatcgtccattctgagtgtctctcttcgctggcgttttcccactgaggttatgtaaacatgaagaggagcctacaagtgtcaaggaaaaaacgacagctaaccacagggcaggccatgggcaagatatctcagtgttctccgctctcataggtcaggtcacgacccccaggagacctggaggactgaatgctgctgcccccaaggaggaggctgccgtcttatcccaggagggagagcagaaaggttcaaaaggaagttgctgcgtatccatctgaggcctctgaggacagcaaagagcaaaggccctgggaccgggtctacgtgcccatgacagagctctggctggactggttctgagcctctaacacccccaagactcagaaccgtgaagaaaatctttccaataaatccaagagttgctgctgcta

SEQ ID NO: 382982 - DNA, 871 bp, Homo sapiens
tggggaagggtggggaagggtgggcccggggtcacacggggtaatggcagagcaaggactagggtcagggtctctggctctcagctgcccatgccacctcctccttctctgcccgccccagtgccttatgggtccaaggttgactcctgtccctagggcaggcctgtgggccctgcctgatccctactgggaggatggtacctagggttggagccaaacaagtgtcctcctccagcgccagcctggccctgagtgcgaactcgtcactggtcaggggtccagacagcagcatccctgagggcccagagaggtggccagtcctgtggtgaggttgagaggtgtcaacgtgctggtggtcctcgctcgctctcagcgcctcctcggcctcagcttctgctctgaccacacttgaggagcccttcagcccagcgctgcactgtgggagcccctctctggactggtggaggctggagccggctccgtctgcttgcggggaggtatggagggagaggcgtgtgcgggaacctgggttgctcgcgggccagcaccagttctgggtgggcaggggctcagcgggccctgcactcggagcggccggctggtgcctctggccccaggcagtgaggggcttagcacctgggccagcagctgcagagggggcaccgggtcccccagtactgctggcctgccggcgctcaccacacttgaattgtcgccaggcctcagtcacctccccgcggggcagggctcaggacttgcagcctgccatgcccaagcctccctacggtgggctccctgcgaggcccgagcctcccggatgggtgcctcccactgctccacggcacctggtcccgtccactgcccaagggct

SEQ ID NO: 382983 - DNA, 1922 bp, Homo sapiens
atgctcatctacagaaacgccgcttggcctttggactacaccatctgtcgctcgctctaacgagccggcgttgcctgccaggggacgctcgggccgcaggaggtcgctgggtcgtgagctggcgccggggacgccgagcgactgcggggtttccctcagcgtcctgctatccggctgcccgccgcgctccttggtagtgtccgtgggcgcgcaggccttgaagaacctcctcgtggcgggaccccgagcgcaggagaggtgtcaaagagctggcgcgtctccagagccccgggaggaaggctgtaacggcagccccatcgtagacagggacattcgcatcccgagccctggatctctgaaaaccagcccagaatttggaagctggaaggaactttagatcgtccattctgagtgtctctcttcgctggcgttttcccactgaggttatgtaaacatgaagaggagcctacaagtgtcaaggaaaaaacgacagctaaccacagggcaggccatgggcaagatatctcagtgttctccgctctcataggtcaggtcacgacccccaggagacctggaggactgaatgctgctgcccccaaggaggaggctgccgtcttatcccaggagggagagcaggtgaagtccccaggggaggaagcacctagccccattcctgctgagcaggaggtggcaggtaccccagactgggaggtaaggacagcccggggcttcgactgaacgtctccagcgtgggtccaactgagcagccatggagcactgcagagtgggaggcagcagggcagggaggcagtgctggaggctggctcaaccccaagaccagcaggccaagctgccatcccaggggagcgaggacgtctgtgcagagctgagaggcagcagccatgtgtgaacagactgggcctcatcctggccccaccgactttgtgtggacagagcctgtttccctgtctgtgcaacacagaacctgcctgatctcactgctggatccctcttcttcctgccaggaaaataaaaaggttcaaaaggaagttgctgcgtatccatctgaggcctctgaggacagcaaagagcaaaggccctgggaccgggtctacgtgcccatgacagagctctggctggactggttctgagcctctaacacccccaagactcagaaccgtgaagaaaatctttccaataaatccaagagttgctgctgctataggccaggctgccacctttcggggcctccgtcttcagacaaacccagcctggcttcatccacactccctgtccccacagctgcaggaacagcacttcctgccaccgagccgtgtgaccacagtggattgtctctggaggggcccaagggggccctggccacccttctgactgactcggtgccaggggacagaccaacgtccctctcgtgctgacagccgggccgcaccctggcatgagggcatttacagaaatgctggcggaactgctgccagggaggctgtagggtcctctggcaaaagaggcctcaggtggctcctcagagtgtctgtggttctctgtcccaggctgttccctaagaaggtctgcccaggactcaggtaatcatatgctcattagaaactcttgggcactgcctgtgtgcccagcccagcccattatgtcggtgaggacagacgtggaggacagcagtccctgcccttggttggggctccaggccagcaagggccacagcccagaaggcagagcaggaagacaggactcggggcaggcagcctggcctgagtggactcgcctggtcggggccagacagagctcctggggccaaagggccgctgggtggtggagggcacggggggccgcaaaggcaggcattgggccttgacctccccgggggaccttggtggggcacccccgggaag

SEQ ID NO: 382984 - DNA, 2009 bp, Homo sapiens
atgctcatctacagaaacgccgcttggcctttggactacaccatctgtcgctcgctctaacgagccggcgttgcctgccaggggacgctcgggccgcaggaggtcgctgggtcgtgagctggcgccggggacgccgagcgactgcggggtttccctcagcgtcctgctatccggctgcccgccgcgctccttggtagtgtccgtgggcgcgcaggccttgaagaacctcctcgtggcgggaccccgagcgcaggagaggtgtcaaagagctggcgcgtctccagagccccgggaggaaggctgtaacggcagccccatcgtagacagggacattcgcatcccgagccctggatctctgaaaaccagcccagaatttggaagctggaaggaactttagatcgtccattctgagtgtctctcttcgctggcgttttcccactgaggttatgtaaacatgaagaggagcctacaagtgtcaaggaaaaaacgacagctaaccacagggcaggccatgggcaagatatctcagtgttctccgctctcataggtcaggtcacgacccccaggagacctggaggactgaatgctgctgcccccaaggaggaggctgccgtcttatcccaggagggagagcagaaaggttcaaaaggaagttgctgcgtatccatctgaggcctctgaggacagcaaagagcaaaggccctgggaccgggtctacgtgcccatgacagagctctggctggactggttctgagcctctaacacccccaagactcagaaccgtgaagaaaatctttccaataaatccaagagttgctgctgctataggccaggctgccacctttcggggcctccgtcttcagacaaacccagcctggcttcatccacactccctgtccccacagctgcaggaacagcacttcctgccaccgagccgtgtgaccacagtggattgtctctggaggggcccaagggggccctggccacccttctgactgactcggtgccaggggacagaccaacgtccctctcgtgctgacagccgggccgcaccctggcatgagggcatttacagaaatgctggcggaactgctgccagggaggctgtagggtcctctggcaaaagaggcctcaggtggctcctcagagtgtctgtggttctctgtcccaggctgttccctaagaaggtctgcccaggactcaggtaatcatatgctcattagaaactcttgggcactgcctgtgtgcccagcccagcccattatgtcggtgaggacagacgtggaggacagcagtccctgcccttggttggggctccaggccagcaagggccacagcccagaaggcagagcaggaagacaggactcggggcaggccagcctggccctgagtgcgaactcgtcactggtcaggggtccagacagcagcatccctgagggcccagagaggtggccagtcctgtggtgaggttgagaggtgtcaacgtgctggtggtcctcgctcgctctcagcgcctcctcggcctcagcttctgctctgaccacacttgaggagcccttcagcccagcgctgcactgtgggagcccctctctggactggtggaggctggagccggctccgtctgcttgcggggaggtatggagggagaggcgtgtgcgggaacctgggttgctcgcgggccagcaccagttctgggtgggcaggggctcagcgggccctgcactcggagcggccggctggtgcctctggccccaggcagtgaggggcttagcacctgggccagcagctgcagagggggcaccgggtcccccagtactgctggcctgccggcgctcaccacacttgaattgtcgccaggcctcagtcacctccccgcggggcagggctcaggacttgcagcctgccatgcccaagcctccctacggtgggctccctgcgaggcccgagcctcccggatgggtgcctcccactgctccacggcacctggtcccgtccactgcccaagggct

SEQ ID NO: 382985 - DNA, 721 bp, Homo sapiens
atgctcatctacagaaacgccgcttggcctttggactacaccatctgtcgctcgctctaacgagccggcgttgcctgccaggggacgctcgggccgcaggaggtcgctgggtcgtgagctggcgccggggacgccgagcgactgcggggtttccctcagcgtcctgctatccggctgcccgccgcgctccttggtagtgtccgtgggcgcgcaggccttgaagaacctcctcgtggcgggaccccgaggtaactgctgaggcagataatggcgcctgggctgcggtggggcttgtcctgccgcctggcggctttctgcagggccaggatatacttacttttctgtaaaccaactcttccttagcgcaggagaggtgtcaaagagctggcgcgtctccagagccccgggaggaaggctgtaacggcagccccatcgtagacagggacattcgcatcccgagccctggatctctgaaaaccagcccagaatttggaagctggaaggaactttagatcgtccattctgagtgtctctcttcgctggcgttttcccactgaggttatgtaaacatgaagaggagcctacaagtgtcaaggaaaaaacgacagctaaccacagggcaggccatgggcaagatatctcagtgttctccgctctcataggtcagagtgagactcacctaggctggactgcaatggtgcaatctcggctcactgcaacc

SEQ ID NO: 382986 - DNA, 172 bp, Homo sapiens
agcctcatcctatctatctacaaaggtcacaaggatctccctttcctgaaggctcctctcctcatttgtgttaagtcagtccaggctgttacagaacactgaagggtctcaacaaatatgtaaagtaacagccctggatttcagtatcagaatggcaatgtcttaatatttc

SEQ ID NO: 382987 - DNA, 334 bp, Homo sapiens
gaaaaaactaaaaggcagaaatgaaatccacaagcagacagcccagcgccacaccctgggcctggtagttaaagatcgacccctgacctaatcggttatgttatctatagattacagacattgtatagaaaagcactgtgaaaatccctgtcctgttttgttcttaattgccagggcatgcagcccccagtcacacacctgcttcttgctcaatcgatcacgaccctctcatgcgcacccccttagagatgtgagcccttaaaagggacaggaattgctcacttaaggagcttcgctcttgagacaggagtcttgctgatgcccccagccgaat

SEQ ID NO: 382988 - DNA, 364 bp, Homo sapiens
atttcatatacattaacacaaattagggcaacagtcctataaggtggacattatcctcattttttagatgaagaaaccagtgcttagaaagaatatacacttgtaacaggtagggcaaggactgtaacacagacttgtctggcttcagagactagaggctttgtagaaagctaccttgcctctgcaaaaggataaactgctaaaacataaacttcatgaaataaaaccaaaatcagtaaactggagggagacccctgtgtcctgggactattgcctctaactagcagcatgaccctgggcacatcttttgggtttcagtttctttgtctatgaaatgacagtgtcagatccaattgtttcttcc

SEQ ID NO: 382989 - DNA, 154 bp, Homo sapiens
tggcagcctgagctgatgaataaaacaggtgagtatgtggggatatcccctccattgttgtgtcttcattccagttctgagtcaggagattctcggaatttcctgggagtaacagttccatccaagttacaagttgcgttaggagaaagaaaag

SEQ ID NO: 382990 - DNA, 156 bp, Homo sapiens
gattaaataagacacagataaatagaaaggcatcctgtgtttccaaattggaatgcttaatattgttaagatgtccaaactatctaaagcaatcagcagattcaatgcaatccttatcaaactattaatatctttttttcaggaataaaaaaaaaa

SEQ ID NO: 382991 - DNA, 531 bp, Homo sapiens
tggtctgtaattttttgtgtgtgatgtctttagtttggataccaggttaatatcaccctcatagaataagttaggaaatgttctttcctcatctgtattttgaaagactttatgaaggattggtgttaattcttctttaagtatttggtagattcaccagtgaggctgcctgctggtcttcagcttttcttagtggaaagttttttgattactacctcaatctctttacttgacataggtctgtctattcagattttctgtttttttctcaagtcagattcagtagttcatatctttctggtaatgtgtctttcatccagcttatccaattattagcatatattgtttatatgtataatcctttttattcatattataatcctttttatgtctctaagaacaatagtaatgtcccctctcatttctagttttaataatttggtcttctgtatttttgcagtgcagtggctcacacctgtcatcctagcactttgggaggctgcggtgggaggattgcttgaccccaggagt

SEQ ID NO: 382992 - DNA, 876 bp, Homo sapiens
cccagctactcaggaggctgaggcacgagaatcgcttgagtctgggaggcagagggtgcagcaggccaagatcatgccactgcactatagccttggtgacagagtgagactctgtctcaaaataataacaataaataaagttatattttaacaaaaggattgacaaccaaaaaccatgcttgtttcaagcaatatgtattaataatataataaaaatgcaaatacaactataaagtgagaatactatttggagttcaaaacagtaatgtctgacctatatgtaacacaactgaaatataaagcatctttcctcctgggcatgttgtttccgcagaagtgtggcctctgaagaaaaatgaaaataaaagaagctgacctaataattctagagtgatttcacctgatgaactgtttcaaagtaagcagataaaaatccaagtgagtgaaaacaaatccaatttgtaacaaaaatgttaaaaacctgatacttttaagctgaagtcttttcctggtccttcatttatttaccttcaaggtttctgaactaatcttgagatattttagaatcaaatatctgattttaacagatatgtgactggtctaatacatagctgataactactaagtaacggagtaactaaggtaaaacacaattctctctggatttgtttcaaatttcttctcctgaagacacgtgacatacaattcacgatgtgactttgagtttggggcagcgtttgcaaactgcggttcacaggccaaattcaacccactgtgaaagttgaaaaacaatcaaaataagactattttgtgacgtgaaaattacataaaattcaaatattgttgtccataaataaaattttattggaacacagc

SEQ ID NO: 382993 - DNA, 913 bp, Homo sapiens
ggttttaaatgcggagtcatctcttgatttgtcagcgaggctttgactgtgagcttcgcggcgttcgcgcctcaccgcctcaccgaggtgggtacgctgcgaagactaggcttatgttacccagaggttagtcctctactaggccacgtactttaaataatttatcacgctagtggaaatgcggggtggaagaaaaccccaccagcctttggattgtaacagcacagtaactttccctggtttttaaaaatattgccaaaatactgcgactccatgtggccaacgtatagtgactgatcactttgaaatgcatgcccttgacccaccaactcgcatggcctctcgctataagagagcaagccggctgtgttccatgttcaattcaataagtgcaattcaataagcttttgacttgttctgcccaagcaaatcctgcctttatatcgaccttgcaagcagaacagagaatgctgtttggaaggcagaattcatagtacctagttttcttgtccctgggaattttgagggacttgaaatgtcgcgtggatgagtgagggagtttgtcttccagagacaaagcaaaacgaaacgtcaaagttctgtgctggtgaaaccagatttgaagaatatcaaaggcgtcttaccaaagaggaaaaaaaatgcatcttgccaagacttgaagaaagggattagagaaaccagaggccttgaatactcagaaaatgggagattgtgaatgggtgtagaggatatctatgaaccttgacatttcttttcacgccaagtccattcccctgttaacagttgcttcccagtttcctgcacagctgcatggtctgggacacttaaagaaaaaaatcacaggaaatcagtgttcttggtatattatataaagttatgattctatcaacat

SEQ ID NO: 382994 - DNA, 537 bp, Homo sapiens
taattacagtcacctactatagcctcacaatgagccattataaaaatgaggaaactggggctccagaaagatttctcagccccaggacggtgcagccaggaaatatcatagctgggatttgagcccagcttgtctggacactgagcctgtgttttgcacactatgcacacacttctcccagatgaagatttgccttcatccaaggggaatgtctgtgtgagacagtggcagcctctgatgggttcctgctgattggcaaggtggttagagctgtgtattgagaggtcttctccaaggtatcagttttcctctgggagggttaaagaaggaccttgcaaagcccatggcctttgaatagagagctctgttctgtttgcagtgactcccctcaaaaggcagaatgcaattctctaaagggaaaaaaaaatgaggtggctgctctctggggttaagcagagaaaaccgtcaggcaggagaggtggggctgtatttgagagggtgggagtggcccaggagacctcacggtacagtcagctg

SEQ ID NO: 382995 - DNA, 355 bp, Homo sapiens
gaggggtgtacaaggagaactgtggctaaaaatgtccaacaaatagaatgcctttcatctcttattttctctatctctttcttaatccatgtcatttctcattaaaatgtacttggaaatttatcatcagagagctttatcttcccatgccagaaaaggcatgtgtcctagtggaagaggataatccccttttctgttcttctttggggctggtttaatacccagacttcacggagaattgatggatcagagctcgatgcagggagattagttagctttctaagaagcgaatacttcctgatcacaaagaggcaaaagctccctagacccaatggttttatacaggttttttacc

SEQ ID NO: 382996 - DNA, 406 bp, Homo sapiens
gctttaaaaaatcctgctccctagctgggtgcagtggtttatgcctgtagccccagctacttgagaggctgaggtgggaggattgctcaagcccaggagtttgaggctgcagtgagccatgaatgtaccactacactccagcctgggcaacagagcaagaccccaactctaaaaaaaaatcctgctccccaggtgacagtatctgggggaaggagtaaggcatcttattttcaaaagatcataagaaaagaggctcattgctgaggctcactccggagcccacttggattcttcacaagaaagtttccctcttccagaattttataattgagggaaccgactagggaaagattaatttgcccaaggtcaaacaactagtaaaagaagtaaggattccaacccagat

SEQ ID NO: 382997 - DNA, 251 bp, Homo sapiens
aaccatttcaagcttatagaaaagctacacaaacagcacagaaaggtcctgctggcctttacctgagatgcccgtctgcctttaactggttgtctcagtgttgtttactacagaaggtccaatctaggagcaaatgctgtacccaggcattatgtctctctggtctctgcaatctggaacattcttcctcctttccttggttttcatgaccttgacattttggaagattacagggcagtcattttgtagaa

SEQ ID NO: 382998 - DNA, 353 bp, Homo sapiens
gactgcacacctgtgtaccttcatgtcctgaaaagatcttttgacataggggctaggtataatacatttcatctattcatttcaaaatgaacatcggtcataagttacatgtatgtttatctaacatgcctgtgtcaggaccactttcttgaatactcagctcctcctgtaacttgttgaacatgtatgtttagccaaccttttcagcataaaactcctaccccaacccctcctccttccaaacgcctgtctctggtcttggctagaggcaggcttcccagcctgtgggacaaccaccttgcaggctgtaaccttttataagaattaaagcctcttctcttctaaatttataa

SEQ ID NO: 382999 - DNA, 480 bp, Homo sapiens
aatgaggaaaaaaaagaaagatgaaacttcagaagacagtccgtatttgaataatctttagaagaacatctgtattttgaaaagaaaattatcatatgcctcttaaaactgcaatttttcaaagttgaaaatatgtctctctctaattgaaatattaatagagtaccggtagtcagagttctttccaatttctgaactgaaattatgattttaaaacaaccaccaccaagctcttagagggtgatgactgtagcttaaaattttgtgactattgtgatcattgttaactttcataccaaatgtattgtttctctaagaatttttgacaatgagtgggtttactacatatacgtagttcctgttcttctcgggttttgtttgtttgtttgtttgtttactgcatatgaaacatcccaacacaaaaaagggattaattgacgtttctgtaattaaaactagtttttgcatttaagcttaaaa

SEQ ID NO: 383000 - DNA, 386 bp, Homo sapiens
atgagacaatgcatgcccacacaggtgagagccaccagagttcagagaaagagtgaaataaccaagcacagagaataaaggacacaaagtgcatctcgtgctttcttcttcagtcccacaagtctaggtgaggtcagcctcccactgcctcccgtaaagctgtggattttcctagacagccaattgtactatttcttcttccctccctctcctcctttcttccttccttccttccttccttccttccttccttcctttcttcctcccttccttttttattttttggcagggtctcactctgttacccaggctggggtacagtactgcaataatagcttactgcagccttgacctccaaggctctagtgatcctcccacctcagcct

SEQ ID NO: 383001 - DNA, 224 bp, Homo sapiens
tacctctctaaaactatctttaaagtttacatcttttttattcccattttatctgaatatgaagctttatgttcaaatatatgaaacttaaaaaaaatttaccagtttacatgctgttaaagtaaaatctttcttaatttttccagaaatgaacatgtcattatgatgtagtctttttctaaatacactgtttatgttcacactgaaacagaaatgcttatctg

SEQ ID NO: 383002 - DNA, 780 bp, Homo sapiens
tgagaccatcattcagcaattactcttactgcttgagaccgtcattatgactgaacgaagggacaaatgcagaaatgataaccaaaaaaaaaaaaagaaactgttttaaggaaaggcaacatgaggagaagagaggagagaaaaagaaaagagctccctgcttctagtgagcaaaggccactgcccgagcttctcagcccttcatatttattgggtaacaagagcaaggaggaggaggtaacaattggtcagctgcttaattgatcacaggttcatattgttacagacaggcttcaattttgcctaatcataagaaacatttatgcagcctccaacattacataatgataaaaggtctagtccaacaggaaaatattagaatcctaaatatatatgcacctaacactggagctcccaagtttacaaaaatagttgccactagacttaagaaatgagatagatggtaacacaataatagtgtgggacctcaatactccactgacagcactagacaggtcatcaagacaaaaagccagaaaagaaacaatggatttaaactataccctaggacaaattaacagatatttacagaacattctacccaacgactgcagaatgtacattctattcatcagcacatggaatattctccaagacagaccgtatgataggccgcaaaacaattctcaaatttaagaaaatcagaattatagcaagtactctctcagactgcagtggaataaaattggaaatcaactccaaaaggaacattcaaaacca

SEQ ID NO: 383003 - DNA, 392 bp, Homo sapiens
gatgtcttggtacaagtgtgagtgaggaggggaggtagtgaaggatgcaggagacttgtccatgatctctggcctgagctcctggaggagattgacaggaatttcatcctttgtttcccagtgtttttatcttgaagaatttgggaagttcatcacctagaaggtggctttgagctggatctagggttggaagtggaatctcagctcaggggagagggtgactgcacgctgcaggagtgcttatgtgtcagggtgtgtatatgtaagtgtatacatgtgtgtgaacatagacgtgtgtgtatgtgtataaaatctcaatgtgaggcctgttcttggaaagcagcactttcatgcagctgggccttgtttggggaatgagagatgacagtgtg

SEQ ID NO: 383004 - DNA, 427 bp, Homo sapiens
  misc_feature (7)..(7): n is a, c, g, or t
tgagatngagtctcactctgtggcccaggctgcatgaatattctagcacattgtgggggaaacctcctttcccctcgcttgcattttcacaagaagggaatgtttcctcaccactcctggcctcttgcctggtcccacatacattactcccagggagacgagggcgctcttcctggaaatggatagagcccgtcttcctttgtgaaccagccagcccacggcacctggtctcaaggttctcttgcagacctgagtttcacagggcaggccctgcccacggaggcctctggaggccaacgctgcttgtggctggacaatgagtcttgctccgaggttaagaatgaagcctaagaagctcatcactgccaggcatgcaaaccacaccttcttcacaatccagctgccattctgacctccaggtgcctgc

SEQ ID NO: 383005 - DNA, 358 bp, Homo sapiens
ctaatattattccttgttttatttatgggttatgaataagttcagagaagttaaataacttgcccaatccaggaagtattggtgccaggatttgaacctagtttgctcaaatccccaaatccagtgcttataactcctcacttggggttatagatacttgtagcaattggcctgggttgttattcacatgccacagcaaatgtctagcctaaattaatttggttcaagaaacttcctgggcctggtgtggtggctcaagccagtaaacccagcacttgggcatgctgaggcagaaggattgcttgagctaagagttcaagaccaacctgggcaacataatgagatgccccgctctctc

SEQ ID NO: 383006 - DNA, 2863 bp, Homo sapiens
aataaatttgaaacagttaatcaacaagtcttgaattctgaggatttggtggcctttaaggataatatctgaattcatttttcagtgatgtagaaaaatatgaaaacttacaaatgtccttaaaaggtggagggttagggggtggaagacaagcagggggttaggagataagtaagcaggttctgagaaaattgagaatagagttgctgacctgagagtcatggtgtttgggatacagtttgggctggatcagggaggtgtatcaataagggcaggccaaaaagaaggcagacatttggctcactagtggcaaagggatggattgggagaaggctgaaattgagtagctagagtagtatccagaagcaagagaatttaatagcttaattgagggctgtttatgtacccaggccctgtcctaggcttcctacacatgatctcatttaatccccataacatattggagatagaaatgataatacccactgtaggtggggaaaacagacctggagaagttaaaatttcacctgatgccacaaagctagaatgtggcagagccagagaccatgtttttctgaattctcttaattactaccttctgtactgcttttcttaattctgaaagtgaatctactgttgacattaaacttgtatttgcttattggtgtgtagtttgtaacctgacaccatcacaattttttgggagtagctttgtaggaatccaggtagttatttgaggcaggattactctcaatgatctcctcctgataaggacataagatactgccatgttctggagaacaccttattttggaaggtgcccccaaagtattagatagtggaggtgacagcaaaagcggcaaaatggggtttcatcgcagaatctacttactcagttcttttacacaaaaaagtttctcctatatttagaaaagtgtcaaaagaggccaggcacggtggctcacgcctgtaatcccagcactttggaaggtagaggcgggcagatcacctgaggtcaggagttcaagaccagcctggccaacatggtgaaaccccatctctactaaaaatacaaaaattagctgggcgtggtggcaggcgcctgtaatcccagctactcgggaggctgaggcaggagaaacacttgaacccgggaggcggaagttgcagtgagccgagatcacaccattgcactccagcctgggggacaagagcgaggaaaaaaaaagagaaaaaaaaaaaaacagaaaagtgtcaaaatagcactataaagagagctcagaaataaaagaaatgaaggaattcattaggaactcaaggaattaattacacatgccaaatttaaaaccacctctggatatacatcttaggacttttgtgaaatctgcattaatttctactacactaattttgaattcgaaataattcagacatgattgtgttttactttttcaaagcatttgattttttaaaaaatcgtgtgaaatgtaaattgtttatttttttgttaaaagtacatgtgtattacaaatatagatattaaaggaaattttaaattgtcaaatgagaaaatttcttattctggtggagtgtgaaagtcaacacatcttttgtgcatagagaaacacattaatttcctgcttttgtggtgttgcttctcttgcttttgtattattgtccattagctggtactgtggaattcatcagatttctgagaatcttaatgaccttatgaatctttctaaaataatgcgtaacaaacaagactttctttattctgacttacatctattgattcaacagtttttaggcattaagaatttatgatacattactgtgtaatgtcagcttcttttgtttacttggatgacttttttattagaatgacttttgttttaatttgtaatacaattttaatgccgtataatgtgcaggaacttcagaatagaattgctaccctgcttaaagtctgtagatgggaggctgggcacagtggctcaggcctgtaatcccagcactttgggaggctgaggtgggcggatcacgaggtcaggagacagagactattctggctaacacagtgaaactccgtctctgttaaaaatacaaaaaattagttggatgttgtggcactcacctgtaatcccaggtactcaggagactgaggcaggagagtcacttggtcccgggaggcggggtttgcagcgagccaagatcgcgccactgcactccagcctgggcgacagaacgagactccgtctaaaaaaaaataaataaaaaaggtaaaggtctgtagatgagatatacaaaaatcagctgtacactagcagtgaatcatccaaaaattaaagtaagacaattccatttacagtagcatcaaaaagaatacctaggaatagatttaacacaagaagtataagacttaatgaaaactagaaagcattgttgaaggaaattttaaaagatctaagtaaatggaagggcatccaatgtctgtagaccagaagacttaatattgttaagatggccatgctacccaaattgctctatagagtcaatgcaattcctatcaaaattttgattacagaaattgacatatggctcctaaaattcatatggaaatacagaggaccctgtataatgaaaacagtcttgaaaaagaaaaagttggaagcctcaaatttcctgatttcagtgcttaaaagaaagctgtggtaataagacagtgtggtgctagcctgagaacagatgtacagatcagtggaatagaattgagaatccagaaataaaactttagatttctggtcagctgatttttgacaggtatttactgctcagtaggcaggactagggtgatttctga

SEQ ID NO: 383007 - DNA, 949 bp, Homo sapiens
cctgtattcctcagctcttccctagtgcggacagggagtctatcctgcccacacactcactcaccatcagatacacctgtccctgcgagggggttgctctccctgctccacctcaaagcagggtttgggctacattgatgttatccctaaagacacccgccctatgtgtcccccattttttctgtgaggggggtcacgaccctgtctgtgccaccctccccccgcacgcacgcgcacacacacacacacacacacacacacacacacacactatatacacatactaggattaaacatttaagtaaaaatttgcactccagcctgggcgacagaacgagactccgtctaaaaaaaaataaataaaaaaggtaaaggtctgtagatgagatatacaaaaatcagctgtacactagcagtgaatcatccaaaaattaaagtaagacaattccatttacagtagcatcaaaaagaatacctaggaatagatttaacacaagaagtataagacttaatgaaaactagaaagcattgttgaaggaaattttaaaagatctaagtaaatggaagggcatccaatgtctgtagaccagaagacttaatattgttaagatggccatgctacccaaattgctctatagagtcaatgcaattcctatcaaaattttgattacagaaattgacatatggctcctaaaattcatatggaaatacagaggaccctgtataatgaaaacagtcttgaaaaagaaaaagttggaagcctcaaatttcctgatttcagtgcttaaaagaaagctgtggtaataagacagtgtggtgctagcctgagaacagatgtacagatcagtggaatagaattgagaatccagaaataaaactttagatttctggtcagctgatttttgacaggtatttactgctcagtaggcaggactagggtgatttctga

SEQ ID NO: 383008 - DNA, 453 bp, Homo sapiens
tgccttctaacatgattgtgaggcttcctcagctacgtggaaataaactcctggagggcagatgcatgcctgccatcttcatcgtttcattaccaccatccaacactatcgggggacctgccctgataatcagcatgtaacgaggctcaacacaactctgtatgggaacagtcaggttggagtctacaggtgtatccagcagctccagagagacagcgaccagcgagaaggggccatgatgatggtggtggttttgtcaaaatgaaaagggggatatgtagggaaaagaaagagagatcagactgttactgtgtctacatagaaagggaagccataagagactccattttgaaaaagacctgtactttaaacaattgcttgctgagatgttgtttatctgtagctttgccccagccactttgccgcaaccactttgacccaatctggagctca

SEQ ID NO: 383009 - DNA, 315 bp, Homo sapiens
atgaatataagagagctccacatttgtagactaatattaagtaattaaaatacaatttataattctcctaatagccaacatcatattaattaccgaaacaatattttgctttttaaacattaacgcttttctccacaaaagtattttaaggtttttctttattataaaatttgaggcaacatttgtgtcattcgaaaatgcaaagataaagacaaagcaatcccctattagtattcctgactctagtcaggaccacttagtgtatgcacattttatacagcaatatatttattacactattggtggtggtctttg

SEQ ID NO: 383010 - DNA, 1475 bp, Homo sapiens
  misc_feature (1092)..(1092): n is a, c, g, or t
gtcatcctgcgtgcgtcggagcagcagcaccggccccgggtagcagcacagctgctcggccacgttgaggttgaagtgctcgcgcacggtgcgcaccaccagccccttccaactgtggggcatgaccttcagcgccagcggcacaaggtcgtcgaaggtggcgtccagcaccagtgcacccagctccgggtaggtcatggtggcccaggtggccgtgaagccgccaacagaccagccgtagaccaccaggtgcgcgggcgggaagtgcaggcggtgcagtgcgtactcgaccaccacgtccatggcgttggcgtcgtgctgagggaagggcacgccagtgctgctgccgaagccggggtggttccagcccagcacggagtagccggcctcgagcggtgcagacagacagcccatctcgtagaagcccgcgttgccttcgcagcagatgacgaggcgcggcccgtgcacgtggctgcccgggtgctggcggcggtccatgaacatagtgtcgatctcgttgccgtcacaggccaccagcttggcgcgccggccgtggtagcgctccacgaggcgctcttggccctgctgcagcagcggcagcagcgcgcgcgtcatcagggacacggagccggggtacacgagccagcggcccagcgagtgggccagcgcgtagctagcgagctggccgggcagctcgcggagctgctgcaagaggcactgcgcctggctgcgcgccccacgtggaggccgccccagcgcatccccgcccaagcgtctcgtcccgcagcaaccacacgcccgccgcggctgccgcgcaggtcagcgcccggtggctgctgctccggcccacggcgcgcacgtcatcccagcggaaggccacgggccagccgcggaatgggtaggtgtagctggcggtcaggtagatcttgaacacgcgcaccagcgccttcacgaagcagatgacgcacatgagcggtggccctaacgcccagccgctgggccgggatcgccgcgagaggcacagggcagtcttaggggataccggctcccggacaagccctgatggcctttgtgacctggccttccagggcngagggaaggctgcatcctgttgctaggtgatgggtgcacaaagggttcccagagatgatgaacccaaggttctgcccgtcccccgccttcgccaagaccccaccagctaaacgctcccaggcccagctttcccacccatgatttgagcagctactgtctccctctttcttccttatttatttattaaattgagatggggtctcaaaaaaaaaaactagtatgttagatcaataagaaaaaaaaagagggggggggggtaaaaaaatttcccggggggcacaaggtattaggggaaaccaggttttgtggacaaaggggccccaaaagggggcggtttataaaagaagagcaggggggggtaaaaacgggggggcggggaactg

SEQ ID NO: 383011 - DNA, 1296 bp, Homo sapiens
  misc_feature (1092)..(1092): n is a, c, g, or t
gtcatcctgcgtgcgtcggagcagcagcaccggccccgggtagcagcacagctgctcggccacgttgaggttgaagtgctcgcgcacggtgcgcaccaccagccccttccaactgtggggcatgaccttcagcgccagcggcacaaggtcgtcgaaggtggcgtccagcaccagtgcacccagctccgggtaggtcatggtggcccaggtggccgtgaagccgccaacagaccagccgtagaccaccaggtgcgcgggcgggaagtgcaggcggtgcagtgcgtactcgaccaccacgtccatggcgttggcgtcgtgctgagggaagggcacgccagtgctgctgccgaagccggggtggttccagcccagcacggagtagccggcctcgagcggtgcagacagacagcccatctcgtagaagcccgcgttgccttcgcagcagatgacgaggcgcggcccgtgcacgtggctgcccgggtgctggcggcggtccatgaacatagtgtcgatctcgttgccgtcacaggccaccagcttggcgcgccggccgtggtagcgctccacgaggcgctcttggccctgctgcagcagcggcagcagcgcgcgcgtcatcagggacacggagccggggtacacgagccagcggcccagcgagtgggccagcgcgtagctagcgagctggccgggcagctcgcggagctgctgcaagaggcactgcgcctggctgcgcgccccacgtggaggccgccccagcgcatccccgcccaagcgtctcgtcccgcagcaaccacacgcccgccgcggctgccgcgcaggtcagcgcccggtggctgctgctccggcccacggcgcgcacgtcatcccagcggaaggccacgggccagccgcggaatgggtaggtgtagctggcggtcaggtagatcttgaacacgcgcaccagcgccttcacgaagcagatgacgcacatgagcggtggccctaacgcccagccgctgggccgggatcgccgcgagaggcacagggcagtcttaggggataccggctcccggacaagccctgatggcctttgtgacctggccttccagggcngagggaaggctgcatcctgttgctaggtgatgggtgcacaaagggttcccagagatgatgaacccaaggttctgcccgtcccccgccttcgccaagaccccaccagctaaacgctcccaggcccagctttcccacccatgatttgagcagctactgtctccctctttcttccttatttatttattaaattgagatggggtctca

SEQ ID NO: 383012 - DNA, 3573 bp, Homo sapiens
  misc_feature (2259)..(2259): n is a, c, g, or t
  misc_feature (2341)..(2341): n is a, c, g, or t
  misc_feature (2529)..(2529): n is a, c, g, or t
  misc_feature (2531)..(2531): n is a, c, g, or t
  misc_feature (3246)..(3246): n is a, c, g, or t
cccgtctctatggcggccccaacggccgtccaggacgtggagcgaaatgagctcgggcgctgacggcggcggtggcgctgcggtggcggcgcggtcggacaagggcagtcccggggaggacggtttcgtcccgtcggcgctggggacccgcgagcattgggatgctgtctatgagagagaactgcaaactttccgagaatatggagatacaggtgaaatctggtttggagaagagagtatgaatcgactaataaggtggatgcagaaacacaagattccactggatgcttcagtgcttgatattggaactggaaatggtgttttcctggttgaacttgcaaaatttggtttctctaatattactggaattgattactctccttctgcaattcagctttctggaagtattatagaaaaagaaggtttatctaacattaagttaaaggtagaagactttttgaatctctccacacagctgtctggatttcatatttgtattgacaaagggacttttgatgccataagccttaatcctgacaatgcaattgagaagaggaagcaatatgtgaaatctctctccagggtgttgaaagtaaaaggcttttttctaataacgtcatgtaattggaccaaggaagagttgctaaatgaattcagtgaaggatttgaacttctcgaagagctaccaacacccaagttcagctttggaggcagatctggaaacagtgtagcagcattggttttccaaaaaatgtgagactttttcttggacgaattcagggagttgaccacatttggccatttcccagaagggccccaccccaagggtgagtggccaatggggagctgtttctgctgacatcaattccccaggaggtactcaccccaagtctgcccaagtgaagatggctgatacccaccctgggatggagcccagcgcctgaggcccttatcatggtgatggtcctaagtgaaagcctcagcacccggggagctgactccattgcatgtgggaccttcagccgtgaactgcacacgccaaagaagatgagtcaaggacctacacttttctcttgtggaattatggaaaatgacagatggcgagacctggacaggaaatgccctcttcagattgaccaaccgagcaccagcatctgggaatgcctgcctgaaaaggacagctcactatggcaccgggaggcagtgaccgcctgcgctgtgaccagtctgatcaaagacctcagcatcagcgaccacaacgggaacccctcagcaccccctagcaagcgccagtgccgctcactgtccttctccgatgagatgtccagttgccggacatcatggaggcccttgggctccaaagtctggactcccgtggaaaagagacgctgctacagcgggggcagcgtccagcgctattccaacggcttcagcaccatgcagaggagttccagcttcagcctcccttcccgggccaacgtgctctcctcaccctgcgaccaggcaggactccaccaccgatttggagggcagccctgccaaggggtgccaggctcagccccgtgtggacaggcaggtgacacctggagccctgacctgcaccccgtgggaggaggccggctggacctgcagcggtccctctcttgctcacatgagcagttttcctttgtggaatactgtcctccctcagccaacagcacacctgcctcaacaccagagctggcgagacgctccagcggcctttcccgcagccgctcccagccgtgtgtccttaacgacaagaaggtcggtgttaaaaggcggcgccctgaagaagtgcaagagcagaggccttctctagaccttgccaagatggcacaggcagcacagtgcagacttctgctgcgtgagtgagttgcgggggccccagaagcacgaagcccagcccggcgtggcccactgtctcccgtgcatggccctctgcttacccggactcaggagaagggcgtgtttgcggcctggaggacaggcgtggagaggtttgcttgatttccataactcaacacttgcccacacaatctgcccatggaagtctggcctagaatgcttgttagggccagagcagcccctctgggaatgaggctctgtagcccccgcttttcttttggtttttgcttttagcaagattttttttttttaagtctatgagcactgaactcaagaaacaaacatgtgaagtggggctgctggggggaggtgagccccttgtcctcactgccntccctgcagccctgccttacccaaggcctagggactcactgattcgaggctggatgcattgacttccccagcacaccctccnctcacccctgcctccgtatctgacagatgactggtgggccaggggctggcggggggcttctacccagcgcagtgcccccacccttgtgccccacctgagggtagggcacagagtggccctggaattacctctggcccttaccagccccttgctgcccccaatccctagatgaggtccctggctggatngnagctccgttctgcccccacgtggggcctggccccaggcctcacccccagtgcagtgcccaggccaggcacaggtgcttctgacatggggcacacgtgtagtctccttacctgcacagcgatcataaccctgtgggcttacgagagagactcagccactctgtccagtgtgcagggaaagggctggaaggaagaaggccgaaaggaaaggccccagagagcacagtgctcagactcccgggtgacttctggtttctttttatatacttctgttaaatttcctgtaataacacatgctgcttttataatgttaaaaaaaccacgtagaatgtaggctgccccgtgtgttcacctcctaaaccaggacagttctgaggggcagctggaactgttgacacgcactctggcacgggaggcggacccaagagcacccaccccagaggggcaccacactcgcccgtcccgccctgtgtccccacctctgccctgaggtgaacacaggaggctttccacctgccagctgccagccaacctccccgagaggggcaggaaccgaccagcaggacagacccacccaggacagcggcaccaggtcaggcctcagcctttccgatcctctggagggctcaagccgaacggaaggagggaagaactgcagtcacctgggccggtggcgctcacatctgacgtggaggcctctgcttcacttggcccagntcccagccttgtcggcagtgaggacatggaccctcgctggcatccgtcctccgtctggcacaacgtgccgtgttctctctggttagggtttgggtgggacggagactgcgcccctgttcctggtccgcctaagtctctgccagtctgagtctcgtgggccttttctgcaggccctggggttgcggagcaggcagggggacgtcggtggctgggggacatcccgccacctgccaagtagctgcaatgggaagagatgcggttcccgtgacagccaggcctggatgttcaagtcatgtgagaccaccaaataccttgttgcactaagcc

SEQ ID NO: 383013 - DNA, 6172 bp, Homo sapiens
cccgtctctatggcggccccaacggccgtccaggacgtggagcgaaatgagctcgggcgctgacggcggcggtggcgctgcggtggcggcgcggtcggacaagggcagtcccggggaggacggtttcgtcccgtcggcgctggggacccgcgagcattgggatgctgtctatgagagagaactgcaaactttccgagaatatggagatacaggtgaaatctggtttggagaagagagtatgaatcgactaataaggtggatgcagaaacacaagattccactggatgcttcagtgcttgatattggaactggaaatggtgttttcctggttgaacttgcaaaatttggtttctctaatattactggaattgattactctccttctgcaattcagctttctggaagtattatagaaaaagaaggtttatctaacattaagttaaaggtagaagactttttgaatctctccacacagctgtctggatttcatatttgtattgacaaagggacttttgatgccataagccttaatcctgacaatgcaattgagaagaggaagcaatatgtgaaatctctctccagggtgttgaaagtaaaaggcttttttctaataacgtcatgtaattggaccaaggaagagttgctaaatgaattcagtgaaggatttgaacttctcgaagagctaccaacacccaagttcagctttggaggcagatctggaaacagtgtagcagcattggttttccaaaaaatgtgagactttttcttggacgaattcagggagttgaccacatttggccatttcccagaagggccccaccccaagggtgagtggccaatggggagctgtttctgctgacatcaattccccaggaggtactcaccccaagtctgcccaagtgaagatggctgatacccaccctgggatggagcccagcgcctgaggcccttatcatggtgatggtcctaagtgaaagcctcagcacccggggagctgactccattgcatgtgggaccttcagccgtgaactgcacacgccaaagaagatgagtcaaggacctacacttttctcttgtggaattatggaaaatgacagatggcgagacctggacaggaaatgccctcttcagattgaccaaccgagcaccagcatctgggaatgcctgcctgaaaaggacagctcactatggcaccgggaggcagtgaccgcctgcgctgtgaccagtctgatcaaagacctcagcatcagcgaccacaacgggaacccctcagcaccccctagcaagcgccagtgccgctcactgtccttctccgatgagatgtccagttgccggacatcatggaggcccttgggctccaaagtctggactcccgtggaaaagagacgctgctacagcgggggcagcgtccagcgctattccaacggcttcagcaccatgcagaggagttccagcttcagcctcccttcccgggccaacgtgctctcctcaccctgcgaccaggcaggactccaccaccgatttggagggcagccctgccaaggggtgccaggctcagccccgtgtggacaggcaggtgacacctggagccctgacctgcaccccgtgggaggaggccggctggacctgcagcggtccctctcttgctcacatgagcagttttcctttgtggaatactgtcctccctcagccaacagcacacctgcctcaacaccagagctggcgagacgctccagcggcctttcccgcagccgctcccagccgtgtgtccttaacgacaagaaggtcggtgttaaaaggcggcgccctgaagaagtgcaagagcagaggccttctctagaccttgccaagatggcacagaactgtcagaccttcagcagcctcagctgcctgagcgcagggacagaggactgcggtccccagagccccttcgcccgccacgtcagcaacaccagggcctggaccgccctgctctcagcctccggcccagggggcaggacccccgctgggaccccggtccctgagcctcttcccccttccttcgacgaccacctcgcctgccaggaggacctgtcctgtgaggagtcagacagctgcgccctggacgaggattgtggcaggagagcggagccggctgcagcctggcgggaccgcggggcccctgggaacagcctctgctccctggacggcgagttggacattgagcagatagagaagaactgagggggtgtgggcccaggcagggctggggtgtgctggcatcgacagcccccactctgggcactaggtgggcccttgaaggggagcccaactcgtgggcctgatgaaagcttcctgagtggtgtcgggtcccagagagggagcccacctgctgcctgggggagagcctggcctggccgcgtcatacagcgggtgtgtcagcctctcaccggctccccgagcgtggcagccaccaggtccacagaactactgcagcccagaggacagctttgaagtttgcgtcttttctgcctctttccctgtgggatgttgggcagtctctgttgtccccggcagagctgggcaccgctctgtatccccctggtggtgggggctgtcagggagggcctggggtgggggccaggggccatctgctatgtcagggcccttcttggcctcactcaggttcacttctggggagtcggccccgcagcttctttcactcagttttactccgtgccttctctcccaggtctccctgcttcaggcttgggaaggttcgggagatgcttccttctgtaacaccagaaccatttggccttaattccaatgtgagagacagaatccctggggtgctggactggccctccagagggtaagccatgtccggagtctcgggcccaaggaacgatttggagggtgcttgttagggcctcccgtgttgggtagaaatttggtggatctgttggctgaaaagacggacttgcttgcctctcctacagcatggagaggctgaccccatggctctgccaccgttggggcagggttagcagatggcagcccttctctgtggctgacaggtcactgagtgataagcatggttggttccggtgagtgtagggatggcacgataccagggcagcctcttgaaaacggcctcgggagacgggagctgcgagcaggtgggcagatgagggccctatgcgcactcaggggtgaagggcgtccgctggccactctgcaggggcccctgcaggattccaggcacctcccgtttgtccttgaggactgctggctgtaaccagggcacatcacccacctcaagacaagcccacgcccttgtcagcttagggggagcccagtcctgagggctgcatctctgttgtaggcccagccaccggcacaaagctggattcatgctccctgcccctaccccaccctggctcctcaccctggggcatccgaggagcctagccccctgagggtttgctctcctctcaaggtttgtagctcctctccggctgccttgcagacaccaccacatgggctctgctctatgggaatctggcttttagcgaatgtggcgtcttctgcaaacaatagcaattgggctggcttaggagcaagtggctcattttcccataaggctaaaaataactggtgcgctcccttgtgttggctgacacgcgcgttcaaagcacttttgtagtcactttgcttttgctcgtcttcatggacgagtgaacgcctcgcttctgcaggttgagtccagatgcttctcaccttctttctcctcaagaaagatgctttttgggaaacgttgtttaaatcttatttttttactacatcaaaaggatggtggttcaagttcccaatatgtgggtggcacttcttaaaaatcagctttaaggagctggcagaaagcccccagccccacagccctgagagatggtgttgctagctcaggtggctgacacatggggtatgccgggcactgggcaggtcccagagccggggaaccagctcacctctggttgctgtagctcctgccggaggcatgtctacttgtgatcccggacagccgaacccaagagctggtggctctgagcagacagagacatcttggcctgtccctgcctgggggtcatggagaccatgtcttcttagagcaaatgtggaggcggccagggcagttgttgggtgaatgtggagagcacatggccatgtcttgcccccggagtaccactgggcgtggggggtcctggcaccacatgcccggtgtggccgagggcacacagcctctatagcaggccttcctgtggaaggcagaggcagtgagggaggtggacggtgccagctgaggctgaggcatgcagcagcccccagctacctttgcttagggctggggtgggaggcacatggtgacaggtatatgtcgtgggactggggtgtgggtgacctgccctcaaaccttgcctgccacctccccattcaggcctggtggcaggaagggacaagctgtggagctggctgagtcacagccacctccccacctccccgcaagctggtcccatcgaccagcaagcccagccccagggcgcttagggagaaatgacccagcctcctcagaccccgcctgcctgtcctgtgcccaccacgcagcagtcaggggagaaaatggtggctatcccttctgcttagagaaagaaatggcctttagctggtttcatgtttgtgttttgactggagggagtagaccctatctataaggtgccaccccatcatccaagctgccacactgcccggagcagcctgttcctgcactccaccctgctggccccaggacttctgatctcagtcctctgggagggaggttcgcctaggaggtgccccccacattggtgtccccatgggcagcaggcagacagctcacccccaccagcatgatggccccagctgggggcagtggcaggagccttacttttgtcacagccttgcccacaaaccctgcctctgaggggagactgaggaagggcagagccagaagcaagccgtgccaggccatctgcctgctcatggggtcctaaagcgcgggctaagcctgcaggaaagccggggcggtggggggggcttagtgccacatgcaccccactcattccaaagccaccaaactgccaggggctgccgtccacccgtggggcccaggggctggggccacagccttgccattttcgttgccataccctcttgccttactcgcggtggaggccggatttgcacgggcagacgtgcacctgggcccgtggggagcttgttctgaccagacgtacagattttcattctcagaaagccttacttttcaaccaaatttttgtagccagttttgtgaatttgtacactgaaagaaaatttaaataaaggggaagtccacattaaaaagaaaacaaaacaaaccctaactaacttccaaatgggtctcctggtgcgggggcgtgagtggccgtgccctgggtgtgctgcctgtctgagcaagcttccctagctgtggaaccccgggccccctgctgcgggctctgccttggtgtcatgcctgctgcacccccgtttccactgacgtgccgtctgtggctatgggggtggtcactggaatgacggtcactccagacgtcagccggcagggatgcagcaggctggccgcgcaccggggctcgggcaccctctggccccacactggcaatgatgccacaccttgccatgtccacgctgttggtcaaacccctctgtcatgcctctttaaagagaaaagaagagaaagattttttttttttttaatggcagaccgaagtggagatcttgtagcctagataggatagtctgaccttctagcatagtctttttggcaaatgatttgtgttttcagtgtgtggggaagctgtcctgggggctggggcgacagatagcacataggctgtttctggggctgcaggggcttccctgagctggatgttgtgggtgttgccgtgcttcaggaagtgtggcgaccagaaagcgtagacccggggcccagggtctgcccgcccctgcagcctggcctccccgcacaggctgtggcttgcactccagccgctctagtctctcaggaatttgcttgttacttgtactgtgtaaataaagcttcctggttcaataccca

SEQ ID NO: 383014 - DNA, 5910 bp, Homo sapiens
ctttaatgatcttggactgaagctcataaaagttagctataaagttgaaaatatgtttattatatgtaaaatgccattataattaatgggtccttttattaataaccttttacaggttgtcacttacattctgtaaggattttgttttaattgttctcacatagacattgacttttaatataggtagaagactttttgaatctctccacacagctgtctggatttcatatttgtattgacaaagggacttttgatgccataagccttaatcctgacaatgcaattgagaagaggaagcaatatgtgaaatctctctccagggtgttgaaagtaaaaggcttttttctaataacgtcatgtaattggaccaaggaagagttgctaaatgaattcagtgaaggatttgaacttctcgaagagctaccaacacccaagttcagctttggaggcagatctggaaacagtgtagcagcattggttttccaaaaaatgtgagactttttcttggacgaattcagggagttgaccacatttggccatttcccagaagggccccaccccaagggtgagtggccaatggggagctgtttctgctgacatcaattccccaggaggtactcaccccaagtctgcccaagtgaagatggctgatacccaccctgggatggagcccagcgcctgaggcccttatcatggtgatggtcctaagtgaaagcctcagcacccggggagctgactccattgcatgtgggaccttcagccgtgaactgcacacgccaaagaagatgagtcaaggacctacacttttctcttgtggaattatggaaaatgacagatggcgagacctggacaggaaatgccctcttcagattgaccaaccgagcaccagcatctgggaatgcctgcctgaaaaggacagctcactatggcaccgggaggcagtgaccgcctgcgctgtgaccagtctgatcaaagacctcagcatcagcgaccacaacgggaacccctcagcaccccctagcaagcgccagtgccgctcactgtccttctccgatgagatgtccagttgccggacatcatggaggcccttgggctccaaagtctggactcccgtggaaaagagacgctgctacagcgggggcagcgtccagcgctattccaacggcttcagcaccatgcagaggagttccagcttcagcctcccttcccgggccaacgtgctctcctcaccctgcgaccaggcaggactccaccaccgatttggagggcagccctgccaaggggtgccaggctcagccccgtgtggacaggcaggtgacacctggagccctgacctgcaccccgtgggaggaggccggctggacctgcagcggtccctctcttgctcacatgagcagttttcctttgtggaatactgtcctccctcagccaacagcacacctgcctcaacaccagagctggcgagacgctccagcggcctttcccgcagccgctcccagccgtgtgtccttaacgacaagaaggtcggtgttaaaaggcggcgccctgaagaagtgcaagagcagaggccttctctagaccttgccaagatggcacagaactgtcagaccttcagcagcctcagctgcctgagcgcagggacagaggactgcggtccccagagccccttcgcccgccacgtcagcaacaccagggcctggaccgccctgctctcagcctccggcccagggggcaggacccccgctgggaccccggtccctgagcctcttcccccttccttcgacgaccacctcgcctgccaggaggacctgtcctgtgaggagtcagacagctgcgccctggacgaggattgtggcaggagagcggagccggctgcagcctggcgggaccgcggggcccctgggaacagcctctgctccctggacggcgagttggacattgagcagatagagaagaactgagggggtgtgggcccaggcagggctggggtgtgctggcatcgacagcccccactctgggcactaggtgggcccttgaaggggagcccaactcgtgggcctgatgaaagcttcctgagtggtgtcgggtcccagagagggagcccacctgctgcctgggggagagcctggcctggccgcgtcatacagcgggtgtgtcagcctctcaccggctccccgagcgtggcagccaccaggtccacagaactactgcagcccagaggacagctttgaagtttgcgtcttttctgcctctttccctgtgggatgttgggcagtctctgttgtccccggcagagctgggcaccgctctgtatccccctggtggtgggggctgtcagggagggcctggggtgggggccaggggccatctgctatgtcagggcccttcttggcctcactcaggttcacttctggggagtcggccccgcagcttctttcactcagttttactccgtgccttctctcccaggtctccctgcttcaggcttgggaaggttcgggagatgcttccttctgtaacaccagaaccatttggccttaattccaatgtgagagacagaatccctggggtgctggactggccctccagagggtaagccatgtccggagtctcgggcccaaggaacgatttggagggtgcttgttagggcctcccgtgttgggtagaaatttggtggatctgttggctgaaaagacggacttgcttgcctctcctacagcatggagaggctgaccccatggctctgccaccgttggggcagggttagcagatggcagcccttctctgtggctgacaggtcactgagtgataagcatggttggttccggtgagtgtagggatggcacgataccagggcagcctcttgaaaacggcctcgggagacgggagctgcgagcaggtgggcagatgagggccctatgcgcactcaggggtgaagggcgtccgctggccactctgcaggggcccctgcaggattccaggcacctcccgtttgtccttgaggactgctggctgtaaccagggcacatcacccacctcaagacaagcccacgcccttgtcagcttagggggagcccagtcctgagggctgcatctctgttgtaggcccagccaccggcacaaagctggattcatgctccctgcccctaccccaccctggctcctcaccctggggcatccgaggagcctagccccctgagggtttgctctcctctcaaggtttgtagctcctctccggctgccttgcagacaccaccacatgggctctgctctatgggaatctggcttttagcgaatgtggcgtcttctgcaaacaatagcaattgggctggcttaggagcaagtggctcattttcccataaggctaaaaataactggtgcgctcccttgtgttggctgacacgcgcgttcaaagcacttttgtagtcactttgcttttgctcgtcttcatggacgagtgaacgcctcgcttctgcaggttgagtccagatgcttctcaccttctttctcctcaagaaagatgctttttgggaaacgttgtttaaatcttatttttttactacatcaaaaggatggtggttcaagttcccaatatgtgggtggcacttcttaaaaatcagctttaaggagctggcagaaagcccccagccccacagccctgagagatggtgttgctagctcaggtggctgacacatggggtatgccgggcactgggcaggtcccagagccggggaaccagctcacctctggttgctgtagctcctgccggaggcatgtctacttgtgatcccggacagccgaacccaagagctggtggctctgagcagacagagacatcttggcctgtccctgcctgggggtcatggagaccatgtcttcttagagcaaatgtggaggcggccagggcagttgttgggtgaatgtggagagcacatggccatgtcttgcccccggagtaccactgggcgtggggggtcctggcaccacatgcccggtgtggccgagggcacacagcctctatagcaggccttcctgtggaaggcagaggcagtgagggaggtggacggtgccagctgaggctgaggcatgcagcagcccccagctacctttgcttagggctggggtgggaggcacatggtgacaggtatatgtcgtgggactggggtgtgggtgacctgccctcaaaccttgcctgccacctccccattcaggcctggtggcaggaagggacaagctgtggagctggctgagtcacagccacctccccacctccccgcaagctggtcccatcgaccagcaagcccagccccagggcgcttagggagaaatgacccagcctcctcagaccccgcctgcctgtcctgtgcccaccacgcagcagtcaggggagaaaatggtggctatcccttctgcttagagaaagaaatggcctttagctggtttcatgtttgtgttttgactggagggagtagaccctatctataaggtgccaccccatcatccaagctgccacactgcccggagcagcctgttcctgcactccaccctgctggccccaggacttctgatctcagtcctctgggagggaggttcgcctaggaggtgccccccacattggtgtccccatgggcagcaggcagacagctcacccccaccagcatgatggccccagctgggggcagtggcaggagccttacttttgtcacagccttgcccacaaaccctgcctctgaggggagactgaggaagggcagagccagaagcaagccgtgccaggccatctgcctgctcatggggtcctaaagcgcgggctaagcctgcaggaaagccggggcggtggggggggcttagtgccacatgcaccccactcattccaaagccaccaaactgccaggggctgccgtccacccgtggggcccaggggctggggccacagccttgccattttcgttgccataccctcttgccttactcgcggtggaggccggatttgcacgggcagacgtgcacctgggcccgtggggagcttgttctgaccagacgtacagattttcattctcagaaagccttacttttcaaccaaatttttgtagccagttttgtgaatttgtacactgaaagaaaatttaaataaaggggaagtccacattaaaaagaaaacaaaacaaaccctaactaacttccaaatgggtctcctggtgcgggggcgtgagtggccgtgccctgggtgtgctgcctgtctgagcaagcttccctagctgtggaaccccgggccccctgctgcgggctctgccttggtgtcatgcctgctgcacccccgtttccactgacgtgccgtctgtggctatgggggtggtcactggaatgacggtcactccagacgtcagccggcagggatgcagcaggctggccgcgcaccggggctcgggcaccctctggccccacactggcaatgatgccacaccttgccatgtccacgctgttggtcaaacccctctgtcatgcctctttaaagagaaaagaagagaaagattttttttttttttaatggcagaccgaagtggagatcttgtagcctagataggatagtctgaccttctagcatagtctttttggcaaatgatttgtgttttcagtgtgtggggaagctgtcctgggggctggggcgacagatagcacataggctgtttctggggctgcaggggcttccctgagctggatgttgtgggtgttgccgtgcttcaggaagtgtggcgaccagaaagcgtagacccggggcccagggtctgcccgcccctgcagcctggcctccccgcacaggctgtggcttgcactccagccgctctagtctctcaggaatttgcttgttacttgtactgtgtaaataaagcttcctggttcaataccca

SEQ ID NO: 383015 - DNA, 5174 bp, Homo sapiens
ctgccagtggcatcattcacatacgggagaactgaggtctagtgaggtggccctctgcaaggtccctcagtaagcggagttggactcagaaaatgacagatggcgagacctggacaggaaatgccctcttcagattgaccaaccgagcaccagcatctgggaatgcctgcctgaaaaggacagctcactatggcaccgggaggcagtgaccgcctgcgctgtgaccagtctgatcaaagacctcagcatcagcgaccacaacgggaacccctcagcaccccctagcaagcgccagtgccgctcactgtccttctccgatgagatgtccagttgccggacatcatggaggcccttgggctccaaagtctggactcccgtggaaaagagacgctgctacagcgggggcagcgtccagcgctattccaacggcttcagcaccatgcagaggagttccagcttcagcctcccttcccgggccaacgtgctctcctcaccctgcgaccaggcaggactccaccaccgatttggagggcagccctgccaaggggtgccaggctcagccccgtgtggacaggcaggtgacacctggagccctgacctgcaccccgtgggaggaggccggctggacctgcagcggtccctctcttgctcacatgagcagttttcctttgtggaatactgtcctccctcagccaacagcacacctgcctcaacaccagagctggcgagacgctccagcggcctttcccgcagccgctcccagccgtgtgtccttaacgacaagaaggtcggtgttaaaaggcggcgccctgaagaagtgcaagagcagaggccttctctagaccttgccaagatggcacagaactgtcagaccttcagcagcctcagctgcctgagcgcagggacagaggactgcggtccccagagccccttcgcccgccacgtcagcaacaccagggcctggaccgccctgctctcagcctccggcccagggggcaggacccccgctgggaccccggtccctgagcctcttcccccttccttcgacgaccacctcgcctgccaggaggacctgtcctgtgaggagtcagacagctgcgccctggacgaggattgtggcaggagagcggagccggctgcagcctggcgggaccgcggggcccctgggaacagcctctgctccctggacggcgagttggacattgagcagatagagaagaactgagggggtgtgggcccaggcagggctggggtgtgctggcatcgacagcccccactctgggcactaggtgggcccttgaaggggagcccaactcgtgggcctgatgaaagcttcctgagtggtgtcgggtcccagagagggagcccacctgctgcctgggggagagcctggcctggccgcgtcatacagcgggtgtgtcagcctctcaccggctccccgagcgtggcagccaccaggtccacagaactactgcagcccagaggacagctttgaagtttgcgtcttttctgcctctttccctgtgggatgttgggcagtctctgttgtccccggcagagctgggcaccgctctgtatccccctggtggtgggggctgtcagggagggcctggggtgggggccaggggccatctgctatgtcagggcccttcttggcctcactcaggttcacttctggggagtcggccccgcagcttctttcactcagttttactccgtgccttctctcccaggtctccctgcttcaggcttgggaaggttcgggagatgcttccttctgtaacaccagaaccatttggccttaattccaatgtgagagacagaatccctggggtgctggactggccctccagagggtaagccatgtccggagtctcgggcccaaggaacgatttggagggtgcttgttagggcctcccgtgttgggtagaaatttggtggatctgttggctgaaaagacggacttgcttgcctctcctacagcatggagaggctgaccccatggctctgccaccgttggggcagggttagcagatggcagcccttctctgtggctgacaggtcactgagtgataagcatggttggttccggtgagtgtagggatggcacgataccagggcagcctcttgaaaacggcctcgggagacgggagctgcgagcaggtgggcagatgagggccctatgcgcactcaggggtgaagggcgtccgctggccactctgcaggggcccctgcaggattccaggcacctcccgtttgtccttgaggactgctggctgtaaccagggcacatcacccacctcaagacaagcccacgcccttgtcagcttagggggagcccagtcctgagggctgcatctctgttgtaggcccagccaccggcacaaagctggattcatgctccctgcccctaccccaccctggctcctcaccctggggcatccgaggagcctagccccctgagggtttgctctcctctcaaggtttgtagctcctctccggctgccttgcagacaccaccacatgggctctgctctatgggaatctggcttttagcgaatgtggcgtcttctgcaaacaatagcaattgggctggcttaggagcaagtggctcattttcccataaggctaaaaataactggtgcgctcccttgtgttggctgacacgcgcgttcaaagcacttttgtagtcactttgcttttgctcgtcttcatggacgagtgaacgcctcgcttctgcaggttgagtccagatgcttctcaccttctttctcctcaagaaagatgctttttgggaaacgttgtttaaatcttatttttttactacatcaaaaggatggtggttcaagttcccaatatgtgggtggcacttcttaaaaatcagctttaaggagctggcagaaagcccccagccccacagccctgagagatggtgttgctagctcaggtggctgacacatggggtatgccgggcactgggcaggtcccagagccggggaaccagctcacctctggttgctgtagctcctgccggaggcatgtctacttgtgatcccggacagccgaacccaagagctggtggctctgagcagacagagacatcttggcctgtccctgcctgggggtcatggagaccatgtcttcttagagcaaatgtggaggcggccagggcagttgttgggtgaatgtggagagcacatggccatgtcttgcccccggagtaccactgggcgtggggggtcctggcaccacatgcccggtgtggccgagggcacacagcctctatagcaggccttcctgtggaaggcagaggcagtgagggaggtggacggtgccagctgaggctgaggcatgcagcagcccccagctacctttgcttagggctggggtgggaggcacatggtgacaggtatatgtcgtgggactggggtgtgggtgacctgccctcaaaccttgcctgccacctccccattcaggcctggtggcaggaagggacaagctgtggagctggctgagtcacagccacctccccacctccccgcaagctggtcccatcgaccagcaagcccagccccagggcgcttagggagaaatgacccagcctcctcagaccccgcctgcctgtcctgtgcccaccacgcagcagtcaggggagaaaatggtggctatcccttctgcttagagaaagaaatggcctttagctggtttcatgtttgtgttttgactggagggagtagaccctatctataaggtgccaccccatcatccaagctgccacactgcccggagcagcctgttcctgcactccaccctgctggccccaggacttctgatctcagtcctctgggagggaggttcgcctaggaggtgccccccacattggtgtccccatgggcagcaggcagacagctcacccccaccagcatgatggccccagctgggggcagtggcaggagccttacttttgtcacagccttgcccacaaaccctgcctctgaggggagactgaggaagggcagagccagaagcaagccgtgccaggccatctgcctgctcatggggtcctaaagcgcgggctaagcctgcaggaaagccggggcggtggggggggcttagtgccacatgcaccccactcattccaaagccaccaaactgccaggggctgccgtccacccgtggggcccaggggctggggccacagccttgccattttcgttgccataccctcttgccttactcgcggtggaggccggatttgcacgggcagacgtgcacctgggcccgtggggagcttgttctgaccagacgtacagattttcattctcagaaagccttacttttcaaccaaatttttgtagccagttttgtgaatttgtacactgaaagaaaatttaaataaaggggaagtccacattaaaaagaaaacaaaacaaaccctaactaacttccaaatgggtctcctggtgcgggggcgtgagtggccgtgccctgggtgtgctgcctgtctgagcaagcttccctagctgtggaaccccgggccccctgctgcgggctctgccttggtgtcatgcctgctgcacccccgtttccactgacgtgccgtctgtggctatgggggtggtcactggaatgacggtcactccagacgtcagccggcagggatgcagcaggctggccgcgcaccggggctcgggcaccctctggccccacactggcaatgatgccacaccttgccatgtccacgctgttggtcaaacccctctgtcatgcctctttaaagagaaaagaagagaaagattttttttttttttaatggcagaccgaagtggagatcttgtagcctagataggatagtctgaccttctagcatagtctttttggcaaatgatttgtgttttcagtgtgtggggaagctgtcctgggggctggggcgacagatagcacataggctgtttctggggctgcaggggcttccctgagctggatgttgtgggtgttgccgtgcttcaggaagtgtggcgaccagaaagcgtagacccggggcccagggtctgcccgcccctgcagcctggcctccccgcacaggctgtggcttgcactccagccgctctagtctctcaggaatttgcttgttacttgtactgtgtaaataaagcttcctggttcaataccca

SEQ ID NO: 383016 - DNA, 6620 bp, Homo sapiens
cccgtctctatggcggccccaacggccgtccaggacgtggagcgaaatgagctcgggcgctgacggcggcggtggcgctgcggtggcggcgcggtcggacaagggcagtcccggggaggacggtttcgtcccgtcggcgctggggacccgcgagcattgggatgctgtctatgagagagaactgcaaactttccgagaatatggagatacaggtgaaatctggtttggagaagagagtatgaatcgactaataaggtggatgcagaaacacaagattccactggatgcttcagtgcttgatattggaactggaaatggtgttttcctggttgaacttgcaaaatttggtttctctaatattactggaattgattactctccttctgcaattcagctttctggaagtattatagaaaaagaaggtttatctaacattaagttaaaggtagaagactttttgaatctctccacacagctgtctggatttcatatttgtattgacaaagggacttttgatgccataagccttaatcctgacaatgcaattgagaagaggaagcaatatgtgaaatctctctccagggtgttgaaagtaaaaggcttttttctaataacgtcatgtaattggaccaaggaagagttgctaaatgaattcagtgaaggttggagtacagtggcaggattttggctcactgcagccttgacttcctgggctcaagcgatcttttccacttcagcctcccgagtaggtggaactacaggcacacatcatcatgcctggataatttttgtatttttagcagagacgaggttttgccatgttgtccaggctggtctggaactcctgggctcaagtgattctcccacctggcctcccaaagtgctgggattataccatgccaggccctcgttggcattttagatttgaacttctcgaagagctaccaacacccaagttcagctttggaggcagatctggaaacagtgtagcagcattggttttccaaaaaatgtgagactttttcttggacgaattcagggagttgaccacatttggccatttcccagaagggccccaccccaagggtgagtggccaatggggagctgtttctgctgacatcaattccccaggaggtactcaccccaagtctgcccaagtgaagatggctgatacccaccctgggatggagcccagcgcctgaggcccttatcatggtgatggtcctaagtgaaagcctcagcacccggggagctgactccattgcatgtgggaccttcagccgtgaactgcacacgccaaagaagatgagtcaaggacctacacttttctcttgtggaattatggaaaatgacagatggcgagacctggacaggaaatgccctcttcagattgaccaaccgagcaccagcatctgggaatgcctgcctgaaaaggacagctcactatggcaccgggaggcagtgaccgcctgcgctgtgaccagtctgatcaaagacctcagcatcagcgaccacaacgggaacccctcagcaccccctagcaagcgccagtgccgctcactgtccttctccgatgagatgtccagttgccggacatcatggaggcccttgggctccaaagtctggactcccgtggaaaagagacgctgctacagcgggggcagcgtccagcgctattccaacggcttcagcaccatgcagaggagttccagcttcagcctcccttcccgggccaacgtgctctcctcaccctgcgaccaggcaggactccaccaccgatttggagggcagccctgccaaggggtgccaggctcagccccgtgtggacaggcaggtgacacctggagccctgacctgcaccccgtgggaggaggccggctggacctgcagcggtccctctcttgctcacatgagcagttttcctttgtggaatactgtcctccctcagccaacagcacacctgcctcaacaccagagctggcgagacgctccagcggcctttcccgcagccgctcccagccgtgtgtccttaacgacaagaaggtcggtgttaaaaggcggcgccctgaagaagtgcaagagcagaggccttctctagaccttgccaagatggcacagaactgtcagaccttcagcagcctcagctgcctgagcgcagggacagaggactgcggtccccagagccccttcgcccgccacgtcagcaacaccagggcctggaccgccctgctctcagcctccggcccagggggcaggacccccgctgggaccccggtccctgagcctcttcccccttccttcgacgaccacctcgcctgccaggaggacctgtcctgtgaggagtcagacagctgcgccctggacgaggattgtggcaggagagcggagccggctgcagcctggcgggaccgcggggcccctgggaacagcctctgctccctggacggcgagttggacattgagcagatagagaagaactgagggggtgtgggcccaggcagggctggggtgtgctggcatcgacagcccccactctgggcactaggtgggcccttgaaggggagcccaactcgtgggcctgatgaaagcttcctgagtggtgtcgggtcccagagagggagcccacctgctgcctgggggagagcctggcctggccgcgtcatacagcgggtgtgtcagcctctcaccggctccccgagcgtggcagccaccaggtccacagaactactgcagcccagaggacagctttgaagtttgcgtcttttctgcctctttccctgtgggatgttgggcagtctctgttgtccccggcagagctgggcaccgctctgtatccccctggtggtgggggctgtcagggagggcctggggtgggggccaggggccatctgctatgtcagggcccttcttggcctcactcaggttcacttctggggagtcggccccgcagcttctttcactcagttttactccgtgccttctctcccaggtctccctgcttcaggcttgggaaggttcgggagatgcttccttctgtaacaccagaaccatttggccttaattccaatgtgagagacagaatccctggggtgctggactggccctccagagggtaagccatgtccggagtctcgggcccaaggaacgatttggagggtgcttgttagggcctcccgtgttgggtagaaatttggtggatctgttggctgaaaagacggacttgcttgcctctcctacagcatggagaggctgaccccatggctctgccaccgttggggcagggttagcagatggcagcccttctctgtggctgacaggtcactgagtgataagcatggttggttccggtgagtgtagggatggcacgataccagggcagcctcttgaaaacggcctcgggagacgggagctgcgagcaggtgggcagatgagggccctatgcgcactcaggggtgaagggcgtccgctggccactctgcaggggcccctgcaggattccaggcacctcccgtttgtccttgaggactgctggctgtaaccagggcacatcacccacctcaagacaagcccacgcccttgtcagcttagggggagcccagtcctgagggctgcatctctgttgtaggcccagccaccggcacaaagctggattcatgctccctgcccctaccccaccctggctcctcaccctggggcatccgaggagcctagccccctgagggtttgctctcctctcaaggtttgtagctcctctccggctgccttgcagacaccaccacatgggctctgctctatgggaatctggcttttagcgaatgtggcgtcttctgcaaacaatagcaattgggctggcttaggagcaagtggctcattttcccataaggctaaaaataactggtgcgctcccttgtgttggctgacacgcgcgttcaaagcacttttgtagtcactttgcttttgctcgtcttcatggacgagtgaacgcctcgcttctgcaggttgagtccagatgcttctcaccttctttctcctcaagaaagatgctttttgggaaacgttgtttaaatcttatttttttactacatcaaaaggatggtggttcaagttcccaatatgtgggtggcacttcttaaaaatcagctttaaggagctggcagaaagcccccagccccacagccctgagagatggtgttgctagctcaggtggctgacacatggggtatgccgggcactgggcaggtcccagagccggggaaccagctcacctctggttgctgtagctcctgccggaggcatgtctacttgtgatcccggacagccgaacccaagagctggtggctctgagcagacagagacatcttggcctgtccctgcctgggggtcatggagaccatgtcttcttagagcaaatgtggaggcggccagggcagttgttgggtgaatgtggagagcacatggccatgtcttgcccccggagtaccactgggcgtggggggtcctggcaccacatgcccggtgtggccgagggcacacagcctctatagcaggccttcctgtggaaggcagaggcagtgagggaggtggacggtgccagctgaggctgaggcatgcagcagcccccagctacctttgcttagggctggggtgggaggcacatggtgacaggtatatgtcgtgggactggggtgtgggtgacctgccctcaaaccttgcctgccacctccccattcaggcctggtggcaggaagggacaagctgtggagctggctgagtcacagccacctccccacctccccgcaagctggtcccatcgaccagcaagcccagccccagggcgcttagggagaaatgacccagcctcctcagaccccgcctgcctgtcctgtgcccaccacgcagcagtcaggggagaaaatggtggctatcccttctgcttagagaaagaaatggcctttagctggtttcatgtttgtgttttgactggagggagtagaccctatctataaggtgccaccccatcatccaagctgccacactgcccggagcagcctgttcctgcactccaccctgctggccccaggacttctgatctcagtcctctgggagggaggttcgcctaggaggtgccccccacattggtgtccccatgggcagcaggcagacagctcacccccaccagcatgatggccccagctgggggcagtggcaggagccttacttttgtcacagccttgcccacaaaccctgcctctgaggggagactgaggaagggcagagccagaagcaagccgtgccaggccatctgcctgctcatggggtcctaaagcgcgggctaagcctgcaggaaagccggggcggtggggggggcttagtgccacatgcaccccactcattccaaagccaccaaactgccaggggctgccgtccacccgtggggcccaggggctggggccacagccttgccattttcgttgccataccctcttgccttactcgcggtggaggccggatttgcacgggcagacgtgcacctgggcccgtggggagcttgttctgaccagacgtacagattttcattctcagaaagccttacttttcaaccaaatttttgtagccagttttgtgaatttgtacactgaaagaaaatttaaataaaggggaagtccacattaaaaagaaaacaaaacaaaccctaactaacttccaaatgggtctcctggtgcgggggcgtgagtggccgtgccctgggtgtgctgcctgtctgagcaagcttccctagctgtggaaccccgggccccctgctgcgggctctgccttggtgtcatgcctgctgcacccccgtttccactgacgtgccgtctgtggctatgggggtggtcactggaatgacggtcactccagacgtcagccggcagggatgcagcaggctggccgcgcaccggggctcgggcaccctctggccccacactggcaatgatgccacaccttgccatgtccacgctgttggtcaaacccctctgtcatgcctctttaaagagaaaagaagagaaagattttttttttttttaatggcagaccgaagtggagatcttgtagcctagataggatagtctgaccttctagcatagtctttttggcaaatgatttgtgttttcagtgtgtggggaagctgtcctgggggctggggcgacagatagcacataggctgtttctggggctgcaggggcttccctgagctggatgttgtgggtgttgccgtgcttcaggaagtgtggcgaccagaaagcgtagacccggggcccagggtctgcccgcccctgcagcctggcctccccgcacaggctgtggcttgcactccagccgctctagtctctcaggaatttgcttgttacttgtactgtgtaaataaagcttcctggttcaatacccaagtgcctggtgccagctgtgtggtttctgttgggtgtggtgaactggcaggtcccccctgctcacaggagcattagctctgggcgcagagagacctagactggacccttctgtcccctccaagcctcggggtctgaatcgataaaatggggctagcagacatcacagagctgtggagacgccgggggac

SEQ ID NO: 383017 - DNA, 6277 bp, Homo sapiens
cccgtctctatggcggccccaacggccgtccaggacgtggagcgaaatgagctcgggcgctgacggcggcggtggcgctgcggtggcggcgcggtcggacaagggcagtcccggggaggacggtttcgtcccgtcggcgctggggacccgcgagcattgggatgctgtctatgagagagaactgcaaactttccgagaatatggagatacaggtgaaatctggtttggagaagagagtatgaatcgactaataaggtggatgcagaaacacaagattccactggatgcttcagtgcttgatattggaactggaaatggtgttttcctggttgaacttgcaaaatttggtttctctaatattactggaattgattactctccttctgcaattcagctttctggaagtattatagaaaaagaaggtttatctaacattaagttaaaggtagaagactttttgaatctctccacacagctgtctggatttcatatttgtattgacaaagggacttttgatgccataagccttaatcctgacaatgcaattgagaagaggaagcaatatgtgaaatctctctccagggtgttgaaagtaaaaggcttttttctaataacgtcatgtaattggaccaaggaagagttgctaaatgaattcagtgaaggttggagtacagtggcaggattttggctcactgcagccttgacttcctgggctcaagcgatcttttccacttcagcctcccgagtaggtggaactacaggcacacatcatcatgcctggataatttttgtatttttagcagagacgaggttttgccatgttgtccaggctggtctggaactcctgggctcaagtgattctcccacctggcctcccaaagtgctgggattataccatgccaggccctcgttggcattttagatttgaacttctcgaagagctaccaacacccaagttcagctttggaggcagatctggaaacagtgtagcagcattggttttccaaaaaatgtgagactttttcttggacgaattcagggagttgaccacatttggccatttcccagaagggccccaccccaagggtgagtggccaatggggagctgtttctgctgacatcaattccccaggaggtactcaccccaagtctgcccaagtgaagatggctgatacccaccctgggatggagcccagcgcctgaggcccttatcatggtgatggtcctaagtgaaagcctcagcacccggggagctgactccattgcatgtgggaccttcagccgtgaactgcacacgccaaagaagatgagtcaaggacctacacttttctcttgtggaattatggaaaatgacagatggcgagacctggacaggaaatgccctcttcagattgaccaaccgagcaccagcatctgggaatgcctgcctgaaaaggacagctcactatggcaccgggaggcagtgaccgcctgcgctgtgaccagtctgatcaaagacctcagcatcagcgaccacaacgggaacccctcagcaccccctagcaagcgccagtgccgctcactgtccttctccgatgagatgtccagttgccggacatcatggaggcccttgggctccaaagtctggactcccgtggaaaagagacgctgctacagcgggggcagcgtccagcgctattccaacggcttcagcaccatgcagaggagttccagcttcagcctcccttcccgggccaacgtgctctcctcaccctgcgaccaggcaggactccaccaccgatttggagggcagccctgccaaggggtgccaggctcagccccgtgtggacaggcaggtgacacctggagccctgacctgcaccccgtgggaggaggccggctggacctgcagcggtccctctcttgctcacatgagcagttttcctttgtggaatactgtcctccctcagccaacagcacacctgcctcaacaccagagctggcgagacgctccagcggcctttcccgcagccgctcccagccgtgtgtccttaacgacaagaaggtcggtgttaaaaggcggcgccctgaagaagtgcaagagcagaggccttctctagaccttgccaagatggcacagaactgtcagaccttcagcagcctcagctgcctgagcgcagggacagaggactgcggtccccagagccccttcgcccgccacgtcagcaacaccagggcctggaccgccctgctctcagcctccggcccagggggcaggacccccgctgggaccccggtccctgagcctcttcccccttccttcgacgaccacctcgcctgccaggaggacctgtcctgtgaggagtcagacagctgcgccctggacgaggattgtggcaggagagcggagccggctgcagcctggcgggaccgcggggcccctgggaacagcctctgctccctggacggcgagttggacattgagcagatagagaagaactgagggggtgtgggcccaggcagggctggggtgtgctggcatcgacagcccccactctgggcactaggtgggcccttgaaggggagcccaactcgtgggcctgatgaaagcttcctgagtggtgtcgggtcccagagagggagcccacctgctgcctgggggagagcctggcctggccgcgtcatacagcgggtgtgtcagcctctcaccggctccccgagcgtggcagccaccaggtccacagaactactgcagcccagaggacagctttgaagtttgcgtcttttctgcctctttccctgtgggatgttgggcagtctctgttgtccccggcagagctgggcaccgctctgtatccccctggtggtgggggctgtcagggagggcctggggtgggggccaggggccatctgctatgtcagggcccttcttggcctcactcaggttcacttctggggagtcggccccgcagcttctttcactcagttttactccgtgccttctctcccaggtctccctgcttcaggcttgggaaggttcgggagatgcttccttctgtaacaccagaaccatttggccttaattccaatgtgagagacagaatccctggggtgctggactggccctccagagggtaagccatgtccggagtctcgggcccaaggaacgatttggagggtgcttgttagggcctcccgtgttgggtagaaatttggtggatctgttggctgaaaagacggacttgcttgcctctcctacagcatggagaggctgaccccatggctctgccaccgttggggcagggttagcagatggcagcccttctctgtggctgacaggtcactgagtgataagcatggttggttccggtgagtgtagggatggcacgataccagggcagcctcttgaaaacggcctcgggagacgggagctgcgagcaggtgggcagatgagggccctatgcgcactcaggggtgaagggcgtccgctggccactctgcaggggcccctgcaggattccaggcacctcccgtttgtccttgaggactgctggctgtaaccagggcacatcacccacctcaagacaagcccacgcccttgtcagcttagggggagcccagtcctgagggctgcatctctgttgtaggcccagccaccggcacaaagctggattcatgctccctgcccctaccccaccctggctcctcaccctggggcatccgaggagcctagccccctgagggtttgctctcctctcaaggtttgtagctcctctccggctgccttgcagacaccaccacatgggctctgctctatgggaatctggcttttagcgaatgtggcgtcttctgcaaacaatagcaattgggctggcttaggagcaagtggctcattttcccataaggctaaaaataactggtgcgctcccttgtgttggctgacacgcgcgttcaaagcacttttgtagtcactttgcttttgctcgtcttcatggacgagtgaacgcctcgcttctgcaggttgagtccagatgcttctcaccttctttctcctcaagaaagatgctttttgggaaacgttgtttaaatcttatttttttactacatcaaaaggatggtggttcaagttcccaatatgtgggtggcacttcttaaaaatcagctttaaggagctggcagaaagcccccagccccacagccctgagagatggtgttgctagctcaggtggctgacacatggggtatgccgggcactgggcaggtcccagagccggggaaccagctcacctctggttgctgtagctcctgccggaggcatgtctacttgtgatcccggacagccgaacccaagagctggtggctctgagcagacagagacatcttggcctgtccctgcctgggggtcatggagaccatgtcttcttagagcaaatgtggaggcggccagggcagttgttgggtgaatgtggagagcacatggccatgtcttgcccccggagtaccactgggcgtggggggtcctggcaccacatgcccggtgtggccgagggcacacagcctctatagcaggccttcctgtggaaggcagaggcagtgagggaggtggacggtgccagctgaggctgaggcatgcagcagcccccagctacctttgcttagggctggggtgggaggcacatggtgacaggtatatgtcgtgggactggggtgtgggtgacctgccctcaaaccttgcctgccacctccccattcaggcctggtggcaggaagggacaagctgtggagctggctgagtcacagccacctccccacctccccgcaagctggtcccatcgaccagcaagcccagccccagggcgcttagggagaaatgacccagcctcctcagaccccgcctgcctgtcctgtgcccaccacgcagcagtcaggggagaaaatggtggctatcccttctgcttagagaaagaaatggcctttagctggtttcatgtttgtgttttgactggagggagtagaccctatctataaggtgccaccccatcatccaagctgccacactgcccggagcagcctgttcctgcactccaccctgctggccccaggacttctgatctcagtcctctgggagggaggttcgcctaggaggtgccccccacattggtgtccccatgggcagcaggcagacagctcacccccaccagcatgatggccccagctgggggcagtggcaggagccttacttttgtcacagccttgcccacaaaccctgcctctgaggggagactgaggaagggcagagccagaagcaagccgtgccaggccatctgcctgctcatggggtcctaaagcgcgggctaagcctgcaggaaagccggggcggtggggggggcttagtgccacatgcaccccactcattccaaagccaccaaactgccaggggctgccgtccacccgtggggcccaggggctggggccacagccttgccattttcgttgccataccctcttgccttactcgcggtggaggccggatttgcacgggcagacgtgcacctgggcccgtggggagcttgttctgaccagacgtacagattttcattctcagaaagccttacttttcaaccaaatttttgtagccagttttgtgaatttgtacactgaaagaaaatttaaataaaggggaagtccacattaaaaagaaaacaaaacaaaccctaactaacttccaaatgggtctcctggtgcgggggcgtgagtggccgtgccctgggtgtgctgcctgtctgagcaagcttccctagctgtggaaccccgggccccctgctgcgggctctgccttggtgtcatgcctgctgcacccccgtttccactgacgtgccgtctgtggctatgggggtggtcactggaatgacggtcactccagacgtcagccggcagggatgcagcaggctggccgcgcaccggggctcgggcaccctctggccccacactggcaatgatgccacaccttgccatgtccacgctgttggtcaaacccctctgtcatgcctctttaaagagaaaagaagagaaagattttttttttttttaatggcagaccgaagtggagatcttgtagcctagataggatagtctgaccttctagcatagtctttttggcaaatgatttgtgttttcagtgtgtggggaagctgtcctggggcgcacaggctgtggcttgcactccagccgctctagtctctcaggaatttgcttgttacttgtactgtgtaaataaagcttcctggttcaataccca

SEQ ID NO: 383018 - DNA, 3594 bp, Homo sapiens
cccgtctctatggcggccccaacggccgtccaggacgtggagcgaaatgagctcgggcgctgacggcggcggtggcgctgcggtggcggcgcggtcggacaagggcagtcccggggaggacggtttcgtcccgtcggcgctggggacccgcgagcattgggatgctgtctatgagagagaactgcaaactttccgagaatatggagatacaggtgaaatctggtttggagaagagagtatgaatcgactaataaggtggatgcagaaacacaagattccactggatgcttcagtgcttgatattggaactggaaatggtgttttcctggttgaacttgcaaaatttggtttctctaatattactggaattgattactctccttctgcaattcagctttctggaagtattatagaaaaagaaggtttatctaacattaagttaaaggtagaagactttttgaatctctccacacagctgtctggatttcatatttgtattgacaaagggacttttgatgccataagccttaatcctgacaatgcaattgagaagaggaagcaatatgtgaaatctctctccagggtgttgaaagtaaaaggcttttttctaataacgtcatgtaattggaccaaggaagagttgctaaatgaattcagtgaaggttggagtacagtggcaggattttggctcactgcagccttgacttcctgggctcaagcgatcttttccacttcagcctcccgagtaggtggaactacaggcacacatcatcatgcctggataatttttgtatttttagcagagacgaggttttgccatgttgtccaggctggtctggaactcctgggctcaagtgattctcccacctggcctcccaaagtgctgggattataccatgccaggccctcgttggcattttagatttgaacttctcgaagagctaccaacacccaagttcagctttggaggcagatctggaaacagtgtagcagcattggttttccaaaaaatgtgagactttttcttggacgaattcaggtagctacacagaatctacacagcaaagttaacctgacacagaaaatccttgtgcaaataaatgcttagtaagtacacaggatgcacatgttgaatagagtatactggattggtgaaagaaaataataataatgagcatctaagtggttgggttttagagatcaatcaagaataattttaattttcttttgtatttgaaatgtaaatagttttcttttcgattaaaaaaatttcctataactgctaaacagttaaaaactttaaagtagtaaatgagtttatagaaagcatgtattcttgatttttgtgccttggtaaagttgataactatttatgaatatttgaccaaattattccagcatcagaataataagcaaaataactttgttagtgttttgttagactgtttatgaaatataacaagaaatactattttgtgttggatggcggttatttttaaacttaattaatacctgtgaaaaggcctcttacctttatgtatataattaaacaaaatcagagaaatgtatcagttgctcaagttatcaagcctgcattttgcagctatggtcttctacacactgtaagggtagtagaaggaaagagaactaaggaatgttattatttgctagcgctatgttaagttgtcttattaagtaattgagtcctttcaatgtcttcttgaggtatgtattgcttgttcttgtttctacgtataaggaaaatgaagctgagagaagtgaagtcacttttatgaggttcaacagtacaggatggagccaggatttttatctgggtctgtctgactttaaaacacatactcttctcctagcatattctgcctcacaggtgcttagtctttgcctttgtagcatttacagtacagctggagacccatgatgattacatataaagttcagttagaaaagatgggtagttactttattagtgttcatctgtggagtatcagaatagcagtcagccaactctgtctcatatcatccttcattacttttccccatctccctactcaaagacttgcctctattaagaattttgtcattcttctgtgaaagggtagtgtaagttatataagccctcagcgatacatgcacaaagatgttctagttaggggctaatttggcaagagaaacagtttattaatgtttttgaaaagataagtcatattcatacttaataccattttgtatttgtggtaatattttaatattggagctaaatacaaatttttgcataattttttgatgattttcagctttgtgggcctattgggttacataagtgactttttgtttggcaaatgttactcctgtattgagtaagtctaacattacgtcccttttctttttggggaggggtagccagaggagtgagtttttcatttagatcaacattgatcaaccattaagacaagatagttgaagacatgtatgtggactgtcaacaaaaataacattttttgaaaagcttttattttcaacatgtaaaaagtgagaaattacttcaaaatatatgcaatttaaattttttagaagattgtgttgattttaccaagacaggagatcttaaactgtagaaacttttatagtttttgagatcgggtctttgttttttttcacattaatattctttgatttcaaatataacatagataagtactcttagaattttgagttaagtatatgctattttaatgtgctaatcctacaaactaggctttctgtgtgactagactgagatgttgagtttgattcacaaaaagcttagaatggttctttgttgaaaagcttttcgagtcactatttggggcatgttagtgccatttgcaaaggtgaaggttttctttttttttttttttttaaccatagagcttttgataaggttaggaaaaggaagttgtcatctcttcttattactctaatcctgctggaagctagcttcttagggactaaaaccagaacaaatggaaggtccaaaaatgctaataagaaattagtattttcacataataccaaactgtaaaaaccaggccagcaagtgtcaccaggttcctgaaacaaaccataaatacattatttaacttagtattgttaaattgtataaatatgtgggtaactgtgacagaaattatgcacttataaaaagcagtaagttacatagtgaatgctgttttctgtggataagaagctggaattgtgatttcatttaatcgaaagacgcttactttgaggaaacttgtttgaaatgcaaacgcgatttctctgtggagccttcacggaattgctgcttttcactatgattattgctgcataacaggccacttctgtgtgtaggaagtgcgtgtgcaagtccaaagggaattgaggcctgaatgggtgggttatcccaattaacaaatacaaagttttcagtacattttgttttaagccaggtgcacaagttagagttgctttttgggactggcatttatgtatgtgagaatcaaacctgatatcactcttggcagcctgactaaagccatttaaaaataaaaa

SEQ ID NO: 383019 - DNA, 1117 bp, Homo sapiens
gacatctgttgagacctgacccctagtcattggttaccagtgtgtcaggcaatctggactttccagtgatgccactgagatggcacctgtcaaaagagcagtggttccatttctagattgtggatcttcagataaattctgccattttcattttcacttcctgaaagtcagggtcggcttgtgaaaagttgttaaacaacatgctaaatgtgaaatgtcaaccctcactctaaactttccctgttcagagcatcagatgaagacttcattgggttttatagtggctttcaaatttttgtagccagttttgtgaatttgtacactgaaagaaaatttaaataaaggggaagtccacattaaaaagaaaacaaaacaaaccctaactaacttccaaatgggtctcctggtgcgggggcgtgagtggccgtgccctgggtgtgctgcctgtctgagcaagcttccctagctgtggaaccccgggccccctgctgcgggctctgccttggtgtcatgcctgctgcacccccgtttccactgacgtgccgtctgtggctatgggggtggtcactggaatgacggtcactccagacgtcagccggcagggatgcagcaggctggccgcgcaccggggctcgggcaccctctggccccacactggcaatgatgccacaccttgccatgtccacgctgttggtcaaacccctctgtcatgcctctttaaagagaaaagaagagaaagattttttttttttttaatggcagaccgaagtggagatcttgtagcctagataggatagtctgaccttctagcatagtctttttggcaaatgatttgtgttttcagtgtgtggggaagctgtcctgggggctggggcgacagatagcacataggctgtttctggggctgcaggggcttccctgagctggatgttgtgggtgttgccgtgcttcaggaagtgtggcgaccagaaagcgtagacccggggcccagggtctgcccgcccctgcagcctggcctccccgcacaggctgtggcttgcactccagccgctctagtctctcaggaatttgcttgttacttgtactgtgtaaataaagcttcctggttcaataccca

SEQ ID NO: 383020 - DNA, 3372 bp, Homo sapiens
gtcattttctctacatcaaaaataagacatcaccagtcctaaaggaatattataattcataaacaaaacattatattaaaattttatactaaagtataaaattatttctctctaggcaaaatttggtttctctaatattactggaattgattactctccttctgcaattcagctttctggaagtattatagaaaaagaaggtttatctaacattaagttaaaggtagaagactttttgaatctctccacacagctgtctggatttcatatttgtattgacaaagggacttttgatgccataagccttaatcctgacaatgcaattgagaagaggaagcaatatgtgaaatctctctccagggtgttgaaagtaaaaggcttttttctaataacgtcatgtaattggaccaaggaagagttgctaaatgaattcagtgaaggttggagtacagtggcaggattttggctcactgcagccttgacttcctgggctcaagcgatcttttccacttcagcctcccgagtaggtggaactacaggcacacatcatcatgcctggataatttttgtatttttagcagagacgaggttttgccatgttgtccaggctggtctggaactcctgggctcaagtgattctcccacctggcctcccaaagtgctgggattataccatgccaggccctcgttggcattttagatttgaacttctcgaagagctaccaacacccaagttcagctttggaggcagatctggaaacagtgtagcagcattggttttccaaaaaatgtgagactttttcttggacgaattcaggtagctacacagaatctacacagcaaagttaacctgacacagaaaatccttgtgcaaataaatgcttagtaagtacacaggatgcacatgttgaatagagtatactggattggtgaaagaaaataataataatgagcatctaagtggttgggttttagagatcaatcaagaataattttaattttcttttgtatttgaaatgtaaatagttttcttttcgattaaaaaaatttcctataactgctaaacagttaaaaactttaaagtagtaaatgagtttatagaaagcatgtattcttgatttttgtgccttggtaaagttgataactatttatgaatatttgaccaaattattccagcatcagaataataagcaaaataactttgttagtgttttgttagactgtttatgaaatataacaagaaatactattttgtgttggatggcggttatttttaaacttaattaatacctgtgaaaaggcctcttacctttatgtatataattaaacaaaatcagagaaatgtatcagttgctcaagttatcaagcctgcattttgcagctatggtcttctacacactgtaagggtagtagaaggaaagagaactaaggaatgttattatttgctagcgctatgttaagttgtcttattaagtaattgagtcctttcaatgtcttcttgaggtatgtattgcttgttcttgtttctacgtataaggaaaatgaagctgagagaagtgaagtcacttttatgaggttcaacagtacaggatggagccaggatttttatctgggtctgtctgactttaaaacacatactcttctcctagcatattctgcctcacaggtgcttagtctttgcctttgtagcatttacagtacagctggagacccatgatgattacatataaagttcagttagaaaagatgggtagttactttattagtgttcatctgtggagtatcagaatagcagtcagccaactctgtctcatatcatccttcattacttttccccatctccctactcaaagacttgcctctattaagaattttgtcattcttctgtgaaagggtagtgtaagttatataagccctcagcgatacatgcacaaagatgttctagttaggggctaatttggcaagagaaacagtttattaatgtttttgaaaagataagtcatattcatacttaataccattttgtatttgtggtaatattttaatattggagctaaatacaaatttttgcataattttttgatgattttcagctttgtgggcctattgggttacataagtgactttttgtttggcaaatgttactcctgtattgagtaagtctaacattacgtcccttttctttttggggaggggtagccagaggagtgagtttttcatttagatcaacattgatcaaccattaagacaagatagttgaagacatgtatgtggactgtcaacaaaaataacattttttgaaaagcttttattttcaacatgtaaaaagtgagaaattacttcaaaatatatgcaatttaaattttttagaagattgtgttgattttaccaagacaggagatcttaaactgtagaaacttttatagtttttgagatcgggtctttgttttttttcacattaatattctttgatttcaaatataacatagataagtactcttagaattttgagttaagtatatgctattttaatgtgctaatcctacaaactaggctttctgtgtgactagactgagatgttgagtttgattcacaaaaagcttagaatggttctttgttgaaaagcttttcgagtcactatttggggcatgttagtgccatttgcaaaggtgaaggttttctttttttttttttttttaaccatagagcttttgataaggttaggaaaaggaagttgtcatctcttcttattactctaatcctgctggaagctagcttcttagggactaaaaccagaacaaatggaaggtccaaaaatgctaataagaaattagtattttcacataataccaaactgtaaaaaccaggccagcaagtgtcaccaggttcctgaaacaaaccataaatacattatttaacttagtattgttaaattgtataaatatgtgggtaactgtgacagaaattatgcacttataaaaagcagtaagttacatagtgaatgctgttttctgtggataagaagctggaattgtgatttcatttaatcgaaagacgcttactttgaggaaacttgtttgaaatgcaaacgcgatttctctgtggagccttcacggaattgctgcttttcactatgattattgctgcataacaggccacttctgtgtgtaggaagtgcgtgtgcaagtccaaagggaattgaggcctgaatgggtgggttatcccaattaacaaatacaaagttttcagtacattttgttttaagccaggtgcacaagttagagttgctttttgggactggcatttatgtatgtgagaatcaaacctgatatcactcttggcagcctgactaaagccatttaaaaataaaaa

SEQ ID NO: 383021 - DNA, 5570 bp, Homo sapiens
cccgtctctatggcggccccaacggccgtccaggacgtggagcgaaatgagctcgggcgctgacggcggcggtggcgctgcggtggcggcgcggtcggacaagggcagtcccggggaggacggtttcgtcccgtcggcgctggggacccgcgagcattgggatgctgtctatgagagagaactgcaaactttccgagaatatggagatacaggtgaaatctggtttggagaagagagtatgaatcgactaataaggtggatgcagaaacacaagattccactggatgcttcagtgcttgatattggaactggaaatggtgttttcctggttgaacttgcaaaatttggtttctctaatattactggaattgattactctccttctgcaattcagctttctggaagtattatagaaaaagaaggtttatctaacattaagttaaaggtagaagactttttgaatctctccacacagctgtctggatttcatatttgtattgacaaagggacttttgatgccataagccttaatcctgacaatgcaattgagaagaggaagcaatatgtgaaatctctctccagggtgttgaaagtaaaaggcttttttctaataacgtcatgtaattggaccaaggaagagttgctaaatgaattcagtgaaggttggagtacagtggcaggattttggctcactgcagccttgacttcctgggctcaagcgatcttttccacttcagcctcccgagtaggtggaactacaggcacacatcatcatgcctggataatttttgtatttttagcagagacgaggttttgccatgttgtccaggctggtctggaactcctgggctcaagtgattctcccacctggcctcccaaagtgctgggattataccatgccaggccctcgttggcattttagatttgaacttctcgaagagctaccaacacccaagttcagctttggaggcagatctggaaacagtgtagcagcattggttttccaaaaaatgtgagactttttcttggacgaattcagggagttgaccacatttggccatttcccagaagggccccaccccaagggtgagtggccaatggggagctgtttctgctgacatcaattccccaggaggtactcaccccaagtctgcccaagtgaagatggctgatacccaccctgggatggagcccagcgcctgaggcccttatcatggtgatggtcctaagtgaaagcctcagcacccggggagctgactccattgcatgtgggaccttcagccgtgaactgcacacgccaaagaagatgagtcaaggacctacacttttctcttgtggaattatggaaaatgacagatggcgagacctggacaggaaatgccctcttcagattgaccaaccgagcaccagcatctgggaatgcctgcctgaaaaggacagctcactatggcaccgggaggcagtgaccgcctgcgctgtgaccagtctgatcaaagacctcagcatcagcgaccacaacgggaacccctcagcaccccctagcaagcgccagtgccgctcactgtccttctccgatgagatgtccagttgccggacatcatggaggcccttgggctccaaagtctggactcccgtggaaaagagacgctgctacagcgggggcagcgtccagcgctattccaacggcttcagcaccatgcagaggagttccagcttcagcctcccttcccgggccaacgtgctctcctcaccctgcgaccaggcaggactccaccaccgatttggagggcagccctgccaaggggtgccaggctcagccccgtgtggacaggcaggtgacacctggagccctgacctgcaccccgtgggaggaggccggctggacctgcagcggtccctctcttgctcacatgagcagttttcctttgtggaatactgtcctccctcagccaacagcacacctgcctcaacaccagagctggcgagacgctccagcggcctttcccgcagccgctcccagccgtgtgtccttaacgacaagaaggtcggtgttaaaaggcggcgccctgaagaagtgcaagagcagaggccttctctagaccttgccaagatggcacagaactgtcagaccttcagcagcctcagctgcctgagcgcagggacagaggactgcggtccccagagccccttcgcccgccacgtcagcaacaccagggcctggaccgccctgctctcagcctccggcccagggggcaggacccccgctgggaccccggtccctgagcctcttcccccttccttcgacgaccacctcgcctgccaggaggacctgtcctgtgaggagtcagacagctgcgccctggacgaggattgtggcaggagagcggagccggctgcagcctggcgggaccgcggggcccctgggaacagcctctgctccctggacggcgagttggacattgagcagatagagaagaactgagggggtgtgggcccaggcagggctggggtgtgctggcatcgacagcccccactctgggcactaggtgggcccttgaaggggagcccaactcgtgggcctgatgaaagcttcctgagtggtgtcgggtcccagagagggagcccacctgctgcctgggggagagcctggcctggccgcgtcatacagcgggtgtgtcagcctctcaccggctccccgagcgtggcagccaccaggtccacagaactactgcagcccagaggacagctttgaagtttgcgtcttttctgcctctttccctgtgggatgttgggcagtctctgttgtccccggcagagctgggcaccgctctgtatccccctggtggtgggggctgtcagggagggcctggggtgggggccaggggccatctgctatgtcagggcccttcttggcctcactcaggttcacttctggggagtcggccccgcagcttctttcactcagttttactccgtgccttctctcccaggtctccctgcttcaggcttgggaaggttcgggagatgcttccttctgtaacaccagaaccatttggccttaattccaatgtgagagacagaatccctggggtgctggactggccctccagagggtaagccatgtccggagtctcgggcccaaggaacgatttggagggtgcttgttagggcctcccgtgttgggtagaaatttggtggatctgttggctgaaaagacggacttgcttgcctctcctacagcatggagaggctgaccccatggctctgccaccgttggggcagggttagcagatggcagcccttctctgtggctgacaggtcactgagtgataagcatggttggttccggtgagtgtagggatggcacgataccagggcagcctcttgaaaacggcctcgggagacgggagctgcgagcaggtgggcagatgagggccctatgcgcactcaggggtgaagggcgtccgctggccactctgcaggggcccctgcaggattccaggcacctcccgtttgtccttgaggactgctggctgtaaccagggcacatcacccacctcaagacaagcccacgcccttgtcagcttagggggagcccagtcctgagggctgcatctctgttgtaggcccagccaccggcacaaagctggattcatgctccctgcccctaccccaccctggctcctcaccctggggcatccgaggagcctagccccctgagggtttgctctcctctcaaggtttgtagctcctctccggctgccttgcagacaccaccacatgggctctgctctatgggaatctggcttttagcgaatgtggcgtcttctgcaaacaatagcaattgggctggcttaggagcaagtggctcattttcccataaggctaaaaataactggtgcgctcccttgtgttggctgacacgcgcgttcaaagcacttttgtagtcactttgcttttgctcgtcttcatggacgagtgaacgcctcgcttctgcaggttgagtccagatgcttctcaccttctttctcctcaagaaagatgctttttgggaaacgttgtttaaatcttatttttttactacatcaaaaggatggtggttcaagttcccaatatgtgggtggcacttcttaaaaatcagctttaaggagctggcagaaagcccccagccccacagccctgagagatggtgttgctagctcaggtggctgacacatggggtatgccgggcactgggcaggtcccagagccggggaaccagctcacctctggttgctgtagctcctgccggaggcatgtctacttgtgatcccggacagccgaacccaagagctggtggctctgagcagacagagacatcttggcctgtccctgcctgggggtcatggagaccatgtcttcttagagcaaatgtggaggcggccagggcagttgttgggtgaatgtggagagcacatggccatgtcttgcccccggagtaccactgggcgtggggggtcctggcaccacatgcccggtgtggccgagggcacacagcctctatagcaggccttcctgtggaaggcagaggcagtgagggaggtggacggtgccagctgaggctgaggcatgcagcagcccccagctacctttgcttagggctggggtgggaggcacatggtgacaggtatatgtcgtgggactggggtgtgggtgacctgccctcaaaccttgcctgccacctccccattcaggcctggtggcaggaagggacaagctgtggagctggctgagtcacagccacctccccacctccccgcaagctggtcccatcgaccagcaagcccagccccagggcgcttagggagaaatgacccagcctcctcagaccccgcctgcctgtcctgtgcccaccacgcagcagtcaggggagaaaatggtggctatcccttctgcttagagaaagaaatggcctttagctggtttcatgtttgtgttttgactggagggagtagaccctatctataaggtgccaccccatcatccaagctgccacactgcccggagcagcctgttcctgcactccaccctgctggccccaggacttctgatctcagtcctctgggagggaggttcgcctaggaggtgccccccacattggtgtccccatgggcagcaggcagacagctcacccccaccagcatgatggccccagctgggggcagtggcaggagccttacttttgtcacagccttgcccacaaaccctgcctctgaggggagactgaggaagggcagagccagaagcaagccgtgccaggccatctgcctgctcatggggtcctaaagcgcgggctaagcctgcaggaaagccggggcggtggggggggcttagtgccacatgcaccccactcattccaaagccaccaaactgccaggggctgccgtccacccgtggggcccaggggctggggccacagccttgccattttcgttcgcacaggctgtggcttgcactccagccgctctagtctctcaggaatttgcttgttacttgtactgtgtaaataaagcttcctggttcaataccca

SEQ ID NO: 383022 - DNA, 561 bp, Homo sapiens
tttttgggtattgaaccaggaagctttatttacacagtacaagtaacaagcaaattcctgagagactagagcgtgctggagtgcaagccacagcctccaggacagcttccccacaccttgccatgtccacgctgttggtcaaacccctctgtcatgcctctttaaagagaaaagaagagaaagattttttttttttttaatggcagaccgaagtggagatcttgtagcctagataggatagtctgaccttctagcatagtctttttggcaaatgatttgtgttttcagtgtgtggggaagctgtcctgggggctggggcgacagatagcacataggctgtttctggggctgcaggggcttccctgagctggatgttgtgggtgttgccgtgcttcaggaagtgtggcgaccagaaagcgtagacccggggcccagggtctgcccgcccctgcagcctggcctccccgcacaggctgtggcttgcactccagccgctctagtctctcaggaatttgcttgttacttgtactgtgtaaataaagcttcctggttcaataccca

SEQ ID NO: 383023 - DNA, 3335 bp, Homo sapiens
cccgtctctatggcggccccaacggccgtccaggacgtggagcgaaatgagctcgggcgctgacggcggcggtggcgctgcggtggcggcgcggtcggacaagggcagtcccggggaggacggtttcgtcccgtcggcgctggggacccgcgagcattgggatgctgtctatgagagagaactgcaaactttccgagaatatggagatacaggtgaaatctggtttggagaagagagtatgaatcgactaataaggtggatgcagaaacacaagattccactggatgcttcagtgcttgatattggaactggaaatggtgttttcctggttgaacttgcaaaatttggtttctctaatattactggaattgattactctccttctgcaattcagctttctggaagtattatagaaaaagaaggtttatctaacattaagttaaaggtagaagactttttgaatctctccacacagctgtctggatttcatatttgtattgacaaagggacttttgatgccataagccttaatcctgacaatgcaattgagaagaggaagcaatatgtgaaatctctctccagggtgttgaaagtaaaaggcttttttctaataacgtcatgtaattggaccaaggaagagttgctaaatgaattcagtgaaggatttgaacttctcgaagagctaccaacacccaagttcagctttggaggcagatctggaaacagtgtagcagcattggttttccaaaaaatgtgagactttttcttggacgaattcaggtagctacacagaatctacacagcaaagttaacctgacacagaaaatccttgtgcaaataaatgcttagtaagtacacaggatgcacatgttgaatagagtatactggattggtgaaagaaaataataataatgagcatctaagtggttgggttttagagatcaatcaagaataattttaattttcttttgtatttgaaatgtaaatagttttcttttcgattaaaaaaatttcctataactgctaaacagttaaaaactttaaagtagtaaatgagtttatagaaagcatgtattcttgatttttgtgccttggtaaagttgataactatttatgaatatttgaccaaattattccagcatcagaataataagcaaaataactttgttagtgttttgttagactgtttatgaaatataacaagaaatactattttgtgttggatggcggttatttttaaacttaattaatacctgtgaaaaggcctcttacctttatgtatataattaaacaaaatcagagaaatgtatcagttgctcaagttatcaagcctgcattttgcagctatggtcttctacacactgtaagggtagtagaaggaaagagaactaaggaatgttattatttgctagcgctatgttaagttgtcttattaagtaattgagtcctttcaatgtcttcttgaggtatgtattgcttgttcttgtttctacgtataaggaaaatgaagctgagagaagtgaagtcacttttatgaggttcaacagtacaggatggagccaggatttttatctgggtctgtctgactttaaaacacatactcttctcctagcatattctgcctcacaggtgcttagtctttgcctttgtagcatttacagtacagctggagacccatgatgattacatataaagttcagttagaaaagatgggtagttactttattagtgttcatctgtggagtatcagaatagcagtcagccaactctgtctcatatcatccttcattacttttccccatctccctactcaaagacttgcctctattaagaattttgtcattcttctgtgaaagggtagtgtaagttatataagccctcagcgatacatgcacaaagatgttctagttaggggctaatttggcaagagaaacagtttattaatgtttttgaaaagataagtcatattcatacttaataccattttgtatttgtggtaatattttaatattggagctaaatacaaatttttgcataattttttgatgattttcagctttgtgggcctattgggttacataagtgactttttgtttggcaaatgttactcctgtattgagtaagtctaacattacgtcccttttctttttggggaggggtagccagaggagtgagtttttcatttagatcaacattgatcaaccattaagacaagatagttgaagacatgtatgtggactgtcaacaaaaataacattttttgaaaagcttttattttcaacatgtaaaaagtgagaaattacttcaaaatatatgcaatttaaattttttagaagattgtgttgattttaccaagacaggagatcttaaactgtagaaacttttatagtttttgagatcgggtctttgttttttttcacattaatattctttgatttcaaatataacatagataagtactcttagaattttgagttaagtatatgctattttaatgtgctaatcctacaaactaggctttctgtgtgactagactgagatgttgagtttgattcacaaaaagcttagaatggttctttgttgaaaagcttttcgagtcactatttggggcatgttagtgccatttgcaaaggtgaaggttttctttttttttttttttttaaccatagagcttttgataaggttaggaaaaggaagttgtcatctcttcttattactctaatcctgctggaagctagcttcttagggactaaaaccagaacaaatggaaggtccaaaaatgctaataagaaattagtattttcacataataccaaactgtaaaaaccaggccagcaagtgtcaccaggttcctgaaacaaaccataaatacattatttaacttagtattgttaaattgtataaatatgtgggtaactgtgacagaaattatgcacttataaaaagcagtaagttacatagtgaatgctgttttctgtggataagaagctggaattgtgatttcatttaatcgaaagacgcttactttgaggaaacttgtttgaaatgcaaacgcgatttctctgtggagccttcacggaattgctgcttttcactatgattattgctgcataacaggccacttctgtgtgtaggaagtgcgtgtgcaagtccaaagggaattgaggcctgaatgggtgggttatcccaattaacaaatacaaagttttcagtacattttgttttaagccaggtgcacaagttagagttgctttttgggactggcatttatgtatgtgagaatcaaacctgatatcactcttggcagcctgactaaagccatttaaaaataaaaa

SEQ ID NO: 383024 - DNA, 1451 bp, Homo sapiens
cccgtctctatggcggccccaacggccgtccaggacgtggagcgaaatgagctcgggcgctgacggcggcggtggcgctgcggtggcggcgcggtcggacaagggcagtcccggggaggacggtttcgtcccgtcggcgctggggacccgcgagcattgggatgctgtctatgagagagaactgcaaactttccgagaatatggagatacaggtgaaatctggtttggagaagagagtatgaatcgactaataaggtggatgcagaaacacaagattccactggatgcttcagtgcttgatattggaactggaaatggtgttttcctggttgaacttgcaaaatttggtttctctaatattactggaattgattactctccttctgcaattcagctttctggaagtattatagaaaaagaaggtttatctaacattaagttaaaggtagaagactttttgaatctctccacacagctgtctggatttcatatttgtattgacaaagggacttttgatgccataagccttaatcctgacaatgcaattgagaagaggaagcaatatgtgaaatctctctccagggtgttgaaagtaaaaggcttttttctaataacgtcatgtaattggaccaaggaagagttgctaaatgaattcagtgaaggttggagtacagtggcaggattttggctcactgcagccttgacttcctgggctcaagcgatcttttccacttcagcctcccgagtaggtggaactacaggcacacatcatcatgcctggataatttttgtatttttagcagagacgaggttttgccatgttgtccaggctggtctggaactcctgggctcaagtgattctcccacctggcctcccaaagtgctgggattataccatgccaggccctcgttggcattttagatttgaacttctcgaagagctaccaacacccaagttcagctttggaggcagatctggaaacagtgtagcagcattggttttccaaaaaatgtgagactttttcttggacgaattcaggtagctacacagaatctacacagcaaagttaacctgacacagaaaatccttgtgcaaataaatgcttagtcttactttaccagaactcttccctccagtgagttgcaagcgtgacatttgctgtgttttcagcacctgccaacttggaaagcagggtttgtgttcaggacttaggctcacaacccatactttgtggtgcacaatgctggcccagctggcatgctttcgtacctcaatggtgctagacagtcagttacaaagctgtgtggcttcacatgcgctgatctcaatagtcactcctcttcaagctgctttcaactcttattttgtatcaaaggagtgggattggtattattaaactcattgctgaggttatttttcagtgaaaataaattgttttatttagttgaaa

SEQ ID NO: 383025 - DNA, 3418 bp, Homo sapiens
cccgtctctatggcggccccaacggccgtccaggacgtggagcgaaatgagctcgggcgctgacggcggcggtggcgctgcggtggcggcgcggtcggacaagggcagtcccggggaggacggtttcgtcccgtcggcgctggggacccgcgagcattgggatgctgtctatgagagagaactgcaaactttccgagaatatggagatacaggtgaaatctggtttggagaagagagtatgaatcgactaataaggtggatgcagaaacacaagattccactggatgcttcagtgcttgatattggaactggaaatggtgttttcctggttgaacttgcaaaatttggtttctctaatattactggaattgattactctccttctgcaattcagctttctggaagtattatagaaaaagaaggtttatctaacattaagttaaaggtagaagactttttgaatctctccacacagctgtctggatttcatatttgtattgacaaagggacttttgatgccataagccttaatcctgacaatgcaattgagaagaggaagcaatatgtgaaatctctctccagggtgttgaaagtaaaaggcttttttctaataacgtcatgtaattggaccaaggaagagttgctaaatgaattcagtgaaggttggagtacagtggcaggattttggctcactgcagccttgacttcctgggctcaagcgatcttttccacttcagcctcccgagatttgaacttctcgaagagctaccaacacccaagttcagctttggaggcagatctggaaacagtgtagcagcattggttttccaaaaaatgtgagactttttcttggacgaattcaggtagctacacagaatctacacagcaaagttaacctgacacagaaaatccttgtgcaaataaatgcttagtaagtacacaggatgcacatgttgaatagagtatactggattggtgaaagaaaataataataatgagcatctaagtggttgggttttagagatcaatcaagaataattttaattttcttttgtatttgaaatgtaaatagttttcttttcgattaaaaaaatttcctataactgctaaacagttaaaaactttaaagtagtaaatgagtttatagaaagcatgtattcttgatttttgtgccttggtaaagttgataactatttatgaatatttgaccaaattattccagcatcagaataataagcaaaataactttgttagtgttttgttagactgtttatgaaatataacaagaaatactattttgtgttggatggcggttatttttaaacttaattaatacctgtgaaaaggcctcttacctttatgtatataattaaacaaaatcagagaaatgtatcagttgctcaagttatcaagcctgcattttgcagctatggtcttctacacactgtaagggtagtagaaggaaagagaactaaggaatgttattatttgctagcgctatgttaagttgtcttattaagtaattgagtcctttcaatgtcttcttgaggtatgtattgcttgttcttgtttctacgtataaggaaaatgaagctgagagaagtgaagtcacttttatgaggttcaacagtacaggatggagccaggatttttatctgggtctgtctgactttaaaacacatactcttctcctagcatattctgcctcacaggtgcttagtctttgcctttgtagcatttacagtacagctggagacccatgatgattacatataaagttcagttagaaaagatgggtagttactttattagtgttcatctgtggagtatcagaatagcagtcagccaactctgtctcatatcatccttcattacttttccccatctccctactcaaagacttgcctctattaagaattttgtcattcttctgtgaaagggtagtgtaagttatataagccctcagcgatacatgcacaaagatgttctagttaggggctaatttggcaagagaaacagtttattaatgtttttgaaaagataagtcatattcatacttaataccattttgtatttgtggtaatattttaatattggagctaaatacaaatttttgcataattttttgatgattttcagctttgtgggcctattgggttacataagtgactttttgtttggcaaatgttactcctgtattgagtaagtctaacattacgtcccttttctttttggggaggggtagccagaggagtgagtttttcatttagatcaacattgatcaaccattaagacaagatagttgaagacatgtatgtggactgtcaacaaaaataacattttttgaaaagcttttattttcaacatgtaaaaagtgagaaattacttcaaaatatatgcaatttaaattttttagaagattgtgttgattttaccaagacaggagatcttaaactgtagaaacttttatagtttttgagatcgggtctttgttttttttcacattaatattctttgatttcaaatataacatagataagtactcttagaattttgagttaagtatatgctattttaatgtgctaatcctacaaactaggctttctgtgtgactagactgagatgttgagtttgattcacaaaaagcttagaatggttctttgttgaaaagcttttcgagtcactatttggggcatgttagtgccatttgcaaaggtgaaggttttctttttttttttttttttaaccatagagcttttgataaggttaggaaaaggaagttgtcatctcttcttattactctaatcctgctggaagctagcttcttagggactaaaaccagaacaaatggaaggtccaaaaatgctaataagaaattagtattttcacataataccaaactgtaaaaaccaggccagcaagtgtcaccaggttcctgaaacaaaccataaatacattatttaacttagtattgttaaattgtataaatatgtgggtaactgtgacagaaattatgcacttataaaaagcagtaagttacatagtgaatgctgttttctgtggataagaagctggaattgtgatttcatttaatcgaaagacgcttactttgaggaaacttgtttgaaatgcaaacgcgatttctctgtggagccttcacggaattgctgcttttcactatgattattgctgcataacaggccacttctgtgtgtaggaagtgcgtgtgcaagtccaaagggaattgaggcctgaatgggtgggttatcccaattaacaaatacaaagttttcagtacattttgttttaagccaggtgcacaagttagagttgctttttgggactggcatttatgtatgtgagaatcaaacctgatatcactcttggcagcctgactaaagccatttaaaaataaaaa

SEQ ID NO: 383026 - DNA, 680 bp, Homo sapiens
cccgtctctatggcggccccaacggccgtccaggacgtggagcgaaatgagctcgggcgctgacggcggcggtggcgctgcggtggcggcgcggtcggacaagggcagtcccggggaggacggtttcgtcccgtcggcgctggggacccgcgagcattgggatgctgtctatgagagagaactgcaaactttccgagaatatggagatacaggtgaaatctggtttggagaagagagtatgaatcgactaataaggtggatgcagaaacacaagattccactggatgcttcagtgcttgatattggaactggaaatggtgttttcctggttgaacttgcaaaatttggtttctctaatattactggaattgattactctccttctgcaattcagctttctggaagtattatagaaaaagaaggtttatctaacattaagttaaagtagagacagggtttcaccgtgttagccaggatggtcttgatctcctgacctcatgatccgtctgccttggcctccctaagtgttgggattacaggcgtgagccactgcgcccggccaatataaggtatgttttcatacagggaccttttctattttgtttactgtttttttttttttttttttttttaagatggatccagcctgggtgacagagcgagactccatctcaaaaaaa

SEQ ID NO: 383027 - DNA, 513 bp, Homo sapiens
ttccaaactgtttctcttccaagtcacttaatgtcttatttctctggctttattttcttcatggcactttatctgaagttacttatttagcttatttatcttttatctttttttgaggcagtgtctcgccctgtcgcctagacagtagtgcagtggtgcgatctctgctcactgcaacctctgcttcccagttcaagcaattctcctgcctcagcctcccaagtagctgggactacaggcacatgccaccacgcccggctaattttttgtatttttagtagagacagggtttcaccgtgttagccaggatggtcttgatctcctgacctcatgatccgtctgccttggcctccctaagtgttgggattacaggcgtgagccactgcgcccggccaatataaggtatgttttcatacagggaccttttctattttgtttactgtttttttttttttttttttttttaagatggatccagcctgggtgacagagcgagactccatctcaaaaaaa

SEQ ID NO: 383028 - DNA, 260 bp, Homo sapiens
tcagatattgtcctaaatgctttacatgtacagtataaacgtattctgcttgcccatgtatttccttcttttaactcaaggacgttaaaagattgaactatgtgtatttattaataacactagtgatgtttaaacctctgtcataaatagctctgtaatgtattagaaacatacatttaattcataatacagtttaattcaagagtcttgctttgcatttcattgtttacatagttgggatgctgtctatgagagagaac

SEQ ID NO: 383029 - DNA, 5736 bp, Homo sapiens
cacgaggacgccgcctgcctcctgcacgccgccgccgcgcctagcgcccgggcccgcgacaccgcccgctaagcgccgggccgagttcacgcagccgcggtctggcggctccgcggcggcggcgggtgcgggcggcctggccggtgccggttaaagggacgagttgcaaacacttcaggaagtgacaagtcgatttcctcctccccgggagtcgctcgtacaaagcgctcggcgccggcaggcgagcgtgcgcgcggcggacgcgcggcgggcaccccggacgacttggcgagcgctggcggtgacggcgcggggtccgcgcccggagcgccccgccgcgcacaggagttgaccacatttggccatttcccagaagggccccaccccaagggtgagtggccaatggggagctgtttctgctgacatcaattccccaggaggtactcaccccaagtctgcccaagtgaagatggctgatacccaccctgggatggagcccagcgcctgaggcccttatcatggtgatggtcctaagtgaaagcctcagcacccggggagctgactccattgcatgtgggaccttcagccgtgaactgcacacgccaaagaagatgagtcaaggacctacacttttctcttgtggaattatggaaaatgacagatggcgagacctggacaggaaatgccctcttcagattgaccaaccgagcaccagcatctgggaatgcctgcctgaaaaggacagctcactatggcaccgggaggcagtgaccgcctgcgctgtgaccagtctgatcaaagacctcagcatcagcgaccacaacgggaacccctcagcaccccctagcaagcgccagtgccgctcactgtccttctccgatgagatgtccagttgccggacatcatggaggcccttgggctccaaagtctggactcccgtggaaaagagacgctgctacagcgggggcagcgtccagcgctattccaacggcttcagcaccatgcagaggagttccagcttcagcctcccttcccgggccaacgtgctctcctcaccctgcgaccaggcaggactccaccaccgatttggagggcagccctgccaaggggtgccaggctcagccccgtgtggacaggcaggtgacacctggagccctgacctgcaccccgtgggaggaggccggctggacctgcagcggtccctctcttgctcacatgagcagttttcctttgtggaatactgtcctccctcagccaacagcacacctgcctcaacaccagagctggcgagacgctccagcggcctttcccgcagccgctcccagccgtgtgtccttaacgacaagaaggtcggtgttaaaaggcggcgccctgaagaagtgcaagagcagaggccttctctagaccttgccaagatggcacagaactgtcagaccttcagcagcctcagctgcctgagcgcagggacagaggactgcggtccccagagccccttcgcccgccacgtcagcaacaccagggcctggaccgccctgctctcagcctccggcccagggggcaggacccccgctgggaccccggtccctgagcctcttcccccttccttcgacgaccacctcgcctgccaggaggacctgtcctgtgaggagtcagacagctgcgccctggacgaggattgtggcaggagagcggagccggctgcagcctggcgggaccgcggggcccctgggaacagcctctgctccctggacggcgagttggacattgagcagatagagaagaactgagggggtgtgggcccaggcagggctggggtgtgctggcatcgacagcccccactctgggcactaggtgggcccttgaaggggagcccaactcgtgggcctgatgaaagcttcctgagtggtgtcgggtcccagagagggagcccacctgctgcctgggggagagcctggcctggccgcgtcatacagcgggtgtgtcagcctctcaccggctccccgagcgtggcagccaccaggtccacagaactactgcagcccagaggacagctttgaagtttgcgtcttttctgcctctttccctgtgggatgttgggcagtctctgttgtccccggcagagctgggcaccgctctgtatccccctggtggtgggggctgtcagggagggcctggggtgggggccaggggccatctgctatgtcagggcccttcttggcctcactcaggttcacttctggggagtcggccccgcagcttctttcactcagttttactccgtgccttctctcccaggtctccctgcttcaggcttgggaaggttcgggagatgcttccttctgtaacaccagaaccatttggccttaattccaatgtgagagacagaatccctggggtgctggactggccctccagagggtaagccatgtccggagtctcgggcccaaggaacgatttggagggtgcttgttagggcctcccgtgttgggtagaaatttggtggatctgttggctgaaaagacggacttgcttgcctctcctacagcatggagaggctgaccccatggctctgccaccgttggggcagggttagcagatggcagcccttctctgtggctgacaggtcactgagtgataagcatggttggttccggtgagtgtagggatggcacgataccagggcagcctcttgaaaacggcctcgggagacgggagctgcgagcaggtgggcagatgagggccctatgcgcactcaggggtgaagggcgtccgctggccactctgcaggggcccctgcaggattccaggcacctcccgtttgtccttgaggactgctggctgtaaccagggcacatcacccacctcaagacaagcccacgcccttgtcagcttagggggagcccagtcctgagggctgcatctctgttgtaggcccagccaccggcacaaagctggattcatgctccctgcccctaccccaccctggctcctcaccctggggcatccgaggagcctagccccctgagggtttgctctcctctcaaggtttgtagctcctctccggctgccttgcagacaccaccacatgggctctgctctatgggaatctggcttttagcgaatgtggcgtcttctgcaaacaatagcaattgggctggcttaggagcaagtggctcattttcccataaggctaaaaataactggtgcgctcccttgtgttggctgacacgcgcgttcaaagcacttttgtagtcactttgcttttgctcgtcttcatggacgagtgaacgcctcgcttctgcaggttgagtccagatgcttctcaccttctttctcctcaagaaagatgctttttgggaaacgttgtttaaatcttatttttttactacatcaaaaggatggtggttcaagttcccaatatgtgggtggcacttcttaaaaatcagctttaaggagctggcagaaagcccccagccccacagccctgagagatggtgttgctagctcaggtggctgacacatggggtatgccgggcactgggcaggtcccagagccggggaaccagctcacctctggttgctgtagctcctgccggaggcatgtctacttgtgatcccggacagccgaacccaagagctggtggctctgagcagacagagacatcttggcctgtccctgcctgggggtcatggagaccatgtcttcttagagcaaatgtggaggcggccagggcagttgttgggtgaatgtggagagcacatggccatgtcttgcccccggagtaccactgggcgtggggggtcctggcaccacatgcccggtgtggccgagggcacacagcctctatagcaggccttcctgtggaaggcagaggcagtgagggaggtggacggtgccagctgaggctgaggcatgcagcagcccccagctacctttgcttagggctggggtgggaggcacatggtgacaggtatatgtcgtgggactggggtgtgggtgacctgccctcaaaccttgcctgccacctccccattcaggcctggtggcaggaagggacaagctgtggagctggctgagtcacagccacctccccacctccccgcaagctggtcccatcgaccagcaagcccagccccagggcgcttagggagaaatgacccagcctcctcagaccccgcctgcctgtcctgtgcccaccacgcagcagtcaggggagaaaatggtggctatcccttctgcttagagaaagaaatggcctttagctggtttcatgtttgtgttttgactggagggagtagaccctatctataaggtgccaccccatcatccaagctgccacactgcccggagcagcctgttcctgcactccaccctgctggccccaggacttctgatctcagtcctctgggagggaggttcgcctaggaggtgccccccacattggtgtccccatgggcagcaggcagacagctcacccccaccagcatgatggccccagctgggggcagtggcaggagccttacttttgtcacagccttgcccacaaaccctgcctctgaggggagactgaggaagggcagagccagaagcaagccgtgccaggccatctgcctgctcatggggtcctaaagcgcgggctaagcctgcaggaaagccggggcggtggggggggcttagtgccacatgcaccccactcattccaaagccaccaaactgccaggggctgccgtccacccgtggggcccaggggctggggccacagccttgccattttcgttgccataccctcttgccttactcgcggtggaggccggatttgcacgggcagacgtgcacctgggcccgtggggagcttgttctgaccagacgtacagattttcattctcagaaagccttacttttcaaccaaatttttgtagccagttttgtgaatttgtacactgaaagaaaatttaaataaaggggaagtccacattaaaaagaaaacaaaacaaaccctaactaacttccaaatgggtctcctggtgcgggggcgtgagtggccgtgccctgggtgtgctgcctgtctgagcaagcttccctagctgtggaaccccgggccccctgctgcgggctctgccttggtgtcatgcctgctgcacccccgtttccactgacgtgccgtctgtggctatgggggtggtcactggaatgacggtcactccagacgtcagccggcagggatgcagcaggctggccgcgcaccggggctcgggcaccctctggccccacactggcaatgatgccacaccttgccatgtccacgctgttggtcaaacccctctgtcatgcctctttaaagagaaaagaagagaaagattttttttttttttaatggcagaccgaagtggagatcttgtagcctagataggatagtctgaccttctagcatagtctttttggcaaatgatttgtgttttcagtgtgtggggaagctgtcctgggggctggggcgacagatagcacataggctgtttctggggctgcaggggcttccctgagctggatgttgtgggtgttgccgtgcttcaggaagtgtggcgaccagaaagcgtagacccggggcccagggtctgcccgcccctgcagcctggcctccccgcacaggctgtggcttgcactccagccgctctagtctctcaggaatttgcttgttacttgtactgtgtaaataaagcttcctggttcaataccca

SEQ ID NO: 383030 - DNA, 6431 bp, Homo sapiens
cccgtctctatggcggccccaacggccgtccaggacgtggagcgaaatgagctcgggcgctgacggcggcggtggcgctgcggtggcggcgcggtcggacaagggcagtcccggggaggacggtttcgtcccgtcggcgctggggacccgcgagcattgggatgctgtctatgagagagaactgcaaactttccgagaatatggagatacaggtgaaatctggtttggagaagagagtatgaatcgactaataaggtggatgcagaaacacaagattccactggatgcttcagtgcttgatattggaactggaaatggtgttttcctggttgaacttgcaaaatttggtttctctaatattactggaattgattactctccttctgcaattcagctttctggaagtattatagaaaaagaaggtttatctaacattaagttaaaggtagaagactttttgaatctctccacacagctgtctggatttcatatttgtattgacaaagggacttttgatgccataagccttaatcctgacaatgcaattgagaagaggaagcaatatgtgaaatctctctccagggtgttgaaagtaaaaggcttttttctaataacgtcatgtaattggaccaaggaagagttgctaaatgaattcagtgaaggttggagtacagtggcaggattttggctcactgcagccttgacttcctgggctcaagcgatcttttccacttcagcctcccgagtaggtggaactacaggcacacatcatcatgcctggataatttttgtatttttagcagagacgaggttttgccatgttgtccaggctggtctggaactcctgggctcaagtgattctcccacctggcctcccaaagtgctgggattataccatgccaggccctcgttggcattttagatttgaacttctcgaagagctaccaacacccaagttcagctttggaggcagatctggaaacagtgtagcagcattggttttccaaaaaatgtgagactttttcttggacgaattcagggagttgaccacatttggccatttcccagaagggccccaccccaagggtgagtggccaatggggagctgtttctgctgacatcaattccccaggaggtactcaccccaagtctgcccaagtgaagatggctgatacccaccctgggatggagcccagcgcctgaggcccttatcatggtgatggtcctaagtgaaagcctcagcacccggggagctgactccattgcatgtgggaccttcagccgtgaactgcacacgccaaagaagatgagtcaaggacctacacttttctcttgtggaattatggaaaatgacagatggcgagacctggacaggaaatgccctcttcagattgaccaaccgagcaccagcatctgggaatgcctgcctgaaaaggacagctcactatggcaccgggaggcagtgaccgcctgcgctgtgaccagtctgatcaaagacctcagcatcagcgaccacaacgggaacccctcagcaccccctagcaagcgccagtgccgctcactgtccttctccgatgagatgtccagttgccggacatcatggaggcccttgggctccaaagtctggactcccgtggaaaagagacgctgctacagcgggggcagcgtccagcgctattccaacggcttcagcaccatgcagaggagttccagcttcagcctcccttcccgggccaacgtgctctcctcaccctgcgaccaggcaggactccaccaccgatttggagggcagccctgccaaggggtgccaggctcagccccgtgtggacaggcaggtgacacctggagccctgacctgcaccccgtgggaggaggccggctggacctgcagcggtccctctcttgctcacatgagcagttttcctttgtggaatactgtcctccctcagccaacagcacacctgcctcaacaccagagctggcgagacgctccagcggcctttcccgcagccgctcccagccgtgtgtccttaacgacaagaaggtcggtgttaaaaggcggcgccctgaagaagtgcaagagcagaggccttctctagaccttgccaagatggcacagaactgtcagaccttcagcagcctcagctgcctgagcgcagggacagaggactgcggtccccagagccccttcgcccgccacgtcagcaacaccagggcctggaccgccctgctctcagcctccggcccagggggcaggacccccgctgggaccccggtccctgagcctcttcccccttccttcgacgaccacctcgcctgccaggaggacctgtcctgtgaggagtcagacagctgcgccctggacgaggattgtggcaggagagcggagccggctgcagcctggcgggaccgcggggcccctgggaacagcctctgctccctggacggcgagttggacattgagcagatagagaagaactgagggggtgtgggcccaggcagggctggggtgtgctggcatcgacagcccccactctgggcactaggtgggcccttgaaggggagcccaactcgtgggcctgatgaaagcttcctgagtggtgtcgggtcccagagagggagcccacctgctgcctgggggagagcctggcctggccgcgtcatacagcgggtgtgtcagcctctcaccggctccccgagcgtggcagccaccaggtccacagaactactgcagcccagaggacagctttgaagtttgcgtcttttctgcctctttccctgtgggatgttgggcagtctctgttgtccccggcagagctgggcaccgctctgtatccccctggtggtgggggctgtcagggagggcctggggtgggggccaggggccatctgctatgtcagggcccttcttggcctcactcaggttcacttctggggagtcggccccgcagcttctttcactcagttttactccgtgccttctctcccaggtctccctgcttcaggcttgggaaggttcgggagatgcttccttctgtaacaccagaaccatttggccttaattccaatgtgagagacagaatccctggggtgctggactggccctccagagggtaagccatgtccggagtctcgggcccaaggaacgatttggagggtgcttgttagggcctcccgtgttgggtagaaatttggtggatctgttggctgaaaagacggacttgcttgcctctcctacagcatggagaggctgaccccatggctctgccaccgttggggcagggttagcagatggcagcccttctctgtggctgacaggtcactgagtgataagcatggttggttccggtgagtgtagggatggcacgataccagggcagcctcttgaaaacggcctcgggagacgggagctgcgagcaggtgggcagatgagggccctatgcgcactcaggggtgaagggcgtccgctggccactctgcaggggcccctgcaggattccaggcacctcccgtttgtccttgaggactgctggctgtaaccagggcacatcacccacctcaagacaagcccacgcccttgtcagcttagggggagcccagtcctgagggctgcatctctgttgtaggcccagccaccggcacaaagctggattcatgctccctgcccctaccccaccctggctcctcaccctggggcatccgaggagcctagccccctgagggtttgctctcctctcaaggtttgtagctcctctccggctgccttgcagacaccaccacatgggctctgctctatgggaatctggcttttagcgaatgtggcgtcttctgcaaacaatagcaattgggctggcttaggagcaagtggctcattttcccataaggctaaaaataactggtgcgctcccttgtgttggctgacacgcgcgttcaaagcacttttgtagtcactttgcttttgctcgtcttcatggacgagtgaacgcctcgcttctgcaggttgagtccagatgcttctcaccttctttctcctcaagaaagatgctttttgggaaacgttgtttaaatcttatttttttactacatcaaaaggatggtggttcaagttcccaatatgtgggtggcacttcttaaaaatcagctttaaggagctggcagaaagcccccagccccacagccctgagagatggtgttgctagctcaggtggctgacacatggggtatgccgggcactgggcaggtcccagagccggggaaccagctcacctctggttgctgtagctcctgccggaggcatgtctacttgtgatcccggacagccgaacccaagagctggtggctctgagcagacagagacatcttggcctgtccctgcctgggggtcatggagaccatgtcttcttagagcaaatgtggaggcggccagggcagttgttgggtgaatgtggagagcacatggccatgtcttgcccccggagtaccactgggcgtggggggtcctggcaccacatgcccggtgtggccgagggcacacagcctctatagcaggccttcctgtggaaggcagaggcagtgagggaggtggacggtgccagctgaggctgaggcatgcagcagcccccagctacctttgcttagggctggggtgggaggcacatggtgacaggtatatgtcgtgggactggggtgtgggtgacctgccctcaaaccttgcctgccacctccccattcaggcctggtggcaggaagggacaagctgtggagctggctgagtcacagccacctccccacctccccgcaagctggtcccatcgaccagcaagcccagccccagggcgcttagggagaaatgacccagcctcctcagaccccgcctgcctgtcctgtgcccaccacgcagcagtcaggggagaaaatggtggctatcccttctgcttagagaaagaaatggcctttagctggtttcatgtttgtgttttgactggagggagtagaccctatctataaggtgccaccccatcatccaagctgccacactgcccggagcagcctgttcctgcactccaccctgctggccccaggacttctgatctcagtcctctgggagggaggttcgcctaggaggtgccccccacattggtgtccccatgggcagcaggcagacagctcacccccaccagcatgatggccccagctgggggcagtggcaggagccttacttttgtcacagccttgcccacaaaccctgcctctgaggggagactgaggaagggcagagccagaagcaagccgtgccaggccatctgcctgctcatggggtcctaaagcgcgggctaagcctgcaggaaagccggggcggtggggggggcttagtgccacatgcaccccactcattccaaagccaccaaactgccaggggctgccgtccacccgtggggcccaggggctggggccacagccttgccattttcgttgccataccctcttgccttactcgcggtggaggccggatttgcacgggcagacgtgcacctgggcccgtggggagcttgttctgaccagacgtacagattttcattctcagaaagccttacttttcaaccaaatttttgtagccagttttgtgaatttgtacactgaaagaaaatttaaataaaggggaagtccacattaaaaagaaaacaaaacaaaccctaactaacttccaaatgggtctcctggtgcgggggcgtgagtggccgtgccctgggtgtgctgcctgtctgagcaagcttccctagctgtggaaccccgggccccctgctgcgggctctgccttggtgtcatgcctgctgcacccccgtttccactgacgtgccgtctgtggctatgggggtggtcactggaatgacggtcactccagacgtcagccggcagggatgcagcaggctggccgcgcaccggggctcgggcaccctctggccccacactggcaatgatgccacaccttgccatgtccacgctgttggtcaaacccctctgtcatgcctctttaaagagaaaagaagagaaagattttttttttttttaatggcagaccgaagtggagatcttgtagcctagataggatagtctgaccttctagcatagtctttttggcaaatgatttgtgttttcagtgtgtggggaagctgtcctgggggctggggcgacagatagcacataggctgtttctggggctgcaggggcttccctgagctggatgttgtgggtgttgccgtgcttcaggaagtgtggcgaccagaaagcgtagacccggggcccagggtctgcccgcccctgcagcctggcctccccgcacaggctgtggcttgcactccagccgctctagtctctcaggaatttgcttgttacttgtactgtgtaaataaagcttcctggttcaataccca

SEQ ID NO: 383031 - DNA, 5178 bp, Homo sapiens
tgaggcccccagctggcgagcaccagaacctggagcctggcccctcctcagcagatcagacctcccagtccccagcacctgtggagggcacaggaccactcccttctagagactctgtgtctccaggtgaggccgagaactcatgtttccccagctccctgcatggctctgttacacaccaggctcaggacttcagctcggccccttctagcctgcggctcccgctctggttgtggagagtgggtagagcgggcgtcgtgtcgccctgtgtggggcagttacagcctgggcttcctccaagtcagatcccttctcaagggaagtatcgcggcgcgtcagttatgtttgcatagaggtccctgcttgaaaaacattgatttcaccaccattgtagggtgtttgggttactctcttcttttccatttaacggtatgttgccaaatttttacacacatcttagaatgttttcttaagataaaaatccaagtagtgaaattacctgatcaaggaattggatatattttccccaggttgcgcttcagaaaggctgtggacgaagtgttaggagcattcctgtttcaccgcagccccccagaactgggtctgcatcaaatttgtgtgctttgccgagttagtaggtgaatagtggaattgcgcgtgtctttatgagcacagagcgctcattggccggaggtgcatcttcatgagtacgttgctcatgggcccgtccttgcctggataggaggaacccgggacttgattggtcttgccacagcctggtggtctagttgctttgtggggtgtgcagtcctggggctgcgggaggggagtaacccttagtaacctgtgtgtctgcccctccacagaactgtcagaccttcagcagcctcagctgcctgagcgcagggacagaggactgcggtccccagagccccttcgcccgccacgtcagcaacaccagggcctggaccgccctgctctcagcctccggcccagggggcaggacccccgctgggaccccggtccctgagcctcttcccccttccttcgacgaccacctcgcctgccaggaggacctgtcctgtgaggagtcagacagctgcgccctggacgaggattgtggcaggagagcggagccggctgcagcctggcgggaccgcggggcccctgggaacagcctctgctccctggacggcgagttggacattgagcagatagagaagaactgagggggtgtgggcccaggcagggctggggtgtgctggcatcgacagcccccactctgggcactaggtgggcccttgaaggggagcccaactcgtgggcctgatgaaagcttcctgagtggtgtcgggtcccagagagggagcccacctgctgcctgggggagagcctggcctggccgcgtcatacagcgggtgtgtcagcctctcaccggctccccgagcgtggcagccaccaggtccacagaactactgcagcccagaggacagctttgaagtttgcgtcttttctgcctctttccctgtgggatgttgggcagtctctgttgtccccggcagagctgggcaccgctctgtatccccctggtggtgggggctgtcagggagggcctggggtgggggccaggggccatctgctatgtcagggcccttcttggcctcactcaggttcacttctggggagtcggccccgcagcttctttcactcagttttactccgtgccttctctcccaggtctccctgcttcaggcttgggaaggttcgggagatgcttccttctgtaacaccagaaccatttggccttaattccaatgtgagagacagaatccctggggtgctggactggccctccagagggtaagccatgtccggagtctcgggcccaaggaacgatttggagggtgcttgttagggcctcccgtgttgggtagaaatttggtggatctgttggctgaaaagacggacttgcttgcctctcctacagcatggagaggctgaccccatggctctgccaccgttggggcagggttagcagatggcagcccttctctgtggctgacaggtcactgagtgataagcatggttggttccggtgagtgtagggatggcacgataccagggcagcctcttgaaaacggcctcgggagacgggagctgcgagcaggtgggcagatgagggccctatgcgcactcaggggtgaagggcgtccgctggccactctgcaggggcccctgcaggattccaggcacctcccgtttgtccttgaggactgctggctgtaaccagggcacatcacccacctcaagacaagcccacgcccttgtcagcttagggggagcccagtcctgagggctgcatctctgttgtaggcccagccaccggcacaaagctggattcatgctccctgcccctaccccaccctggctcctcaccctggggcatccgaggagcctagccccctgagggtttgctctcctctcaaggtttgtagctcctctccggctgccttgcagacaccaccacatgggctctgctctatgggaatctggcttttagcgaatgtggcgtcttctgcaaacaatagcaattgggctggcttaggagcaagtggctcattttcccataaggctaaaaataactggtgcgctcccttgtgttggctgacacgcgcgttcaaagcacttttgtagtcactttgcttttgctcgtcttcatggacgagtgaacgcctcgcttctgcaggttgagtccagatgcttctcaccttctttctcctcaagaaagatgctttttgggaaacgttgtttaaatcttatttttttactacatcaaaaggatggtggttcaagttcccaatatgtgggtggcacttcttaaaaatcagctttaaggagctggcagaaagcccccagccccacagccctgagagatggtgttgctagctcaggtggctgacacatggggtatgccgggcactgggcaggtcccagagccggggaaccagctcacctctggttgctgtagctcctgccggaggcatgtctacttgtgatcccggacagccgaacccaagagctggtggctctgagcagacagagacatcttggcctgtccctgcctgggggtcatggagaccatgtcttcttagagcaaatgtggaggcggccagggcagttgttgggtgaatgtggagagcacatggccatgtcttgcccccggagtaccactgggcgtggggggtcctggcaccacatgcccggtgtggccgagggcacacagcctctatagcaggccttcctgtggaaggcagaggcagtgagggaggtggacggtgccagctgaggctgaggcatgcagcagcccccagctacctttgcttagggctggggtgggaggcacatggtgacaggtatatgtcgtgggactggggtgtgggtgacctgccctcaaaccttgcctgccacctccccattcaggcctggtggcaggaagggacaagctgtggagctggctgagtcacagccacctccccacctccccgcaagctggtcccatcgaccagcaagcccagccccagggcgcttagggagaaatgacccagcctcctcagaccccgcctgcctgtcctgtgcccaccacgcagcagtcaggggagaaaatggtggctatcccttctgcttagagaaagaaatggcctttagctggtttcatgtttgtgttttgactggagggagtagaccctatctataaggtgccaccccatcatccaagctgccacactgcccggagcagcctgttcctgcactccaccctgctggccccaggacttctgatctcagtcctctgggagggaggttcgcctaggaggtgccccccacattggtgtccccatgggcagcaggcagacagctcacccccaccagcatgatggccccagctgggggcagtggcaggagccttacttttgtcacagccttgcccacaaaccctgcctctgaggggagactgaggaagggcagagccagaagcaagccgtgccaggccatctgcctgctcatggggtcctaaagcgcgggctaagcctgcaggaaagccggggcggtggggggggcttagtgccacatgcaccccactcattccaaagccaccaaactgccaggggctgccgtccacccgtggggcccaggggctggggccacagccttgccattttcgttgccataccctcttgccttactcgcggtggaggccggatttgcacgggcagacgtgcacctgggcccgtggggagcttgttctgaccagacgtacagattttcattctcagaaagccttacttttcaaccaaatttttgtagccagttttgtgaatttgtacactgaaagaaaatttaaataaaggggaagtccacattaaaaagaaaacaaaacaaaccctaactaacttccaaatgggtctcctggtgcgggggcgtgagtggccgtgccctgggtgtgctgcctgtctgagcaagcttccctagctgtggaaccccgggccccctgctgcgggctctgccttggtgtcatgcctgctgcacccccgtttccactgacgtgccgtctgtggctatgggggtggtcactggaatgacggtcactccagacgtcagccggcagggatgcagcaggctggccgcgcaccggggctcgggcaccctctggccccacactggcaatgatgccacaccttgccatgtccacgctgttggtcaaacccctctgtcatgcctctttaaagagaaaagaagagaaagattttttttttttttaatggcagaccgaagtggagatcttgtagcctagataggatagtctgaccttctagcatagtctttttggcaaatgatttgtgttttcagtgtgtggggaagctgtcctgggggctggggcgacagatagcacataggctgtttctggggctgcaggggcttccctgagctggatgttgtgggtgttgccgtgcttcaggaagtgtggcgaccagaaagcgtagacccggggcccagggtctgcccgcccctgcagcctggcctccccgcacaggctgtggcttgcactccagccgctctagtctctcaggaatttgcttgttacttgtactgtgtaaataaagcttcctggttcaataccca

SEQ ID NO: 383032 - DNA, 6323 bp, Homo sapiens
cccgtctctatggcggccccaacggccgtccaggacgtggagcgaaatgagctcgggcgctgacggcggcggtggcgctgcggtggcggcgcggtcggacaagggcagtcccggggaggacggtttcgtcccgtcggcgctggggacccgcgagcattgggatgctgtctatgagagagaactgcaaactttccgagaatatggagatacaggtgaaatctggtttggagaagagagtatgaatcgactaataaggtggatgcagaaacacaagattccactggatgcttcagtgcttgatattggaactggaaatggtgttttcctggttgaacttgcaaaatttggtttctctaatattactggaattgattactctccttctgcaattcagctttctggaagtattatagaaaaagaaggtttatctaacattaagttaaaggtagaagactttttgaatctctccacacagctgtctggatttcatatttgtattgacaaagggacttttgatgccataagccttaatcctgacaatgcaattgagaagaggaagcaatatgtgaaatctctctccagggtgttgaaagtaaaaggcttttttctaataacgtcatgtaattggaccaaggaagagttgctaaatgaattcagtgaaggttggagtacagtggcaggattttggctcactgcagccttgacttcctgggctcaagcgatcttttccacttcagcctcccgagtaggtggaactacaggcacacatcatcatgcctggataatttttgtatttttagcagagacgaggttttgccatgttgtccaggctggtctggaactcctgggctcaagtgattctcccacctggcctcccaaagtgctgggattataccatgccaggccctcgttggcattttagatttgaacttctcgaagagctaccaacacccaagttcagctttggaggcagatctggaaacagtgtagcagcattggttttccaaaaaatgtgagactttttcttggacgaattcagggagttgaccacatttggccatttcccagaagggccccaccccaagggtgagtggccaatggggagctgtttctgctgacatcaattccccaggaggtactcaccccaagtctgcccaagtgaagatggctgatacccaccctgggatggagcccagcgcctgaggcccttatcatggtgatggtcctaagtgaaagcctcagcacccggggagctgactccattgcatgtgggaccttcagccgtgaactgcacacgccaaagaagatgagtcaaggacctacacttttctcttgtggaattatggaaaatgacagatggcgagacctggacaggaaatgccctcttcagattgaccaaccgagcaccagcatctgggaatgcctgcctgaaaaggacagctcactatggcaccgggaggcagtgaccgcctgcgctgtgaccagtctgatcaaagacctcagcatcagcgaccacaacgggaacccctcagcaccccctagcaagcgccagtgccgctcactgtccttctccgatgagatgtccagttgccggacatcatggaggcccttgggctccaaagtctggactcccgtggaaaagagacgctgctacagcgggggcagcgtccagcgctattccaacggcttcagcaccatgcagaggagttccagcttcagcctcccttcccgggccaacgtgctctcctcaccctgcgaccaggcaggactccaccaccgatttggagggcagccctgccaaggggtgccaggctcagccccgtgtggacaggcaggtgacacctggagccctgacctgcaccccgtgggaggaggccggctggacctgcagcggtccctctcttgctcacatgagcagttttcctttgtggaatactgtcctccctcagccaacagcacacctgcctcaacaccagagctggcgagacgctccagcggcctttcccgcagccgctcccagccgtgtgtccttaacgacaagaaggtcggtgttaaaaggcggcgccctgaagaagtgcaagagcagaggccttctctagaccttgccaagatggcacagaactgtcagaccttcagcagcctcagctgcctgagcgcagggacagaggactgcggtccccagagccccttcgcccgccacgtcagcaacaccagggcctggaccgccctgctctcagcctccggcccagggggcaggacccccgctgggaccccggtccctgagcctcttcccccttccttcgacgaccacctcgcctgccaggaggacctgtcctgtgaggagtcagacagctgcgccctggacgaggattgtggcaggagagcggagccggctgcagcctggcgggaccgcggggcccctgggaacagcctctgctccctggacggcgagttggacattgagcagatagagaagaactgagggggtgtgggcccaggcagggctggggtgtgctggcatcgacagcccccactctgggcactaggtgggcccttgaaggggagcccaactcgtgggcctgatgaaagcttcctgagtggtgtcgggtcccagagagggagcccacctgctgcctgggggagagcctggcctggccgcgtcatacagcgggtgtgtcagcctctcaccggctccccgagcgtggcagccaccaggtccacagaactactgcagcccagaggacagctttgaagtttgcgtcttttctgcctctttccctgtgggatgttgggcagtctctgttgtccccggcagagctgggcaccgctctgtatccccctggtggtgggggctgtcagggagggcctggggtgggggccaggggccatctgctatgtcagggcccttcttggcctcactcaggttcacttctggggagtcggccccgcagcttctttcactcagttttactccgtgccttctctcccaggtctccctgcttcaggcttgggaaggttcgggagatgcttccttctgtaacaccagaaccatttggccttaattccaatgtgagagacagaatccctggggtgctggactggccctccagagggtaagccatgtccggagtctcgggcccaaggaacgatttggagggtgcttgttagggcctcccgtgttgggtagaaatttggtggatctgttggctgaaaagacggacttgcttgcctctcctacagcatggagaggctgaccccatggctctgccaccgttggggcagggttagcagatggcagcccttctctgtggctgacaggtcactgagtgataagcatggttggttccggtgagtgtagggatggcacgataccagggcagcctcttgaaaacggcctcgggagacgggagctgcgagcaggtgggcagatgagggccctatgcgcactcaggggtgaagggcgtccgctggccactctgcaggggcccctgcaggattccaggcacctcccgtttgtccttgaggactgctggctgtaaccagggcacatcacccacctcaagacaagcccacgcccttgtcagcttagggggagcccagtcctgagggctgcatctctgttgtaggcccagccaccggcacaaagctggattcatgctccctgcccctaccccaccctggctcctcaccctggggcatccgaggagcctagccccctgagggtttgctctcctctcaaggtttgtagctcctctccggctgccttgcagacaccaccacatgggctctgctctatgggaatctggcttttagcgaatgtggcgtcttctgcaaacaatagcaattgggctggcttaggagcaagtggctcattttcccataaggctaaaaataactggtgcgctcccttgtgttggctgacacgcgcgttcaaagcacttttgtagtcactttgcttttgctcgtcttcatggacgagtgaacgcctcgcttctgcaggttgagtccagatgcttctcaccttctttctcctcaagaaagatgctttttgggaaacgttgtttaaatcttatttttttactacatcaaaaggatggtggttcaagttcccaatatgtgggtggcacttcttaaaaatcagctttaaggagctggcagaaagcccccagccccacagccctgagagatggtgttgctagctcaggtggctgacacatggggtatgccgggcactgggcaggtcccagagccggggaaccagctcacctctggttgctgtagctcctgccggaggcatgtctacttgtgatcccggacagccgaacccaagagctggtggctctgagcagacagagacatcttggcctgtccctgcctgggggtcatggagaccatgtcttcttagagcaaatgtggaggcggccagggcagttgttgggtgaatgtggagagcacatggccatgtcttgcccccggagtaccactgggcgtggggggtcctggcaccacatgcccggtgtggccgagggcacacagcctctatagcaggccttcctgtggaaggcagaggcagtgagggaggtggacggtgccagctgaggctgaggcatgcagcagcccccagctacctttgcttagggctggggtgggaggcacatggtgacaggtatatgtcgtgggactggggtgtgggtgacctgccctcaaaccttgcctgccacctccccattcaggcctggtggcaggaagggacaagctgtggagctggctgagtcacagccacctccccacctccccgcaagctggtcccatcgaccagcaagcccagccccagggcgcttagggagaaatgacccagcctcctcagaccccgcctgcctgtcctgtgcccaccacgcagcagtcaggggagaaaatggtggctatcccttctgcttagagaaagaaatggcctttagctggtttcatgtttgtgttttgactggagggagtagaccctatctataaggtgccaccccatcatccaagctgccacactgcccggagcagcctgttcctgcactccaccctgctggccccaggacttctgatctcagtcctctgggagggaggttcgcctaggaggtgccccccacattggtgtccccatgggcagcaggcagacagctcacccccaccagcatgatggccccagctgggggcagtggcaggagccttacttttgtcacagccttgcccacaaaccctgcctctgaggggagactgaggaagggcagagccagaagcaagccgtgccaggccatctgcctgctcatggggtcctaaagcgcgggctaagcctgcaggaaagccggggcggtggggggggcttagtgccacatgcaccccactcattccaaagccaccaaactgccaggggctgccgtccacccgtggggagcttgttctgaccagacgtacagattttcattctcagaaagccttacttttcaaccaaatttttgtagccagttttgtgaatttgtacactgaaagaaaatttaaataaaggggaagtccacattaaaaagaaaacaaaacaaaccctaactaacttccaaatgggtctcctggtgcgggggcgtgagtggccgtgccctgggtgtgctgcctgtctgagcaagcttccctagctgtggaaccccgggccccctgctgcgggctctgccttggtgtcatgcctgctgcacccccgtttccactgacgtgccgtctgtggctatgggggtggtcactggaatgacggtcactccagacgtcagccggcagggatgcagcaggctggccgcgcaccggggctcgggcaccctctggccccacactggcaatgatgccacaccttgccatgtccacgctgttggtcaaacccctctgtcatgcctctttaaagagaaaagaagagaaagattttttttttttttaatggcagaccgaagtggagatcttgtagcctagataggatagtctgaccttctagcatagtctttttggcaaatgatttgtgttttcagtgtgtggggaagctgtcctgggggctggggcgacagatagcacataggctgtttctggggctgcaggggcttccctgagctggatgttgtgggtgttgccgtgcttcaggaagtgtggcgaccagaaagcgtagacccggggcccagggtctgcccgcccctgcagcctggcctccccgcacaggctgtggcttgcactccagccgctctagtctctcaggaatttgcttgttacttgtactgtgtaaataaagcttcctggttcaataccca

SEQ ID NO: 383033 - DNA, 6244 bp, Homo sapiens
cccgtctctatggcggccccaacggccgtccaggacgtggagcgaaatgagctcgggcgctgacggcggcggtggcgctgcggtggcggcgcggtcggacaagggcagtcccggggaggacggtttcgtcccgtcggcgctggggacccgcgagcattgggatgctgtctatgagagagaactgcaaactttccgagaatatggagatacaggtgaaatctggtttggagaagagagtatgaatcgactaataaggtggatgcagaaacacaagattccactggatgcttcagtgcttgatattggaactggaaatggtgttttcctggttgaacttgcaaaatttggtttctctaatattactggaattgattactctccttctgcaattcagctttctggaagtattatagaaaaagaaggtttatctaacattaagttaaaggtagaagactttttgaatctctccacacagctgtctggatttcatatttgtattgacaaagggacttttgatgccataagccttaatcctgacaatgcaattgagaagaggaagcaatatgtgaaatctctctccagggtgttgaaagtaaaaggcttttttctaataacgtcatgtaattggaccaaggaagagttgctaaatgaattcagtgaaggttggagtacagtggcaggattttggctcactgcagccttgacttcctgggctcaagcgatcttttccacttcagcctcccgagtaggtggaactacaggcacacatcatcatgcctggataatttttgtatttttagcagagacgaggttttgccatgttgtccaggctggtctggaactcctgggctcaagtgattctcccacctggcctcccaaagtgctgggattataccatgccaggccctcgttggcattttagatttgaacttctcgaagagctaccaacacccaagttcagctttggaggcagatctggaaacagtgtagcagcattggttttccaaaaaatgtgagactttttcttggacgaattcagggagttgaccacatttggccatttcccagaagggccccaccccaagggtgagtggccaatggggagctgtttctgctgacatcaattccccaggaggtactcaccccaagtctgcccaagtgaagatggctgatacccaccctgggatggagcccagcgcctgaggcccttatcatggtgatggtcctaagtgaaagcctcagcacccggggagctgactccattgcatgtgggaccttcagccgtgaactgcacacgccaaagaagatgagtcaaggacctacacttttctcttgtggaattatggaaaatgacagatggcgagacctggacaggaaatgccctcttcagattgaccaaccgagcaccagcatctgggaatgcctgcctgaaaaggacagctcactatggcaccgggaggcagtgaccgcctgcgctgtgaccagtctgatcaaagacctcagcatcagcgaccacaacgggaacccctcagcaccccctagcaagcgccagtgccgctcactgtccttctccgatgagatgtccagttgccggacatcatggaggcccttgggctccaaagtctggactcccgtggaaaagagacgctgctacagcgggggcagcgtccagcgctattccaacggcttcagcaccatgcagaggagttccagcttcagcctcccttcccgggccaacgtgctctcctcaccctgcgaccaggcaggactccaccaccgatttggagggcagccctgccaaggggtgccaggctcagccccgtgtggacaggcaggtgacacctggagccctgacctgcaccccgtgggaggaggccggctggacctgcagcggtccctctcttgctcacatgagcagttttcctttgtggaatactgtcctccctcagccaacagcacacctgcctcaacaccagagctggcgagacgctccagcggcctttcccgcagccgctcccagccgtgtgtccttaacgacaagaaggtcggtgttaaaaggcggcgccctgaagaagtgcaagagcagaggccttctctagaccttgccaagatggcacagaactgtcagaccttcagcagcctcagctgcctgagcgcagggacagaggactgcggtccccagagccccttcgcccgccacgtcagcaacaccagggcctggaccgccctgctctcagcctccggcccagggggcaggacccccgctgggaccccggtccctgagcctcttcccccttccttcgacgaccacctcgcctgccaggaggacctgtcctgtgaggagtcagacagctgcgccctggacgaggattgtggcaggagagcggagccggctgcagcctggcgggaccgcggggcccctgggaacagcctctgctccctggacggcgagttggacattgagcagatagagaagaactgagggggtgtgggcccaggcagggctggggtgtgctggcatcgacagcccccactctgggcactaggtgggcccttgaaggggagcccaactcgtgggcctgatgaaagcttcctgagtggtgtcgggtcccagagagggagcccacctgctgcctgggggagagcctggcctggccgcgtcatacagcgggtgtgtcagcctctcaccggctccccgagcgtggcagccaccaggtccacagaactactgcagcccagaggacagctttgaagtttgcgtcttttctgcctctttccctgtgggatgttgggcagtctctgttgtccccggcagagctgggcaccgctctgtatccccctggtggtgggggctgtcagggagggcctggggtgggggccaggggccatctgctatgtcagggcccttcttggcctcactcaggttcacttctggggagtcggccccgcagcttctttcactcagttttactccgtgccttctctcccaggtctccctgcttcaggcttgggaaggttcgggagatgcttccttctgtaacaccagaaccatttggccttaattccaatgtgagagacagaatccctggggtgctggactggccctccagagggtaagccatgtccggagtctcgggcccaaggaacgatttggagggtgcttgttagggcctcccgtgttgggtagaaatttggtggatctgttggctgaaaagacggacttgcttgcctctcctacagcatggagaggctgaccccatggctctgccaccgttggggcagggttagcagatggcagcccttctctgtggctgacaggtcactgagtgataagcatggttggttccggtgagtgtagggatggcacgataccagggcagcctcttgaaaacggcctcgggagacgggagctgcgagcaggtgggcagatgagggccctatgcgcactcaggggtgaagggcgtccgctggccactctgcaggggcccctgcaggattccaggcacctcccgtttgtccttgaggactgctggctgtaaccagggcacatcacccacctcaagacaagcccacgcccttgtcagcttagggggagcccagtcctgagggctgcatctctgttgtaggcccagccaccggcacaaagctggattcatgctccctgcccctaccccaccctggctcctcaccctggggcatccgaggagcctagccccctgagggtttgctctcctctcaaggtttgtagctcctctccggctgccttgcagacaccaccacatgggctctgctctatgggaatctggcttttagcgaatgtggcgtcttctgcaaacaatagcaattgggctggcttaggagcaagtggctcattttcccataaggctaaaaataactggtgcgctcccttgtgttggctgacacgcgcgttcaaagcacttttgtagtcactttgcttttgctcgtcttcatggacgagtgaacgcctcgcttctgcaggttgagtccagatgcttctcaccttctttctcctcaagaaagatgctttttgggaaacgttgtttaaatcttatttttttactacatcaaaaggatggtggttcaagttcccaatatgtgggtggcacttcttaaaaatcagctttaaggagctggcagaaagcccccagccccacagccctgagagatggtgttgctagctcaggtggctgacacatggggtatgccgggcactgggcaggtcccagagccggggaaccagctcacctctggttgctgtagctcctgccggaggcatgtctacttgtgatcccggacagccgaacccaagagctggtggctctgagcagacagagacatcttggcctgtccctgcctgggggtcatggagaccatgtcttcttagagcaaatgtggaggcggccagggcagttgttgggtgaatgtggagagcacatggccatgtcttgcccccggagtaccactgggcgtggggggtcctggcaccacatgcccggtgtggccgagggcacacagcctctatagcaggccttcctgtggaaggcagaggcagtgagggaggtggacggtgccagctgaggctgaggcatgcagcagcccccagctacctttgcttagggctggggtgggaggcacatggtgacaggaagggacaagctgtggagctggctgagtcacagccacctccccacctccccgcaagctggtcccatcgaccagcaagcccagccccagggcgcttagggagaaatgacccagcctcctcagaccccgcctgcctgtcctgtgcccaccacgcagcagtcaggggagaaaatggtggctatcccttctgcttagagaaagaaatggcctttagctggtttcatgtttgtgttttgactggagggagtagaccctatctataaggtgccaccccatcatccaagctgccacactgcccggagcagcctgttcctgcactccaccctgctggccccaggacttctgatctcagtcctctgggagggaggttcgcctaggaggtgccccccacattggtgtccccatgggcagcaggcagacagctcacccccaccagcatgatggccccagctgggggcagtggcaggagccttacttttgtcacagccttgcccacaaaccctgcctctgaggggagactgaggaagggcagagccagaagcaagccgtgccaggccatctgcctgctcatggggtcctaaagcgcgggctaagcctgcaggaaagccggggcggtggggggggcttagtgccacatgcaccccactcattccaaagccaccaaactgccaggggctgccgtccacccgtggggagcttgttctgaccagacgtacagattttcattctcagaaagccttacttttcaaccaaatttttgtagccagttttgtgaatttgtacactgaaagaaaatttaaataaaggggaagtccacattaaaaagaaaacaaaacaaaccctaactaacttccaaatgggtctcctggtgcgggggcgtgagtggccgtgccctgggtgtgctgcctgtctgagcaagcttccctagctgtggaaccccgggccccctgctgcgggctctgccttggtgtcatgcctgctgcacccccgtttccactgacgtgccgtctgtggctatgggggtggtcactggaatgacggtcactccagacgtcagccggcagggatgcagcaggctggccgcgcaccggggctcgggcaccctctggccccacactggcaatgatgccacaccttgccatgtccacgctgttggtcaaacccctctgtcatgcctctttaaagagaaaagaagagaaagattttttttttttttaatggcagaccgaagtggagatcttgtagcctagataggatagtctgaccttctagcatagtctttttggcaaatgatttgtgttttcagtgtgtggggaagctgtcctgggggctggggcgacagatagcacataggctgtttctggggctgcaggggcttccctgagctggatgttgtgggtgttgccgtgcttcaggaagtgtggcgaccagaaagcgtagacccggggcccagggtctgcccgcccctgcagcctggcctccccgcacaggctgtggcttgcactccagccgctctagtctctcaggaatttgcttgttacttgtactgtgtaaataaagcttcctggttcaataccca

SEQ ID NO: 383034 - DNA, 3574 bp, Homo sapiens
cccgtctctatggcggccccaacggccgtccaggacgtggagcgaaatgagctcgggcgctgacggcggcggtggcgctgcggtggcggcgcggtcggacaagggcagtcccggggaggacggtttcgtcccgtcggcgctggggacccgcgagcattgggatgctgtctatgagagagaactgcaaactttccgagaatatggagatacaggtgaaatctggtttggagaagagagtatgaatcgactaataaggtggatgcagaaacacaagattccactggatgcttcagtgcttgatattggaactggaaatggcaaaatttggtttctctaatattactggaattgattactctccttctgcaattcagctttctggaagtattatagaaaaagaaggtttatctaacattaagttaaaggtagaagactttttgaatctctccacacagctgtctggatttcatatttgtattgacaaagggacttttgatgccataagccttaatcctgacaatgcaattgagaagaggaagcaatatgtgaaatctctctccagggtgttgaaagtaaaaggcttttttctaataacgtcatgtaattggaccaaggaagagttgctaaatgaattcagtgaaggttggagtacagtggcaggattttggctcactgcagccttgacttcctgggctcaagcgatcttttccacttcagcctcccgagtaggtggaactacaggcacacatcatcatgcctggataatttttgtatttttagcagagacgaggttttgccatgttgtccaggctggtctggaactcctgggctcaagtgattctcccacctggcctcccaaagtgctgggattataccatgccaggccctcgttggcattttagatttgaacttctcgaagagctaccaacacccaagttcagctttggaggcagatctggaaacagtgtagcagcattggttttccaaaaaatgtgagactttttcttggacgaattcaggtagctacacagaatctacacagcaaagttaacctgacacagaaaatccttgtgcaaataaatgcttagtaagtacacaggatgcacatgttgaatagagtatactggattggtgaaagaaaataataataatgagcatctaagtggttgggttttagagatcaatcaagaataattttaattttcttttgtatttgaaatgtaaatagttttcttttcgattaaaaaaatttcctataactgctaaacagttaaaaactttaaagtagtaaatgagtttatagaaagcatgtattcttgatttttgtgccttggtaaagttgataactatttatgaatatttgaccaaattattccagcatcagaataataagcaaaataactttgttagtgttttgttagactgtttatgaaatataacaagaaatactattttgtgttggatggcggttatttttaaacttaattaatacctgtgaaaaggcctcttacctttatgtatataattaaacaaaatcagagaaatgtatcagttgctcaagttatcaagcctgcattttgcagctatggtcttctacacactgtaagggtagtagaaggaaagagaactaaggaatgttattatttgctagcgctatgttaagttgtcttattaagtaattgagtcctttcaatgtcttcttgaggtatgtattgcttgttcttgtttctacgtataaggaaaatgaagctgagagaagtgaagtcacttttatgaggttcaacagtacaggatggagccaggatttttatctgggtctgtctgactttaaaacacatactcttctcctagcatattctgcctcacaggtgcttagtctttgcctttgtagcatttacagtacagctggagacccatgatgattacatataaagttcagttagaaaagatgggtagttactttattagtgttcatctgtggagtatcagaatagcagtcagccaactctgtctcatatcatccttcattacttttccccatctccctactcaaagacttgcctctattaagaattttgtcattcttctgtgaaagggtagtgtaagttatataagccctcagcgatacatgcacaaagatgttctagttaggggctaatttggcaagagaaacagtttattaatgtttttgaaaagataagtcatattcatacttaataccattttgtatttgtggtaatattttaatattggagctaaatacaaatttttgcataattttttgatgattttcagctttgtgggcctattgggttacataagtgactttttgtttggcaaatgttactcctgtattgagtaagtctaacattacgtcccttttctttttggggaggggtagccagaggagtgagtttttcatttagatcaacattgatcaaccattaagacaagatagttgaagacatgtatgtggactgtcaacaaaaataacattttttgaaaagcttttattttcaacatgtaaaaagtgagaaattacttcaaaatatatgcaatttaaattttttagaagattgtgttgattttaccaagacaggagatcttaaactgtagaaacttttatagtttttgagatcgggtctttgttttttttcacattaatattctttgatttcaaatataacatagataagtactcttagaattttgagttaagtatatgctattttaatgtgctaatcctacaaactaggctttctgtgtgactagactgagatgttgagtttgattcacaaaaagcttagaatggttctttgttgaaaagcttttcgagtcactatttggggcatgttagtgccatttgcaaaggtgaaggttttctttttttttttttttttaaccatagagcttttgataaggttaggaaaaggaagttgtcatctcttcttattactctaatcctgctggaagctagcttcttagggactaaaaccagaacaaatggaaggtccaaaaatgctaataagaaattagtattttcacataataccaaactgtaaaaaccaggccagcaagtgtcaccaggttcctgaaacaaaccataaatacattatttaacttagtattgttaaattgtataaatatgtgggtaactgtgacagaaattatgcacttataaaaagcagtaagttacatagtgaatgctgttttctgtggataagaagctggaattgtgatttcatttaatcgaaagacgcttactttgaggaaacttgtttgaaatgcaaacgcgatttctctgtggagccttcacggaattgctgcttttcactatgattattgctgcataacaggccacttctgtgtgtaggaagtgcgtgtgcaagtccaaagggaattgaggcctgaatgggtgggttatcccaattaacaaatacaaagttttcagtacattttgttttaagccaggtgcacaagttagagttgctttttgggactggcatttatgtatgtgagaatcaaacctgatatcactcttggcagcctgactaaagccatttaaaaataaaaa

SEQ ID NO: 383035 - DNA, 1471 bp, Homo sapiens
cccgtctctatggcggccccaacggccgtccaggacgtggagcgaaatgagctcgggcgctgacggcggcggtggcgctgcggtggcggcgcggtcggacaagggcagtcccggggaggacggtttcgtcccgtcggcgctggggacccgcgagcattgggatgctgtctatgagagagaactgcaaactttccgagaatatggagatacaggtgaaatctggtttggagaagagagtatgaatcgactaataaggtggatgcagaaacacaagattccactggatgcttcagtgcttgatattggaactggaaatggtgttttcctggttgaacttgcaaaatttggtttctctaatattactggaattgattactctccttctgcaattcagctttctggaagtattatagaaaaagaaggtttatctaacattaagttaaaggtagaagactttttgaatctctccacacagctgtctggatttcatatttgtattgacaaagggacttttgatgccataagccttaatcctgacaatgcaattgagaagaggaagcaatatgtgaaatctctctccagggtgttgaaagtaaaaggcttttttctaataacgtcatgtaattggaccaaggaagagttgctaaatgaattcagtgaaggttggagtacagtggcaggattttggctcactgcagccttgacttcctgggctcaagcgatcttttccacttcagcctcccgagtaggtggaactacaggcacacatcatcatgcctggataatttttgtatttttagcagagacgaggttttgccatgttgtccaggctggtctggaactcctgggctcaagtgattctcccacctggcctcccaaagtgctgggattataccatgccaggccctcgttggcattttagatttgaacttctcgaagagctaccaacacccaagttcagctttggaggcagatctggaaacagtgtagcagcattggttttccaaaaaatgtgagactttttcttggacgaattcaggtagctacacagaatctacacagcaaagttaacctgacacagaaaatccttgtgcaaataaatgcttagtaagtacacaggatgcacatgttgaatagagtatactggattggtgaaagaaaataataataatgagcatctaagtggttgggttttagagatcaatcaagaataattttaattttcttttgtatttgaaatgtaaatagttttcttttcgattaaaaaaatttcctataactgctaaacagttaaaaactttaaagtagtaaatgagtttatagaaagcatgtattcttgatttttgtgccttggtaaagttgataactatttatgaatatttgaccaaattattccagcatcagaataataagcaaaataactttgttagtgttttgttagactgtttatgaaatataacaagaaatacta

SEQ ID NO: 383036 - DNA, 3198 bp, Homo sapiens
cccgtctctatggcggccccaacggccgtccaggacgtggagcgaaatgagctcgggcgctgacggcggcggtggcgctgcggtggcggcgcggtcggacaagggcagtcccggggaggacggtttcgtcccgtcggcgctggggacccgcgagcattgggatgctgtctatgagagagaactgcaaactttccgagaatatggagatacaggtgaaatctggtttggagaagagagtatgaatcgactaataaggtggatgcagaaacacaagattccactggatgcttcagtgcttgatattggaactggaaatggtgttttcctggttgaacttgcaaaatttggtttctctaatattactggaattgattactctccttctgcaattcagctttctggaagtattatagaaaaagaaggtttatctaacattaagttaaagggtgttgaaagtaaaaggcttttttctaataacgtcatgtaattggaccaaggaagagttgctaaatgaattcagtgaaggatttgaacttctcgaagagctaccaacacccaagttcagctttggaggcagatctggaaacagtgtagcagcattggttttccaaaaaatgtgagactttttcttggacgaattcaggtagctacacagaatctacacagcaaagttaacctgacacagaaaatccttgtgcaaataaatgcttagtaagtacacaggatgcacatgttgaatagagtatactggattggtgaaagaaaataataataatgagcatctaagtggttgggttttagagatcaatcaagaataattttaattttcttttgtatttgaaatgtaaatagttttcttttcgattaaaaaaatttcctataactgctaaacagttaaaaactttaaagtagtaaatgagtttatagaaagcatgtattcttgatttttgtgccttggtaaagttgataactatttatgaatatttgaccaaattattccagcatcagaataataagcaaaataactttgttagtgttttgttagactgtttatgaaatataacaagaaatactattttgtgttggatggcggttatttttaaacttaattaatacctgtgaaaaggcctcttacctttatgtatataattaaacaaaatcagagaaatgtatcagttgctcaagttatcaagcctgcattttgcagctatggtcttctacacactgtaagggtagtagaaggaaagagaactaaggaatgttattatttgctagcgctatgttaagttgtcttattaagtaattgagtcctttcaatgtcttcttgaggtatgtattgcttgttcttgtttctacgtataaggaaaatgaagctgagagaagtgaagtcacttttatgaggttcaacagtacaggatggagccaggatttttatctgggtctgtctgactttaaaacacatactcttctcctagcatattctgcctcacaggtgcttagtctttgcctttgtagcatttacagtacagctggagacccatgatgattacatataaagttcagttagaaaagatgggtagttactttattagtgttcatctgtggagtatcagaatagcagtcagccaactctgtctcatatcatccttcattacttttccccatctccctactcaaagacttgcctctattaagaattttgtcattcttctgtgaaagggtagtgtaagttatataagccctcagcgatacatgcacaaagatgttctagttaggggctaatttggcaagagaaacagtttattaatgtttttgaaaagataagtcatattcatacttaataccattttgtatttgtggtaatattttaatattggagctaaatacaaatttttgcataattttttgatgattttcagctttgtgggcctattgggttacataagtgactttttgtttggcaaatgttactcctgtattgagtaagtctaacattacgtcccttttctttttggggaggggtagccagaggagtgagtttttcatttagatcaacattgatcaaccattaagacaagatagttgaagacatgtatgtggactgtcaacaaaaataacattttttgaaaagcttttattttcaacatgtaaaaagtgagaaattacttcaaaatatatgcaatttaaattttttagaagattgtgttgattttaccaagacaggagatcttaaactgtagaaacttttatagtttttgagatcgggtctttgttttttttcacattaatattctttgatttcaaatataacatagataagtactcttagaattttgagttaagtatatgctattttaatgtgctaatcctacaaactaggctttctgtgtgactagactgagatgttgagtttgattcacaaaaagcttagaatggttctttgttgaaaagcttttcgagtcactatttggggcatgttagtgccatttgcaaaggtgaaggttttctttttttttttttttttaaccatagagcttttgataaggttaggaaaaggaagttgtcatctcttcttattactctaatcctgctggaagctagcttcttagggactaaaaccagaacaaatggaaggtccaaaaatgctaataagaaattagtattttcacataataccaaactgtaaaaaccaggccagcaagtgtcaccaggttcctgaaacaaaccataaatacattatttaacttagtattgttaaattgtataaatatgtgggtaactgtgacagaaattatgcacttataaaaagcagtaagttacatagtgaatgctgttttctgtggataagaagctggaattgtgatttcatttaatcgaaagacgcttactttgaggaaacttgtttgaaatgcaaacgcgatttctctgtggagccttcacggaattgctgcttttcactatgattattgctgcataacaggccacttctgtgtgtaggaagtgcgtgtgcaagtccaaagggaattgaggcctgaatgggtgggttatcccaattaacaaatacaaagttttcagtacattttgttttaagccaggtgcacaagttagagttgctttttgggactggcatttatgtatgtgagaatcaaacctgatatcactcttggcagcctgactaaagccatttaaaaataaaaa

SEQ ID NO: 383037 - DNA, 2359 bp, Homo sapiens
cccgtctctatggcggccccaacggccgtccaggacgtggagcgaaatgagctcgggcgctgacggcggcggtggcgctgcggtggcggcgcggtcggacaagggcagtcccggggaggacggtttcgtcccgtcggcgctggggacccgcgagcattgggatgctgtctatgagagagaactgcaaactttccgagaatatggagatacaggtgaaatctggtttggagaagagagtatgaatcgactaataaggtggatgcagaaacacaagattccactggatgcttcagtgcttgatattggaactggaaatggtgttttcctggttgaacttgcaaaatttggtttctctaatattactggaattgattactctccttctgcaattcagctttctggaagtattatagaaaaagaaggtttatctaacattaagttaaaggtagaagactttttgaatctctccacacagctgtctggatttcatatttgtattgacaaagggacttttgatgccataagccttaatcctgacaatgcaattgagaagaggaagcaatatgtgaaatctctctccagggtgttgaaagtaaaaggcttttttctaataacgtcatgtaattggaccaaggaagagttgctaaatgaattcagtgaaggttggagtacagtggcaggattttggctcactgcagccttgacttcctgggctcaagcgatcttttccacttcagcctcccgagtaggtggaactacaggcacacatcatcatgcctggataatttttgtatttttagcagagacgaggttttgccatgttgtccaggctggtctggaactcctgggctcaagtgattctcccacctggcctcccaaagtgctgggattataccatgccaggccctcgttggcattttagatttgaacttctcgaagagctaccaacacccaagttcagctttggaggcagatctggaaacagtgtagcagcattggttttccaaaaaatgtgagactttttcttggacgaattcagggagttgaccacatttggccatttcccagaagggccccaccccaagggtgagtggccaatggggagctgtttctgctgacatcaattccccaggaggtactcaccccaagtctgcccaagtgaagatggctgatacccaccctgggatggagcccagcgcctgaggcccttatcatggtgatggtcctaagtgaaagcctcagcacccggggagctgactccattgcatgtgggaccttcagccgtgaactgcacacgccaaagaagatgagtcaaggacctacacttttctcttgtggaattatggaaaatgacagatggcgagacctggacaggaaatgccctcttcagattgaccaaccgagcaccagcatctgggaatgcctgcctgaaaaggacagctcactatggcaccgggaggcagtgaccgcctgcgctgtgaccagtctgatcaaagacctcagcatcagcgaccacaacgggaacccctcagcaccccctagcaagcgccagtgccgctcactgtccttctccgatgagatgtccagttgccggacatcatggaggcccttgggctccaaagtctggactcccgtggaaaagagacgctgctacagcgggggcagcgtccagcgctattccaacggcttcagcaccatgcagaggagttccagcttcagcctcccttcccgggccaacgtgctctcctcaccctgcgaccaggcaggactccaccaccgatttggagggcagccctgccaaggggtgccaggctcagccccgtgtggacaggcaggtgacacctggagccctgacctgcaccccgtgggaggaggccggctggacctgcagcggtccctctcttgctcacatgagcagttttcctttgtggaatactgtcctccctcagccaacagcacacctgcctcaacaccagagctggcgagacgctccagcggcctttcccgcagccgctcccagccgtgtgtccttaacgacaagaaggtcggtgttaaaaggcggcgccctgaagaagtgcaagagcagaggccttctctagaccttgccaagatggcacagatagccccatgaggaaggcacatcgttatccattttacaggcggtggctgagtcttagaggaagcagtccagtgaaaccagaactcaagccacatatataatttaaaattcctagtagccagttattaagagaagaaagtgaaatgactttgaatagtatatttaacccagtatttccaaaatactatcatttccacatgtcatcgatgtaagtaaatcatgaatgcactattttatgtt

SEQ ID NO: 383038 - DNA, 216 bp, Homo sapiens
gagcttatccaggggtggcggaggcctcctgtgaggcaggggaatctcttgaacccgggaggcggaggttgcagtgagccaagagcgtgacagaaaattccgcgaagaggaactgcgccatcaggaacaagggagaaaattcctcgaggaggaacagcggctgcgccgccaggaacgggagagaaaattccttaaggaggaacagcagctgcgctg

SEQ ID NO: 383039 - DNA, 602 bp, Homo sapiens
gaggaggaagagcttcagcgccagaaaaggaagcagcgataccgggatgaggatcagcgcagtgatctgaaatggcagtgggaaccagaaaaagaaaatgcagttcgtgataacaaggtttactgcaaaggcagagagaatgaacagttccggcagttggaagattcccagctgcgcgacagacaatcccagcaagatctgcagcacctgctgggtgaacagcaagagcgagatcgtgagcaagagaggaggcgctggcagcagcgcgacaggcatttcccagaggaagaacagctggagcgagaagagcaaaaggaagccaaaaggcgcgacaggaagtcccaagaggaaaagcagttgctgagagaggaaagagaagagaagagacgccgtcaagagacagacagaaaattccgcgaggaggaacagctgctccaggaaagggaggaacagccgctgcgccgccaagagcgtgacagaaaattccgcgaagaggaactgcgccatcaggaacaagggagaaaattcctcgaggaggaacagcggctgcgccgccaggaacgggagagaaaattccttaaggaggaacagcagctgcgctg

SEQ ID NO: 383040 - DNA, 234 bp, Homo sapiens
catgagccaccatgcccagcctaaaatcatttttaagttgatcttatcttatagtttgttccatttccccgatgtcattttatgtgacacttgtcaaggcttcatgccttagagacttaattcacataaaaagttttggtttagcatttcagaccacttaaaggtcaatagcagccagtataatctcttcccttcttctactcttagaaacaggtatgagttttgtttacagtc

SEQ ID NO: 383041 - DNA, 426 bp, Homo sapiens
tcctgcaagtgcagatcatgatccctccagtagactgcacagcctcctcactaagttaacctcattgccccaagcagcataatgcattctgaacacgttactttggctggtaacaaaacagtcactcggctttcaagagtctcggctctgccagtgaaacaagctcagccgcttcatattccttcatattccttattcatacacgataaaaagacagtgctgaccaataaccacagcacagcgacagggaagggggaaaagaagagaaacctgtgcggtcttaataggcaccaggactgttctctgacctctccactggccactcagacacacactttccacacgaagcctccatgtgcaactgtacgacgtcagtgggaggcaggattgctggtatcagctaataaaaatcccagtatactgtag

SEQ ID NO: 383042 - DNA, 405 bp, Homo sapiens
taccaaaacgatgaggtcatgattatgtattttcattgacaaagcatgtgttgctacccatgtccaccactgagtgagcaacctgcccatacctgatgagctcttcccaaagcaaaccaacacagcccagatgcagccagctgcctcctactctttcctcatctcacgcaaatagataacattcatctctggctgttatagactgaattttgtccccctccaattcatatgttaaagcccctagtacttcagaatgtgagtgtatttggagatagggcctttaaagatgtgattacgttaaaatgaggttggcagggtgggctgcaattcaatctgtcttgtggcccttataaggagaggagatcaggacacaaacatgggtgcacaaggaggaaggaccgtgtg

SEQ ID NO: 383043 - DNA, 705 bp, Homo sapiens
acctcagatgtcgtacctcagatcggaggggagttggttattcatgaaagtgatgatgtttatccaatgtaccacctagagtgcccttggtgctctgctgtcctggagtgtaaccctgttgtggagaatgatacacaggacaaacttaccctgatgttgttaaatatatgttagatgaccagttgctttgatttctttgctcaataaacattggattacagctggtttgctgtgtggcatgcctacatggagggaacacactgagccaatgatttcatcatctgggtccctttggtttatatcagtttccaacatgacttgtttgtggggcttgtgggaggggcacatacatcggccccaggattctaacatctcctggtctctgaggttataattttcacttaacattgtcgagttggcattttggttttagtccaatggttcagttctttgaaactgactccagagatggctctgttcattaatagattgttttgttgaccctgtgaggattagtctgtggatcttggaaattcggcaggtgactacaattctagaaggcctcttgtgagatataaggtgttttccttaagtgacatggccctgcgttgcaaagctgagaagtaatatgaaggagcgttttgtaagtttgaatctctataatcaaaaaccagactaatgacacattcgcttttagaacttaaa

SEQ ID NO: 383044 - DNA, 3542 bp, Homo sapiens
aggcaattaaagtcaagagctaaggagggagggagagggtttagaaataccagcataataagtagtatgactgggtgctctgtaaattaactcaattagacaaagcctgacttaacgggggaagatggtgagaagcgctaccctcattaaatttggttgttagaggcgcttctaaggaaattaagtctgttagttgtttgaatcacataaaattgtgtgtgcacgttcatgtacacatgtgcacacatgtaacctctgtgattcttgtgggtatttttttaagaagaaaggaatagaaagcaaagaaaaataaaaaatactgaaaagaaaagactgaaagagtagaagataaggagaaaagtacgacagagacaaggaaagtaagagagagagagagctctcccaattataaagccatgagccccctttggtgggggtttctgctcagttgcttgggctgcaaaatcctgccaggagcccagggtcagttcccccgagtctgcatgacggtggacagcctagtgaacaaggagtgctgcccacgcctgggtgcagagtcggccaatgtctgtggctctcagcaaggccgggggcagtgcacagaggtgcgagccgacacaaggccctggagtggtccctacatcctacgaaaccaggatgaccgtgagctgtggccaagaaaattcttccaccggacctgcaagtgcacaggaaactttgccggctataattgtggagactgcaagtttggctggaccggtcccaactgcgagcggaagaaaccaccagtgattcggcagaacatccattccttgagtcctcaggaaagagagcagttcttgggcgccttagatctcgcgaagaagagagtacaccccgactacgtgatcaccacacaacactggctgggcctgcttgggcccaatggaacccagccgcagtttgccaactgcagtgtttatgatttttttgtgtggctccattattattctgttagagatacattattaggtgggttttttccttggctgaaggtatattattacaggtttgtgattgggttgagggtatggcagtgggaagtaatttcatgcaagttaattaagagagcaaccacaaggcagccttaggtttatgaaagtcgtagaattatcaaataccgcctggagttagaaggaagcagtttcttcctgtgcattggatgcagacactttaaatgttctctcctctaccgtatgttcttggttcaaagtgtaaacttttctctgtgaagctgttaatcatcaaagatgtgagttggtgaggtggaggcgaattccttttgatttcagaagaaaatatttgcgaatctggccatggaagccctctctgaccttttctccaaattagaggaattaactgaacatgtgctaaggcacatgaagcttctttgtgcggaattagagtgctcatgttgggagtgggcatcttgttaaactcacaggatagatcaactttggatggattttagacagtctatcacatgatagactttcagataatcatttatggtactcctgcatggtccggaatccccaggtttcttggagctttattgtcaaggaaaagtacaagcttagccacagcaatgtagagtttctgctgcttagctctttgcaacacagtcatgttggatgcttgagaaattggtgacctgcccttccaagtcttaaaaattgggggctgggtaggacttggaatgagggggttgtctgttacaaacttcatgtatcaagtaggttcagctttgtccttatttttcagtcaaaggaaagccatagacaccaatgtattccaggagggcttgactccatcctagattcttcccatagcagttcttgaatgcatggctgcacgtgcacctctccccatttttggggtccttcattggggtcaggatgaatgaagacatcaagctcactttgaagagcaagattctgatttggacaggttcatccttctgctcatcacttgttccccttcaattgataccctctcgttgttgggttctgagaatttgaaaccttgctctgaattgaacatgaaaaagggccgtgtagccaacatcagggacagcagtgcttttctcagtgtgagtcttttaaaacttgccttacaggtaagcatctgtctgtctttatcgatagataaggaggctcttttggctataaacctttatagttttcctgttatcactctgaggaattattgctttatgagagagtactctctcaagaggaaaagaaagtcctagtttctggtcatagctacgaattaaatttatattcacgtctgttcagctctctgaagttgttataggtattttggacaagaactaaagttagctaaagtttccacataaccatcaaagctgttatgaaaaagggaagaaggatggaccaggcagtaaggaggtcattaaatcgtccagagcttttcactaaaattggcagttccagtgtccagcctaaatggcttgaatgtatttttctctcttctggtctcagcgaacatgcttgtcagctagtagttataacagattgatgggtgaggcaaaatacgcgaaagttctttttggttacataaatactgcattaggactaagtgcagttgaagttacaatattattaattaatccctcccttttaaatttatatctttgtgaagcataggttagcaaatgcctttaaaaaatatatttcctttaggtcttaatgatctattcttttggatagtctatttcacctgaatggattgttgcttacaaattaaatatgtatcaggggctcccaatcctgaaagtcacctgaatttcctggatctctgctagaaatcaaccttttaagagataaaggagggtttatcctaaaagtactagttacttctgaaattcatgtcattactattgcttttggagatataaataacaacaaaacttttttttcttactactataaaacatcatggacttattggctctatagatacagcccaggtaagatttaacattttaaaaaattctattctgtcatctctaatatgtttcccaattgtttcaggaccaggacgcccctacagggccatagatttctcacatcaaggacctgcatttgttacctggcaccggtaccatttgttgtgtctggaaagagatctccagcgactcattggcaatgagtcttttgctttgccctactggaactttgccactgggaggaacgagtgtgatgtgtgtacagaccagctgtttggggcagcgagaccagacgatccgactctgattagtcggaactcaagattctccagctgggaaactgtctgtgataggtaatggctcctgtacctgcaatggcatccagagattgtcttttctgatgtctgagacatggaggagaagtcactttatagtgctgtttcttatgcatgtggtgtcctatttacatgtttctaaaaacagttttcctctgggaggtgggatttcaaaaattcaaagctctttaatt

SEQ ID NO: 383045 - DNA, 5766 bp, Homo sapiens
  misc_feature (5766)..(5766): n is a, c, g, or t
aggcaattaaagtcaagagctaaggagggagggagagggtttagaaataccagcataataagtagtatgactgggtgctctgtaaattaactcaattagacaaagcctgacttaacgggggaagatggtgagaagcgctaccctcattaaatttggttgttagaggcgcttctaaggaaattaagtctgttagttgtttgaatcacataaaattgtgtgtgcacgttcatgtacacatgtgcacacatgtaacctctgtgattcttgtgggtatttttttaagaagaaaggaatagaaagcaaagaaaaataaaaaatactgaaaagaaaagactgaaagagtagaagataaggagaaaagtacgacagagacaaggaaagtaagagagagagagagctctcccaattataaagccatgagccccctttggtgggggtttctgctcagttgcttgggctgcaaaatcctgccaggagcccagggtcagttcccccgagtctgcatgacggtggacagcctagtgaacaaggagtgctgcccacgcctgggtgcagagtcggccaatgtctgtggctctcagcaaggccgggggcagtgcacagaggtgcgagccgacacaaggccctggagtggtccctacatcctacgaaaccaggatgaccgtgagctgtggccaagaaaattcttccaccggacctgcaagtgcacaggaaactttgccggctataattgtggagactgcaagtttggctggaccggtcccaactgcgagcggaagaaaccaccagtgattcggcagaacatccattccttgagtcctcaggaaagagagcagttcttgggcgccttagatctcgcgaagaagagagtacaccccgactacgtgatcaccacacaacactggctgggcctgcttgggcccaatggaacccagccgcagtttgccaactgcagtgtttatgatttttttgtgtggctccattattattctgttagagatacattattaggaccaggacgcccctacagggccatagatttctcacatcaaggacctgcatttgttacctggcaccggtaccatttgttgtgtctggaaagagatctccagcgactcattggcaatgagtcttttgctttgccctactggaactttgccactgggaggaacgagtgtgatgtgtgtacagaccagctgtttggggcagcgagaccagacgatccgactctgattagtcggaactcaagattctccagctgggaaactgtctgtgatagcttggatgactacaaccacctggtcaccttgtgcaatggaacctatgaaggtttgctgagaagaaatcaaatgggaagaaacagcatgaaattgccaaccttaaaagacatacgagattgcctgtctctccagaagtttgacaatcctcccttcttccagaactctaccttcagtttcaggaatgctttggaagggtttgataaagcagatgggactctggattctcaagtgatgagccttcataatttggttcattccttcctgaacgggacaaacgctttgccacattcagccgccaatgatcccatttttgtggttcttcattcctttactgatgccatctttgatgagtggatgaaaagatttaatcctcctgcagatgcctggcctcaggagctggcccctattggtcacaatcggatgtacaacatggttcctttcttccctccagtgactaatgaagaactctttttaacctcagaccaacttggctacagctatgccatcgatctgccagtttcagttgaagaaactccaggttggcccacaactctcttagtagtcatgggaacactggtggctttggttggtctttttgtgctgttggcttttcttcaatatagaagacttcgaaaaggatatacacccctaatggagacacatttaagcagcaagagatacacagaagaagcctagggtgctcatgccttacctaagagaagaggctggccaagccacagttctgacgctgacaataaaggaactaatcctcactgttccttcttgagttgaagatctttgacataggttcttctatagtgatgatgatctcattcagaagatgcttagctgtagtttccgctttgcttgcttgtttaacaaacccaactaaagtgcttgaggctacctctaccttcaaataaagatagacctgacaatttgtgatatctaataataaccccccccccaatattgattaagcctcctccttttctgaaagcatttaaaaaaaacaaaaaaaatcccaaaacattgatccaggggagtcatttaaatttgcaggtcagtgcaatgtgagacctggccaagaccatacatcaatctttcttagccccagtgtctttattggtaatgccatggaggtgggagttggtaggtgctagatgagtctccaagatcccttttagctataaacatctctgcttctaggcaccctcctgattatcttccttgggcttctttttcttcttttctctatatttttcctctccagcttagaagatgagaataagccttgttttctttacaggatggaaaatgactaaatgaaggatcaattccactctattgtgtaaactagattttacggattttacttaaaatctgcagttttaaacagtagacctatattacaggattcaatagctggatacacattgattctatagtgataaatagagaagataataaaattatagagtttcctggttagttgatatgctactgtaaacctattaacaaatacagaattactctttccaaggaaggctgactgaaggctggtgaggctgtaaacctgaacatgagacaatttgacttgagtcccattactctgaggtctctttggctgatcctctaccaatttctttactaggtagcctcagatgaaaaattattcccacataatgcactgggcttatttttaagcattgatgttagattgattaatgttgccgaatactcacagttacttatgaatgctgatcaattaagtcttatcatttgaaagcaaaccatctgtacaaaacatgacaattcagaattaagtggttatattctgctatgcaatcatcagatcatgaggaataagaatgagacaatctttactacgatgttcagacttatcatgatggaccccacttcagagaagttaatggctcttgagatttccaggcaaatttcatctgctcatatctggtttctgtgcatcaggagtgagactgaagttctagggcgtggcttgtctgtcgaggcccctctctactggaatgaatgaatgtaaagaatgggtgttaagaggtccctggagctgccttcaacataaggggtcctagagggtgcaagactcatcaagaaccagtttaccccatgcaataggactgctaaagccagagaaatggacaaagcccagttggaactgaatttgaatctcataaagctacaggtgcatctgagagcaggctcagtggtgaagatcaagatagcccggtaaagccctgcttgggctttttagcctcagccacatggatacctctcagttcctgccattaacaatattcatggaaaatacagcactgtgtctttcacatgctccactctggaaggtttatgctctgagctcaggatagttggggaacacatttttaaatcttggttttaaacaaaaagagaaatttattaaaatggagatataattgtgcatggtacatatatttctgaaaagttatgtataaatcaattatgttaaaagcgccagaagttactttttataagtgaactattacgaataatttcataaagcaaataaccacctctagcttatctgtcaggtatatcagaattctcatatatcatagtctcataagacttggttaaagcagatctatcttaggtaggaaaaaatagtaatcgattatacttagctgcttttatctgtagtgtgggtgactttttataactattatgttttataatgtcttcctgagagaatttcctaattttgtagttcatataagagaaatacaattttctagcattttctgaccttacaataaatcaattatgaatgcattttaacaaatattaaggtaggataaaccaacagaataaaaagttggtatttacttacattgaatatcatgcaaataaactcagaaaatgtcaccaaatactgtgggctatatttctcaatgatagggggaagaattcaaccttggagaaaatgaccagatcactttactgcttatatcttcagtattagaaaaactgcatgtatgattttaatagaaatgctttttataaagctaacattcagaaatgggataaaatgcaataacatctttcctttgtgcattaaattcccttctaattctaaaattgacatttgtatcttgcttaggatttaacattgttaattataatacttttaatgactagttttaatctcattattaagaagtagaaaacttactaaaaaggaaactaaaaataaatgttgttttgcagataaaaaaaaaacaaaacaaaacaaaaaaaaaaaaaacaaaaagaaaaacaacacaacaaacaaaacaaaagaagagagaagagagaaacacacaacaacaaaaagaacaaagaagaacaacacacacacaacagaaaagaaaagagaaaaacgaagagagagagagggagcacaacagagacgacaacccacagcaaggagaacacgatcagaaaaaaaacaacaacagaagaagaagggaaagatagcaaagagcaacggaaatacgagcagaagacggaaaaaaagaagaagaacagcggcggagaagcagacaaacacaaacaaacacagaagaggagcagacaggacagcaaaaattagcagcaaatagaacccaaacaacagcgcgagagcaggagaagcaaagcacaccataacaagacggagaaagaaaagctgaaaagaaaaaacgaagagaaaaaacaaaaagaaaaaaaaacaacaaagaaaacaacggagatacaaagcagagagaggaagaggacacgaagaaaacatacacgaagacaagaagaggaaaacaaggaaaacaaaccatccgagcaaatcaaaaatgcgacagcccacgaagaaaaaaaaaagacaagaatcacagccaacagcacgagcaagacaatagaaaagacgcaaaaacataacagacaaggcaagaaaagacaagagatagacaggcgaggacaaaaaaaacgaagacagaaaaacaaaaaaaaaaaacagagaacaaacgaaaagagaaagagaagaaaggagaaggcacgataaacaagaaaacaacaaagaagaaaaagcgagaaaagacagagcagaagagagagcgaaaaaaaggagcgaggagaaatacgaggaaggaaggaggaggaaagaggagaaagaaagcaaagagaaacaggcagcggcagaggaaaacggaggcggaggaacacggagagagaaagacgaaaccagcgagaccagaagcaaacaacaagaaggagagagaagaacagagaagaaagagcacgacggaaagcagaagaggggaacaggcaaaaaaaaagacgagaaagagagagagaaagcaagaggaactgagagggaaaaggagaagcgaagagaggacacaagagagctaagaagaaaagaataaaagaggaaaagaaacgggaactgaacaaccgn

SEQ ID NO: 383046 - DNA, 5714 bp, Homo sapiens
aggcaattaaagtcaagagctaaggagggagggagagggtttagaaataccagcataataagtagtatgactgggtgctctgtaaattaactcaattagacaaagcctgacttaacgggggaagatggtgagaagcgctaccctcattaaatttggttgttagaggcgcttctaaggaaattaagtctgttagttgtttgaatcacataaaattgtgtgtgcacgttcatgtacacatgtgcacacatgtaacctctgtgattcttgtgggtatttttttaagaagaaaggaatagaaagcaaagaaaaataaaaaatactgaaaagaaaagactgaaagagtagaagataaggagaaaagtacgacagagacaaggaaagtaagagagagagagagctctcccaattataaagccatgagccccctttggtgggggtttctgctcagttgcttgggctgcaaaatcctgccaggagcccagggtcagttcccccgagtctgcatgacggtggacagcctagtgaacaaggagtgctgcccacgcctgggtgcagagtcggccaatgtctgtggctctcagcaaggccgggggcagtgcacagaggtgcgagccgacacaaggccctggagtggtccctacatcctacgaaaccaggatgaccgtgagctgtggccaagaaaattcttccaccggacctgcaagtgcacaggaaactttgccggctataattgtggagactgcaagtttggctggaccggtcccaactgcgagcggaagaaaccaccagtgattcggcagaacatccattccttgagtcctcaggaaagagagcagttcttgggcgccttagatctcgcgaagaagagagtacaccccgactacgtgatcaccacacaacactggctgggcctgcttgggcccaatggaacccagccgcagtttgccaactgcagtgtttatgatttttttgtgtggctccattattattctgttagagatacattattaggtgggttttttccttggctgaaggtatattattacaggtttgtgattgggttgagggtatggcagtgggaagtaatttcatgcaagttaattaagagagcaaccacaaggcagccttaggtttatgaaagtcgtagaattatcaaataccgcctggagttagaaggaagcagtttcttcctgtgcattggatgcagacactttaaatgttctctcctctaccgtatgttcttggttcaaagtgtaaacttttctctgtgaagctgttaatcatcaaagatgtgagttggtgaggtggaggcgaattccttttgatttcagaagaaaatatttgcgaatctggccatggaagccctctctgaccttttctccaaattagaggaattaactgaacatgtgctaaggcacatgaagcttctttgtgcggaattagagtgctcatgttgggagtgggcatcttgttaaactcacaggatagatcaactttggatggattttagacagtctatcacatgatagactttcagataatcatttatggtactcctgcatggtccggaatccccaggtttcttggagctttattgtcaaggaaaagtacaagcttagccacagcaatgtagagtttctgctgcttagctctttgcaacacagtcatgttggatgcttgagaaattggtgacctgcccttccaagtcttaaaaattgggggctgggtaggacttggaatgagggggttgtctgttacaaacttcatgtatcaagtaggttcagctttgtccttatttttcagtcaaaggaaagccatagacaccaatgtattccaggagggcttgactccatcctagattcttcccatagcagttcttgaatgcatggctgcacgtgcacctctccccatttttggggtccttcattggggtcaggatgaatgaagacatcaagctcactttgaagagcaagattctgatttggacaggttcatccttctgctcatcacttgttccccttcaattgataccctctcgttgttgggttctgagaatttgaaaccttgctctgaattgaacatgaaaaagggccgtgtagccaacatcagggacagcagtgcttttctcagtgtgagtcttttaaaacttgccttacaggaccaggacgcccctacagggccatagatttctcacatcaaggacctgcatttgttacctggcaccggtaccatttgttgtgtctggaaagagatctccagcgactcattggcaatgagtcttttgctttgccctactggaactttgccactgggaggaacgagtgtgatgtgtgtacagaccagctgtttggggcagcgagaccagacgatccgactctgattagtcggaactcaagattctccagctgggaaactgtctgtgatagcttggatgactacaaccacctggtcaccttgtgcaatggaacctatgaaggtttgctgagaagaaatcaaatgggaagaaacagcatgaaattgccaaccttaaaagacatacgagattgcctgtctctccagaagtttgacaatcctcccttcttccagaactctaccttcagtttcaggaatgctttggaagggtttgataaagcagatgggactctggattctcaagtgatgagccttcataatttggttcattccttcctgaacgggacaaacgctttgccacattcagccgccaatgatcccatttttgtggttcttcattcctttactgatgccatctttgatgagtggatgaaaagatttaatcctcctgcagatgcctggcctcaggagctggcccctattggtcacaatcggatgtacaacatggttcctttcttccctccagtgactaatgaagaactctttttaacctcagaccaacttggctacagctatgccatcgatctgccagtttcagttgaagaaactccaggttggcccacaactctcttagtagtcatgggaacactggtggctttggttggtctttttgtgctgttggcttttcttcaatatagaagacttcgaaaaggatatacacccctaatggagacacatttaagcagcaagagatacacagaagaagcctagggtgctcatgccttacctaagagaagaggctggccaagccacagttctgacgctgacaataaaggaactaatcctcactgttccttcttgagttgaagatctttgacataggttcttctatagtgatgatgatctcattcagaagatgcttagctgtagtttccgctttgcttgcttgtttaacaaacccaactaaagtgcttgaggctacctctaccttcaaataaagatagacctgacaatttgtgatatctaataataaccccccccccaatattgattaagcctcctccttttctgaaagcatttaaaaaaaacaaaaaaaatcccaaaacattgatccaggggagtcatttaaatttgcaggtcagtgcaatgtgagacctggccaagaccatacatcaatctttcttagccccagtgtctttattggtaatgccatggaggtgggagttggtaggtgctagatgagtctccaagatcccttttagctataaacatctctgcttctaggcaccctcctgattatcttccttgggcttctttttcttcttttctctatatttttcctctccagcttagaagatgagaataagccttgttttctttacaggatggaaaatgactaaatgaaggatcaattccactctattgtgtaaactagattttacggattttacttaaaatctgcagttttaaacagtagacctatattacaggattcaatagctggatacacattgattctatagtgataaatagagaagataataaaattatagagtttcctggttagttgatatgctactgtaaacctattaacaaatacagaattactctttccaaggaaggctgactgaaggctggtgaggctgtaaacctgaacatgagacaatttgacttgagtcccattactctgaggtctctttggctgatcctctaccaatttctttactaggtagcctcagatgaaaaattattcccacataatgcactgggcttatttttaagcattgatgttagattgattaatgttgccgaatactcacagttacttatgaatgctgatcaattaagtcttatcatttgaaagcaaaccatctgtacaaaacatgacaattcagaattaagtggttatattctgctatgcaatcatcagatcatgaggaataagaatgagacaatctttactacgatgttcagacttatcatgatggaccccacttcagagaagttaatggctcttgagatttccaggcaaatttcatctgctcatatctggtttctgtgcatcaggagtgagactgaagttctagggcgtggcttgtctgtcgaggcccctctctactggaatgaatgaatgtaaagaatgggtgttaagaggtccctggagctgccttcaacataaggggtcctagagggtgcaagactcatcaagaaccagtttaccccatgcaataggactgctaaagccagagaaatggacaaagcccagttggaactgaatttgaatctcataaagctacaggtgcatctgagagcaggctcagtggtgaagatcaagatagcccggtaaagccctgcttgggctttttagcctcagccacatggatacctctcagttcctgccattaacaatattcatggaaaatacagcactgtgtctttcacatgctccactctggaaggtttatgctctgagctcaggatagttggggaacacatttttaaatcttggttttaaacaaaaagagaaatttattaaaatggagatataattgtgcatggtacatatatttctgaaaagttatgtataaatcaattatgttaaaagcgccagaagttactttttataagtgaactattacgaataatttcataaagcaaataaccacctctagcttatctgtcaggtatatcagaattctcatatatcatagtctcataagacttggttaaagcagatctatcttaggtaggaaaaaatagtaatcgattatacttagctgcttttatctgtagtgtgggtgactttttataactattatgttttataatgtcttcctgagagaatttcctaattttgtagttcatataagagaaatacaattttctagcattttctgaccttacaataaatcaattatgaatgcattttaacaaatattaaggtaggataaaccaacagaataaaaagttggtatttacttacattgaatatcatgcaaataaactcagaaaatgtcaccaaatactgtgggctatatttctcaatgatagggggaagaattcaaccttggagaaaatgaccagatcactttactgcttatatcttcagtattagaaaaactgcatgtatgattttaatagaaatgctttttataaagctaacattcagaaatgggataaaatgcaataacatctttcctttgtgcattaaattcccttctaattctaaaattgacatttgtatcttgcttaggatttaacattgttaattataatacttttaatgactagttttaatctcattattaagaagtagaaaacttactaaaaaggaaactaaaaataaatgttgttttgcagat

SEQ ID NO: 383047 - DNA, 3139 bp, Homo sapiens
aggcaattaaagtcaagagctaaggagggagggagagggtttagaaataccagcataataagtagtatgactgggtgctctgtaaattaactcaattagacaaagcctgacttaacgggggaagatggtgagaagcgctaccctcattaaatttggttgttagaggcgcttctaaggaaattaagtctgttagttgtttgaatcacataaaattgtgtgtgcacgttcatgtacacatgtgcacacatgtaacctctgtgattcttgtgggtatttttttaagaagaaaggaatagaaagcaaagaaaaataaaaaatactgaaaagaaaagactgaaagagtagaagataaggagaaaagtacgacagagacaaggaaagtaagagagagagagagctctcccaattataaagccatgagccccctttggtgggggtttctgctcagttgcttgggctgcaaaatcctgccaggagcccagggtcagttcccccgagtctgcatgacggtggacagcctagtgaacaaggagtgctgcccacgcctgggtgcagagtcggccaatgtctgtggctctcagcaaggccgggggcagtgcacagaggtgcgagccgacacaaggccctggagtggtccctacatcctacgaaaccaggatgaccgtgagctgtggccaagaaaattcttccaccggacctgcaagtgcacaggaaactttgccggctataattgtggagactgcaagtttggctggaccggtcccaactgcgagcggaagaaaccaccagtgattcggcagaacatccattccttgagtcctcaggaaagagagcagttcttgggcgccttagatctcgcgaagaagagagtacaccccgactacgtgatcaccacacaacactggctgggcctgcttgggcccaatggaacccagccgcagtttgccaactgcagtgtttatgatttttttgtgtggctccattattattctgttagagatacattattaggaccaggacgcccctacagggccatagatttctcacatcaaggacctgcatttgttacctggcaccggtaccatttgttgtgtctggaaagagatctccagcgactcattggcaatgagtcttttgctttgccctactggaactttgccactgggaggaacgagtgtgatgtgtgtacagaccagctgtttggggcagcgagaccagacgatccgactctgattagtcggaactcaagattctccagctgggaaactgtctgtgatagcttggatgactacaaccacctggtcaccttgtgcaatggaacctatgaaggtttgctgagaagaaatcaaatgggaagaaacagcatgaaattgccaaccttaaaagacatacgagattgcctgtctctccagaagtttgacaatcctcccttcttccagaactctaccttcagtttcaggaatgctttggaagggtttgataaagcagatgggactctggattctcaagtgatgagccttcataatttggttcattccttcctgaacgggacaaacgctttgccacattcagccgccaatgatcccatttttgtggttcttcattcctttactgatgccatctttgatgagtggatgaaaagatttaatcctcctgcagatgcctggcctcaggagctggcccctattggtcacaatcggatgtacaacatggttcctttcttccctccagtgactaatgaagaactctttttaacctcagaccaacttggctacagctatgccatcgatctgccagatttccaggcaaatttcatctgctcatatctggtttctgtgcatcaggagtgagactgaagttctagggcgtggcttgtctgtcgaggcccctctctactggaatgaatgaatgtaaagaatgggtgttaagaggtccctggagctgccttcaacataaggggtcctagagggtgcaagactcatcaagaaccagtttaccccatgcaataggactgctaaagccagagaaatggacaaagcccagttggaactgaatttgaatctcataaagctacaggtgcatctgagagcaggctcagtggtgaagatcaagatagcccggtaaagccctgcttgggctttttagcctcagccacatggatacctctcagttcctgccattaacaatattcatggaaaatacagcactgtgtctttcacatgctccactctggaaggtttatgctctgagctcaggatagttggggaacacatttttaaatcttggttttaaacaaaaagagaaatttattaaaatggagatataattgtgcatggtacatatatttctgaaaagttatgtataaatcaattatgttaaaagcgccagaagttactttttataagtgaactattacgaataatttcataaagcaaataaccacctctagcttatctgtcaggtatatcagaattctcatatatcatagtctcataagacttggttaaagcagatctatcttaggtaggaaaaaatagtaatcgattatacttagctgcttttatctgtagtgtgggtgactttttataactattatgttttataatgtcttcctgagagaatttcctaattttgtagttcatataagagaaatacaattttctagcattttctgaccttacaataaatcaattatgaatgcattttaacaaatattaaggtaggataaaccaacagaataaaaagttggtatttacttacattgaatatcatgcaaataaactcagaaaatgtcaccaaatactgtgggctatatttctcaatgatagggggaagaattcaaccttggagaaaatgaccagatcactttactgcttatatcttcagtattagaaaaactgcatgtatgattttaatagaaatgctttttataaagctaacattcagaaatgggataaaatgcaataacatctttcctttgtgcattaaattcccttctaattctaaaattgacatttgtatcttgcttaggatttaacattgttaattataatacttttaatgactagttttaatctcattattaagaagtagaaaacttactaaaaaggaaactaaaaataaatgttgttttgcagat

SEQ ID NO: 383048 - DNA, 1286 bp, Homo sapiens
  misc_feature (9)..(9): n is a, c, g, or t
  misc_feature (24)..(25): n is a, c, g, or t
aagcagtgntatcaacgcagagtnnccattacggccggtctactggaatgaatgaatgtaaagaatgggtgttaagaggtccctggagctgccttcaacataaggggtcctagagggtgcaagactcatcaagaaccagtttaccccatgcaataggactgctaaagccagagaaatggacaaagcccagttggaactgaatttgaatctcataaagctacaggtgcatctgagagcaggctcagtggtgaagatcaagatagcccggtaaagccctgcttgggctttttagcctcagccacatggatacctctcagttcctgccattaacaatattcatggaaaatacagcactgtgtctttcacatgctccactctggaaggtttatgctctgagctcaggatagttggggaacacatttttaaatcttggttttaaacaaaaagagaaatttattaaaatggagatataattgtgcatggtacatatatttctgaaaagttatgtataaatcaattatgttaaaagcgccagaagttactttttataagtgaactattacgaataatttcataaagcaaataaccacctctagcttatctgtcaggtatatcagaattctcatatatcatagtctcataagacttggttaaagcagatctatcttaggtaggaaaaaatagtaatcgattatacttagctgcttttatctgtagtgtgggtgactttttataactattatgttttataatgtcttcctgagagaatttcctaattttgtagttcatataagagaaatacaattttctagcattttctgaccttacaataaatcaattatgaatgcattttaacaaatattaaggtaggataaaccaacagaataaaaagttggtatttacttacattgaatatcatgcaaataaactcagaaaatgtcaccaaatactgtgggctatatttctcaatgatagggggaagaattcaaccttggagaaaatgaccagatcactttactgcttatatcttcagtattagaaaaactgcatgtatgattttaatagaaatgctttttataaagctaacattcagaaatgggataaaatgcaataacatctttcctttgtgcattaaattcccttctaattctaaaattgacatttgtatcttgcttaggatttaacattgttaattataatacttttaatgactagttttaatctcattattaagaagtagaaaacttactaaaaaggaaactaaaaataaatgttgttttgcagat

SEQ ID NO: 383049 - DNA, 1183 bp, Homo sapiens
ttttttttaaaagcaggctggtaccggtcggatcgggatatgtcgacagcgtcgactgctaaagccagagaaatggacaaagcccagttggaactgaatttgaatctcataaagctacaggtgcatctgagagcaggctcagtggtgaagatcaagatagcccggtaaagccctgcttgggctttttagcctcagccacatggatacctctcagttcctgccattaacaatattcatggaaaatacagcactgtgtctttcacatgctccactctggaaggtttatgctctgagctcaggatagttggggaacacatttttaaatcttggttttaaacaaaaagagaaatttattaaaatggagatataattgtgcatggtacatatatttctgaaaagttatgtataaatcaattatgttaaaagcgccagaagttactttttataagtgaactattacgaataatttcataaagcaaataaccacctctagcttatctgtcaggtatatcagaattctcatatatcatagtctcataagacttggttaaagcagatctatcttaggtaggaaaaaatagtaatcgattatacttagctgcttttatctgtagtgtgggtgactttttataactattatgttttataatgtcttcctgagagaatttcctaattttgtagttcatataagagaaatacaattttctagcattttctgaccttacaataaatcaattatgaatgcattttaacaaatattaaggtaggataaaccaacagaataaaaagttggtatttacttacattgaatatcatgcaaataaactcagaaaatgtcaccaaatactgtgggctatatttctcaatgatagggggaagaattcaaccttggagaaaatgaccagatcactttactgcttatatcttcagtattagaaaaactgcatgtatgattttaatagaaatgctttttataaagctaacattcagaaatgggataaaatgcaataacatctttcctttgtgcattaaattcccttctaattctaaaattgacatttgtatcttgcttaggatttaacattgttaattataatacttttaatgactagttttaatctcattattaagaagtagaaaacttactaaaaaggaaactaaaaataaatgttgttttgcagat

SEQ ID NO: 383050 - DNA, 1765 bp, Homo sapiens
aggcaattaaagtcaagagctaaggagggagggagagggtttagaaataccagcataataagtagtatgactgggtgctctgtaaattaactcaattagacaaagcctgacttaacgggggaagatggtgagaagcgctaccctcattaaatttggttgttagaggcgcttctaaggaaattaagtctgttagttgtttgaatcacataaaattgtgtgtgcacgttcatgtacacatgtgcacacatgtaacctctgtgattcttgtgggtatttttttaagaagaaaggaatagaaagcaaagaaaaataaaaaatactgaaaagaaaagactgaaagagtagaagataaggagaaaagtacgacagagacaaggaaagtaagagagagagagagctctcccaattataaagccatgagccccctttggtgggggtttctgctcagttgcttgggctgcaaaatcctgccaggagcccagggtcagttcccccgagtctgcatgacggtggacagcctagtgaacaaggagtgctgcccacgcctgggtgcagagtcggccaatgtctgtggctctcagcaaggccgggggcagtgcacagaggtgcgagccgacacaaggccctggagtggtccctacatcctacgaaaccaggatgaccgtgagctgtggccaagaaaattcttccaccggacctgcaagtgcacaggaaactttgccggctataattgtggagactgcaagtttggctggaccggtcccaactgcgagcggaagaaaccaccagtgattcggcagaacatccattccttgagtcctcaggaaagagagcagttcttgggcgccttagatctcgcgaagaagagagtacaccccgactacgtgatcaccacacaacactggctgggcctgcttgggcccaatggaacccagccgcagtttgccaactgcagtgtttatgatttttttgtgtggctccattattattctgttagagatacattattaggaccaggacgcccctacagggccatagatttctcacatcaaggacctgcatttgttacctggcaccggtaccatttgttgtgtctggaaagagatctccagcgactcattggcaatgagtcttttgctttgccctactggaactttgccactgggaggaacgagtgtgatgtgtgtacagaccagctgtttggggcagcgagaccagacgatccgactctgattagtcggaactcaagattctccagctgggaaactgtctgtgatagcttggatgactacaaccacctggtcaccttgtgcaatggaacctatgaaggtttgctgagaagaaatcaaatgggaagaaacagcatgaaattgccaaccttaaaagacatacgagattgcctgtctctccagaagtttgacaatcctcccttcttccagaactctaccttcagtttcaggaatgctttggaagggtttgataaagcagatgggactctggattctcaagtgatgagccttcataatttggttcattccttcctgaacgggacaaacgctttgccacattcagccgccaatgatcccatttttgtgaaaagagaaagcgaccaaggaactcccttccctgcatgtgctggtaaccatgagcctgggaggctctactcagactttcttttgctggcataacagcaagaattcaagtgagagtttatgaaatgagtagacagaagagtattcctggtgagaaaaatttactgttcctt

SEQ ID NO: 383051 - DNA, 794 bp, Homo sapiens
acctctagcttatctgtcaggtataggtggttatttgctttatgaaattattcgtaatagttcacttataagaataatttcataaagcaaataaccacctctagcttatctgtcaggtatatcagaattctcatatatcatagtctcataagacttggttaaagcagatctatcttaggtaggaaaaaatagtaatcgattatacttagctgcttttatctgtagtgtgggtgactttttataactattatgttttataatgtcttcctgagagaatttcctaattttgtagttcatataagagaaatacaattttctagcattttctgaccttacaataaatcaattatgaatgcattttaacaaatattaaggtaggataaaccaacagaataaaaagttggtatttacttacattgaatatcatgcaaataaactcagaaaatgtcaccaaatactgtgggctatatttctcaatgatagggggaagaattcaaccttggagaaaatgaccagatcactttactgcttatatcttcagtattagaaaaactgcatgtatgattttaatagaaatgctttttataaagctaacattcagaaatgggataaaatgcaataacatctttcctttgtgcattaaattcccttctaattctaaaattgacatttgtatcttgcttaggatttaacattgttaattataatacttttaatgactagttttaatctcattattaagaagtagaaaacttactaaaaaggaaactaaaaataaatgttgttttgcagat

SEQ ID NO: 383052 - DNA, 527 bp, Homo sapiens
ctataaaaaaggtagagacaatagcagaatttctcttcccaagggctgtatattttgcagctccccagatgccattttagcatgcactttcacaaatgagtttctaactcagaaaagtagttacattcttccttagaaggtttcttcggcataagcatttattgtaacaaatttttaaaatgcaataagctgtatttaagtaatgggatgccagttctgactaccccaagaaaaacaattgtggatatgataaatggtgagaaaggagaagataaattttagtctagcatgagtagttttgctttatcaacaaaaagcacgtgaaaggcaagtgcgcttgctctttttctcttctgaaagtattcagctgatgaaaatcctgattgtagacccttctcttctgctttagtttcagttgaagaaactccaggttggcccacaactctcttagtagtcatgggaacactggtggctttggttggtctttttgtgctgttggcttttcttcaatatagaagacttcgaaa

SEQ ID NO: 383053 - DNA, 664 bp, Homo sapiens
catctttcctttgtgcattaaattcccttctaattctaaaattgacatttgtatcttgcttaggatttaacattgttaattataatacttttaatgactagttttaatctcattattaagaagtagaaaacttactaaaaaggaaactaaaaataaatgttgttttgcagattattgtttgtcttttgaggattattgttttttaagtagtgtgcatcaattcccatcttttgggcactcagcatgtatattgaaatatatatacatgtaaaatatataataacaacctcagtctgaaaaataatctcttaaactgatatgctattttctggtgagtttccaaacaattgctattttctgaatctgtttgaacaggtaggaaaaggagagccagcctttcctcaggtgaagttacttttgatattccccacagtttagtgactaatcctggggtggaagcaggtggctgcttcaagtgactgaccagggaagagaggtcctgcagtagctaacttggtgatctcccagataagccttcaagatgggtcaatttgttggagactctaaggttgaagctcttcctatttctatagtgccttacttatcctgagtattttataaatattctttgaatgaataagtgaatgaataaactaatttcaaa

SEQ ID NO: 383054 - DNA, 4567 bp, Homo sapiens
aggcaattaaagtcaagagctaaggagggagggagagggtttagaaataccagcataataagtagtatgactgggtgctctgtaaattaactcaattagacaaagcctgacttaacgggggaagatggtgagaagcgctaccctcattaaatttggttgttagaggcgcttctaaggaaattaagtctgttagttgtttgaatcacataaaattgtgtgtgcacgttcatgtacacatgtgcacacatgtaacctctgtgattcttgtgggtatttttttaagaagaaaggaatagaaagcaaagaaaaataaaaaatactgaaaagaaaagactgaaagagtagaagataaggagaaaagtacgacagagacaaggaaagtaagagagagagagagctctcccaattataaagccatgagccccctttggtgggggtttctgctcagttgcttgggctgcaaaatcctgccaggagcccagggtcagttcccccgagtctgcatgacggtggacagcctagtgaacaaggagtgctgcccacgcctgggtgcagagtcggccaatgtctgtggctctcagcaaggccgggggcagtgcacagaggtgcgagccgacacaaggccctggagtggtccctacatcctacgaaaccaggatgaccgtgagctgtggccaagaaaattcttccaccggacctgcaagtgcacaggaaactttgccggctataattgtggagactgcaagtttggctggaccggtcccaactgcgagcggaagaaaccaccagtgattcggcagaacatccattccttgagtcctcaggaaagagagcagttcttgggcgccttagatctcgcgaagaagagagtacaccccgactacgtgatcaccacacaacactggctgggcctgcttgggcccaatggaacccagccgcagtttgccaactgcagtgtttatgatttttttgtgtggctccattattattctgttagagatacattattaggaccaggacgcccctacagggccatagatttctcacatcaaggacctgcatttgttacctggcaccggtaccatttgttgtgtctggaaagagatctccagcgactcattggcaatgagtcttttgctttgccctactggaactttgccactgggaggaacgagtgtgatgtgtgtacagaccagctgtttggggcagcgagaccagacgatccgactctgattagtcggaactcaagattctccagctgggaaactgtctgtgatagcttggatgactacaaccacctggtcaccttgtgcaatggaacctatgaaggtttgctgagaagaaatcaaatgggaagaaacagcatgaaattgccaaccttaaaagacatacgagattgcctgtctctccagaagtttgacaatcctcccttcttccagaactctaccttcagtttcaggaatgctttggaagggtttgataaagcagatgggactctggattctcaagtgatgagccttcataatttggttcattccttcctgaacgggacaaacgctttgccacattcagccgccaatgatcccatttttgtggttcttcattcctttactgatgccatctttgatgagtggatgaaaagatttaatcctcctgcagatgcctggcctcaggagctggcccctattggtcacaatcggatgtacaacatggttcctttcttccctccagtgactaatgaagaactctttttaacctcagaccaacttggctacagctatgccatcgatctgccagtttcagttgaagaaactccaggttggcccacaactctcttagtagtcatgggaacactggtggctttggttggtctttttgtgctgttggcttttcttcaatatagaagacttcgaaaaggatatacacccctaatggagacacatttaagcagcaagagatacacagaagaagcctagggtgctcatgccttacctaagagaagaggctggccaagccacagttctgacgctgacaataaaggaactaatcctcactgttccttcttgagttgaagatctttgacataggttcttctatagtgatgatgatctcattcagaagatgcttagctgtagtttccgctttgcttgcttgtttaacaaacccaactaaagtgcttgaggctacctctaccttcaaataaagatagacctgacaatttgtgatatctaataataaccccccccccaatattgattaagcctcctccttttctgaaagcatttaaaaaaaacaaaaaaaatcccaaaacattgatccaggggagtcatttaaatttgcaggtcagtgcaatgtgagacctggccaagaccatacatcaatctttcttagccccagtgtctttattggtaatgccatggaggtgggagttggtaggtgctagatgagtctccaagatcccttttagctataaacatctctgcttctaggcaccctcctgattatcttccttgggcttctttttcttcttttctctatatttttcctctccagcttagaagatgagaataagccttgttttctttacaggatggaaaatgactaaatgaaggatcaattccactctattgtgtaaactagattttacggattttacttaaaatctgcagttttaaacagtagacctatattacaggattcaatagctggatacacattgattctatagtgataaatagagaagataataaaattatagagtttcctggttagttgatatgctactgtaaacctattaacaaatacagaattactctttccaaggaaggctgactgaaggctggtgaggctgtaaacctgaacatgagacaatttgacttgagtcccattactctgaggtctctttggctgatcctctaccaatttctttactaggtagcctcagatgaaaaattattcccacataatgcactgggcttatttttaagcattgatgttagattgattaatgttgccgaatactcacagttacttatgaatgctgatcaattaagtcttatcatttgaaagcaaaccatctgtacaaaacatgacaattcagaattaagtggttatattctgctatgcaatcatcagatcatgaggaataagaatgagacaatctttactacgatgttcagacttatcatgatggaccccacttcagagaagttaatggctcttgagatttccaggcaaatttcatctgctcatatctggtttctgtgcatcaggagtgagactgaagttctagggcgtggcttgtctgtcgaggcccctctctactggaatgaatgaatgtaaagaatgggtgttaagaggtccctggagctgccttcaacataaggggtcctagagggtgcaagactcatcaagaaccagtttaccccatgcaataggactgctaaagccagagaaatggacaaagcccagttggaactgaatttgaatctcataaagctacaggtgcatctgagagcaggctcagtggtgaagatcaagatagcccggtaaagccctgcttgggctttttagcctcagccacatggatacctctcagttcctgccattaacaatattcatggaaaatacagcactgtgtctttcacatgctccactctggaaggtttatgctctgagctcaggatagttggggaacacatttttaaatcttggttttaaacaaaaagagaaatttattaaaatggagatataattgtgcatggtacatatatttctgaaaagttatgtataaatcaattatgttaaaagcgccagaagttactttttataagtgaactattacgaataatttcataaagcaaataaccacctctagcttatctgtcaggtatatcagaattctcatatatcatagtctcataagacttggttaaagcagatctatcttaggtaggaaaaaatagtaatcgattatacttagctgcttttatctgtagtgtgggtgactttttataactattatgttttataatgtcttcctgagagaatttcctaattttgtagttcatataagagaaatacaattttctagcattttctgaccttacaataaatcaattatgaatgcattttaacaaatattaaggtaggataaaccaacagaataaaaagttggtatttacttacattgaatatcatgcaaataaactcagaaaatgtcaccaaatactgtgggctatatttctcaatgatagggggaagaattcaaccttggagaaaatgaccagatcactttactgcttatatcttcagtattagaaaaactgcatgtatgattttaatagaaatgctttttataaagctaacattcagaaatgggataaaatgcaataacatctttcctttgtgcattaaattcccttctaattctaaaattgacatttgtatcttgcttaggatttaacattgttaattataatacttttaatgactagttttaatctcattattaagaagtagaaaacttactaaaaaggaaactaaaaataaatgttgttttgcagat

SEQ ID NO: 383055 - DNA, 4043 bp, Homo sapiens
gctactgtaaacctattaacaaatacagaattactctttccaaggaaggctgactgaaggctggtgaggctgtaaacctgaacatgagacaatttgacttgagtcccattactctgaggtctctttggctgatcctctaccaatttctttactaggtagcctcagatgaaaaattattcccacataatgcactgggcttatttttaagcattgatgttagattgattaatgttgccgaatactcacagttacttatgaatgctgatcaattaagtcttatcatttgaaagcaaaccatctgtacaaaacatgacaattcagaattaagtggttatattctgctatgcaatcatcagatcatgaggaataagaatgagacaatctttactacgatgttcagacttatcatgatggaccccacttcagagaagtcaatggctcttgagatttccaggcaaatttcatctgctcatatctggtttctgtgcatcaggagtgagactgaagttctagggcgtggcttgtctgtcgaggcccctctctactggaatgaatgaatgtaaagaatgggtgttaagagatctccagcgactcattggcaatgagtcttttgctttgccctactggaactttgccactgggaggaacgagtgtgatgtgtgtacagaccagctgtttggggcagcgagaccagacgatccgactctgattagtcggaactcaagattctccagctgggaaactgtctgtgatagcttggatgactacaaccacctggtcaccttgtgcaatggaacctatgaaggtttgctgagaagaaatcaaatgggaagaaacagcatgaaattgccaaccttaaaagacatacgagattgcctgtctctccagaagtttgacaatcctcccttcttccagaactctaccttcagtttcaggaatgctttggaagggtttgataaagcagatgggactctggattctcaagtgatgagccttcataatttggttcattccttcctgaacgggacaaacgctttgccacattcagccgccaatgatcccatttttgtggttcttcattcctttactgatgccatctttgatgagtggatgaaaagatttaatcctcctgcagatgcctggcctcaggagctggcccctattggtcacaatcggatgtacaacatggttcctttcttccctccagtgactaatgaagaactctttttaacctcagaccaacttggctacagctatgccatcgatctgccagtttcagttgaagaaactccaggttggcccacaactctcttagtagtcatgggaacactggtggctttggttggtctttttgtgctgttggcttttcttcaatatagaagacttcgaaaaggatatacacccctaatggagacacatttaagcagcaagagatacacagaagaagcctagggtgctcatgccttacctaagagaagaggctggccaagccacagttctgacgctgacaataaaggaactaatcctcactgttccttcttgagttgaagatctttgacataggttcttctatagtgatgatgatctcattcagaagatgcttagctgtagtttccgctttgcttgcttgtttaacaaacccaactaaagtgcttgaggctacctctaccttcaaataaagatagacctgacaatttgtgatatctaataataaccccccccccaatattgattaagcctcctccttttctgaaagcatttaaaaaaaacaaaaaaaatcccaaaacattgatccaggggagtcatttaaatttgcaggtcagtgcaatgtgagacctggccaagaccatacatcaatctttcttagccccagtgtctttattggtaatgccatggaggtgggagttggtaggtgctagatgagtctccaagatcccttttagctataaacatctctgcttctaggcaccctcctgattatcttccttgggcttctttttcttcttttctctatatttttcctctccagcttagaagatgagaataagccttgttttctttacaggatggaaaatgactaaatgaaggatcaattccactctattgtgtaaactagattttacggattttacttaaaatctgcagttttaaacagtagacctatattacaggattcaatagctggatacacattgattctatagtgataaatagagaagataataaaattatagagtttcctggttagttgatatgctactgtaaacctattaacaaatacagaattactctttccaaggaaggctgactgaaggctggtgaggctgtaaacctgaacatgagacaatttgacttgagtcccattactctgaggtctctttggctgatcctctaccaatttctttactaggtagcctcagatgaaaaattattcccacataatgcactgggcttatttttaagcattgatgttagattgattaatgttgccgaatactcacagttacttatgaatgctgatcaattaagtcttatcatttgaaagcaaaccatctgtacaaaacatgacaattcagaattaagtggttatattctgctatgcaatcatcagatcatgaggaataagaatgagacaatctttactacgatgttcagacttatcatgatggaccccacttcagagaagttaatggctcttgagatttccaggcaaatttcatctgctcatatctggtttctgtgcatcaggagtgagactgaagttctagggcgtggcttgtctgtcgaggcccctctctactggaatgaatgaatgtaaagaatgggtgttaagaggtccctggagctgccttcaacataaggggtcctagagggtgcaagactcatcaagaaccagtttaccccatgcaataggactgctaaagccagagaaatggacaaagcccagttggaactgaatttgaatctcataaagctacaggtgcatctgagagcaggctcagtggtgaagatcaagatagcccggtaaagccctgcttgggctttttagcctcagccacatggatacctctcagttcctgccattaacaatattcatggaaaatacagcactgtgtctttcacatgctccactctggaaggtttatgctctgagctcaggatagttggggaacacatttttaaatcttggttttaaacaaaaagagaaatttattaaaatggagatataattgtgcatggtacatatatttctgaaaagttatgtataaatcaattatgttaaaagcgccagaagttactttttataagtgaactattacgaataatttcataaagcaaataaccacctctagcttatctgtcaggtatatcagaattctcatatatcatagtctcataagacttggttaaagcagatctatcttaggtaggaaaaaatagtaatcgattatacttagctgcttttatctgtagtgtgggtgactttttataactattatgttttataatgtcttcctgagagaatttcctaattttgtagttcatataagagaaatacaattttctagcattttctgaccttacaataaatcaattatgaatgcattttaacaaatattaaggtaggataaaccaacagaataaaaagttggtatttacttacattgaatatcatgcaaataaactcagaaaatgtcaccaaatactgtgggctatatttctcaatgatagggggaagaattcaaccttggagaaaatgaccagatcactttactgcttatatcttcagtattagaaaaactgcatgtatgattttaatagaaatgctttttataaagctaacattcagaaatgggataaaatgcaataacatctttcctttgtgcattaaattcccttctaattctaaaattgacatttgtatcttgcttaggatttaacattgttaattataatacttttaatgactagttttaatctcattattaagaagtagaaaacttactaaaaaggaaactaaaaataaatgttgttttgcagat

SEQ ID NO: 383056 - DNA, 4378 bp, Homo sapiens
aggcaattaaagtcaagagctaaggagggagggagagggtttagaaataccagcataataagtagtatgactgggtgctctgtaaattaactcaattagacaaagcctgacttaacgggggaagatggtgagaagcgctaccctcattaaatttggttgttagaggcgcttctaaggaaattaagtctgttagttgtttgaatcacataaaattgtgtgtgcacgttcatgtacacatgtgcacacatgtaacctctgtgattcttgtgggtatttttttaagaagaaaggaatagaaagcaaagaaaaataaaaaatactgaaaagaaaagactgaaagagtagaagataaggagaaaagtacgacagagacaaggaaagtaagagagagagagagctctcccaattataaagccatgagccccctttggtgggggtttctgctcagttgcttgggctgcaaaatcctgccaggagcccagggtcagttcccccgagtctgcatgacggtggacagcctagtgaacaaggagtgctgcccacgcctgggtgcagagtcggccaatgtctgtggctctcagcaaggccgggggcagtgcacagaggtgcgagccgacacaaggccctggagtggtccctacatcctacgaaaccaggatgaccgtgagctgtggccaagaaaattcttccaccggacctgcaagtgcacaggaaactttgccggctataattgtggagactgcaagtttggctggaccggtcccaactgcgagcggaagaaaccaccagtgattcggcagaacatccattccttgagtcctcaggaaagagagcagttcttgggcgccttagatctcgcgaagaagagagtacaccccgactacgtgatcaccacacaacactggctgggcctgcttgggcccaatggaacccagccgcagtttgccaactgcagtgtttatgatttttttgtgtggctccattattattctgttagagatacattattaggaccaggacgcccctacagggccatagatttctcacatcaaggacctgcatttgttacctggcaccggtaccatttgttgtgtctggaaagagatctccagcgactcattggcaatgagtcttttgctttgccctactggaactttgccactgggaggaacgagtgtgatgtgtgtacagaccagctgtttggggcagcgagaccagacgatccgactctgattagtcggaactcaagattctccagctgggaaactgtctgtgatagcttggatgactacaaccacctggtcaccttgtgcaatggaacctatgaaggtttgctgagaagaaatcaaatgggaagaaacagcatgaaattgccaaccttaaaagacatacgagattgcctgtctctccagaagtttgacaatcctcccttcttccagaactctaccttcagtttcaggaatgctttggaagggtttgataaagcagatgggactctggattctcaagtgatgagccttcataatttggttcattccttcctgaacgggacaaacgctttgccacattcagccgccaatgatcccatttttgtggttcttcattcctttactgatgccatctttgatgagtggatgaaaagatttaatcctcctgcagatgcactggtggctttggttggtctttttgtgctgttggcttttcttcaatatagaagacttcgaaaaggatatacacccctaatggagacacatttaagcagcaagagatacacagaagaagcctagggtgctcatgccttacctaagagaagaggctggccaagccacagttctgacgctgacaataaaggaactaatcctcactgttccttcttgagttgaagatctttgacataggttcttctatagtgatgatgatctcattcagaagatgcttagctgtagtttccgctttgcttgcttgtttaacaaacccaactaaagtgcttgaggctacctctaccttcaaataaagatagacctgacaatttgtgatatctaataataaccccccccccaatattgattaagcctcctccttttctgaaagcatttaaaaaaaacaaaaaaaatcccaaaacattgatccaggggagtcatttaaatttgcaggtcagtgcaatgtgagacctggccaagaccatacatcaatctttcttagccccagtgtctttattggtaatgccatggaggtgggagttggtaggtgctagatgagtctccaagatcccttttagctataaacatctctgcttctaggcaccctcctgattatcttccttgggcttctttttcttcttttctctatatttttcctctccagcttagaagatgagaataagccttgttttctttacaggatggaaaatgactaaatgaaggatcaattccactctattgtgtaaactagattttacggattttacttaaaatctgcagttttaaacagtagacctatattacaggattcaatagctggatacacattgattctatagtgataaatagagaagataataaaattatagagtttcctggttagttgatatgctactgtaaacctattaacaaatacagaattactctttccaaggaaggctgactgaaggctggtgaggctgtaaacctgaacatgagacaatttgacttgagtcccattactctgaggtctctttggctgatcctctaccaatttctttactaggtagcctcagatgaaaaattattcccacataatgcactgggcttatttttaagcattgatgttagattgattaatgttgccgaatactcacagttacttatgaatgctgatcaattaagtcttatcatttgaaagcaaaccatctgtacaaaacatgacaattcagaattaagtggttatattctgctatgcaatcatcagatcatgaggaataagaatgagacaatctttactacgatgttcagacttatcatgatggaccccacttcagagaagttaatggctcttgagatttccaggcaaatttcatctgctcatatctggtttctgtgcatcaggagtgagactgaagttctagggcgtggcttgtctgtcgaggcccctctctactggaatgaatgaatgtaaagaatgggtgttaagaggtccctggagctgccttcaacataaggggtcctagagggtgcaagactcatcaagaaccagtttaccccatgcaataggactgctaaagccagagaaatggacaaagcccagttggaactgaatttgaatctcataaagctacaggtgcatctgagagcaggctcagtggtgaagatcaagatagcccggtaaagccctgcttgggctttttagcctcagccacatggatacctctcagttcctgccattaacaatattcatggaaaatacagcactgtgtctttcacatgctccactctggaaggtttatgctctgagctcaggatagttggggaacacatttttaaatcttggttttaaacaaaaagagaaatttattaaaatggagatataattgtgcatggtacatatatttctgaaaagttatgtataaatcaattatgttaaaagcgccagaagttactttttataagtgaactattacgaataatttcataaagcaaataaccacctctagcttatctgtcaggtatatcagaattctcatatatcatagtctcataagacttggttaaagcagatctatcttaggtaggaaaaaatagtaatcgattatacttagctgcttttatctgtagtgtgggtgactttttataactattatgttttataatgtcttcctgagagaatttcctaattttgtagttcatataagagaaatacaattttctagcattttctgaccttacaataaatcaattatgaatgcattttaacaaatattaaggtaggataaaccaacagaataaaaagttggtatttacttacattgaatatcatgcaaataaactcagaaaatgtcaccaaatactgtgggctatatttctcaatgatagggggaagaattcaaccttggagaaaatgaccagatcactttactgcttatatcttcagtattagaaaaactgcatgtatgattttaatagaaatgctttttataaagctaacattcagaaatgggataaaatgcaataacatctttcctttgtgcattaaattcccttctaattctaaaattgacatttgtatcttgcttaggatttaacattgttaattataatacttttaatgactagttttaatctcattattaagaagtagaaaacttactaaaaaggaaactaaaaataaatgttgttttgcagat

SEQ ID NO: 383057 - DNA, 1498 bp, Homo sapiens
  misc_feature (9)..(9): n is a, c, g, or t
  misc_feature (24)..(25): n is a, c, g, or t
aagcagtgntatcaacgcagagtnnccattacggccggtggttatattctgctatgcaatcatcagatcatgaggaataagaatgagacaatctttactacgatgttcagacttatcatgatggaccccacttcagagaagttaatggctcttgagatttccaggcaaatttcatctgctcatatctggtttctgtgcatcaggagtgagactgaagttctagggcgtggcttgtctgtcgaggcccctctctactggaatgaatgaatgtaaagaatgggtgttaagaggtccctggagctgccttcaacataaggggtcctagagggtgcaagactcatcaagaaccagtttaccccatgcaataggactgctaaagccagagaaatggacaaagcccagttggaactgaatttgaatctcataaagctacaggtgcatctgagagcaggctcagtggtgaagatcaagatagcccggtaaagccctgcttgggctttttagcctcagccacatggatacctctcagttcctgccattaacaatattcatggaaaatacagcactgtgtctttcacatgctccactctggaaggtttatgctctgagctcaggatagttggggaacacatttttaaatcttggttttaaacaaaaagagaaatttattaaaatggagatataattgtgcatggtacatatatttctgaaaagttatgtataaatcaattatgttaaaagcgccagaagttactttttataagtgaactattacgaataatttcataaagcaaataaccacctctagcttatctgtcaggtatatcagaattctcatatatcatagtctcataagacttggttaaagcagatctatcttaggtaggaaaaaatagtaatcgattatacttagctgcttttatctgtagtgtgggtgactttttataactattatgttttataatgtcttcctgagagaatttcctaattttgtagttcatataagagaaatacaattttctagcattttctgaccttacaataaatcaattatgaatgcattttaacaaatattaaggtaggataaaccaacagaataaaaagttggtatttacttacattgaatatcatgcaaataaactcagaaaatgtcaccaaatactgtgggctatatttctcaatgatagggggaagaattcaaccttggagaaaatgaccagatcactttactgcttatatcttcagtattagaaaaactgcatgtatgattttaatagaaatgctttttataaagctaacattcagaaatgggataaaatgcaataacatctttcctttgtgcattaaattcccttctaattctaaaattgacatttgtatcttgcttaggatttaacattgttaattataatacttttaatgactagttttaatctcattattaagaagtagaaaacttactaaaaaggaaactaaaaataaatgttgttttgcagat

SEQ ID NO: 383058 - DNA, 405 bp, Homo sapiens
cttgctggtgtttgtgacccctacagtatagtcagggtgccatataatcaggacaggaaatattaggatttcagaaggaatagagcttaccttggagagcagagtatagtggaaagaatagggctttagagccgggccaatctacattcaaatgctagcctgccctcctgctagcttttgccttagagaaatattttccctccagctccctttgcttatgataaaatggataatatcaccttccttgcctcccttacaaggttgtagtgaggattagcaataacggatatagagtgcctgatgtgcctggcacctgagcacatgccatcgtagatcttgtggaagaagtctggcaggatgctttggtttaagtacctggaaactgttataaaaagaagcatggaa

SEQ ID NO: 383059 - DNA, 479 bp, Homo sapiens
cttcatctaacaattctataaagtatgtgccatttattaacccattgtactgatgaggaaaagtccatagaagttaacttgcccaaggtcaccaattgtaaatggtgaacacagacaggtaaactcaagagctatgctcttgaccactgcttgcacagtgtggtagacagaaaaaatggcttctcaaaaacatcctaggctggacacagtggctcatgcctgtaatcccaggactttgggaggccgaggtgggcaaatcacttgagtttaggagttcaagaccagcctgggcaatatggcaaaaccctgtctctactaaaaatataaaaattagccaggtgtggtagcacatgcctgtagtcacagctacgcaggaggctgaggtgggaggatcacctgaacccaggaggcaaaggctgcattgagccatgatcatgccactatactccagcctgggcgacagaatgaaaccctgtctc

SEQ ID NO: 383060 - DNA, 429 bp, Homo sapiens
aaaatgatacgtaaaatatttaatgacgaggaaaatgatacactgcaagatgaaactgattattaaactataaataatgatgattacatttttaaaaactttataattctatatacataaaatagggaaagatataaagcagaatatctctgccattaaaattatgtttacagaaaaaataagaacacaagagaacaacttgtaatgtttaatgaaaaatggtagaaatatgggatctaattaaactaaagagcttctgcacaacaaaagaaactaccatcagagtgaacaggcaacctacagaatgggagaaaatttttgcaatctactcatctgacaaagggctaatatccagaatctacaatgaactcaaacaaatatacaagaaaaaaacaaagaaccccatcaaaaagtggacaaaggatatga

SEQ ID NO: 383061 - DNA, 635 bp, Homo sapiens
caatcttgctcttcctatttcgggatacctgcttcattgatgggtggtctctaggacttcagagggaaaggctgaggatagacttagaccttggggagggtctgagccaatcagtgacttacattcactcagttgccatctaataggtggtcctcccttagaaaattggcggctttctggcagtgtttggccctctctttggggaagtgtggattactagagtgcaggcgacagagatggcctgggatggacagcttagtcatcatgaaagaatgtgtaaggcatcgggtggcccctgaattctgtctgacacatttgttttcccagaaatagaattgcattggagagttggggcccagttattagaaatatggggatggggtgcttgtacttgttgcagtcttgtggcttctcataatcttttctctcctaatccttcctcttgcctacatgttgcaattctgatgactttttgcagcgcacagttcatttttcttcagcatcccgctcagcacactggcttcctttatgtcttaatgggcatccgtctttccttttcatgtcattgattctcactcgtggcccccatcttccctgtatgcttattgaataggtgcttaaaaaacaaaaaaaaa

SEQ ID NO: 383062 - DNA, 618 bp, Homo sapiens
tgatctagacgatccccttcgacggtgtctgcttaaaagctttgatagccactgcctatataataaagcccctaagatccccttcttgagtaaagtttattggatgtaaatcacacacacacacacacacacacacacagagtctctctctctctgtctctgtctctccctctctcacacacacactctccattcccatcatccatgtctgctccatcctacagggctgagttttgctatggaacagctggctgatctgaagaactaagaggctgtatgtgtgaccatggggtcagatgctgcagccctgactctggtcatggatatgagtctaacaggagcctcctaagcccagtgagaggggttcctgttagtctggcaaggaaagcagcaagagaggagtgtcaggcaggtatctggacctgacaccacgtgggcacctgcttatatgtggaattcccctccagatcatctctgcttcctaaatgtctccacagctttcttggccatacaaggcaattcccctcattccagaaaagcctagtcttcaggaatatgcaatggaatgaaaagatataactcactgcaaagaactcagctggtgcttcttgccctgcg

SEQ ID NO: 383063 - DNA, 335 bp, Homo sapiens
tctttttttttttagacttggggagatcacttatagagagagagattgagagagacaaagtaacaagagttttaagaactgagctcccagaaaattcaatcattaggatactgtggaagaaaaaacagtaaaagagactaagaaggaacaaacagaagataaagggaaaccagacggtctgaaaaaacaaatgtttcaagcaggaaagaatgatcaactgtgtcaaatgctgttgatgaatctcagtgttgtcaaggatttaagatttaaccttagttttagctaagtcatggtgatgggtgaacttgaaaagagcagtctcagtgaaattggga

SEQ ID NO: 383064 - DNA, 1170 bp, Homo sapiens
tggggtgcacaggggtgctacaaggccagcttcccccacatctggcgtggctgatgagagcaactttgctgctgcttttggggcagaatccatccttgtatagcctcgggcacatggttagaatgctgggagtatgatgcctggaaacaatactataaagaaagcaggactcagttctctcatctagaaccggtggcccgtcgttttgccgttacagataccagcagtgtttgtgacaaaccctaatggaacagaagctcccggtgggtgtgtgaatggccacgtgtctggccgtggcttgcttttccagaaccaacttggtggttagcagtcgttgccagctgcctcgtgtgagcacctactgtgtgccgggcaagccgctgggaatttcacgtctgttcattttctcttcactgtggcgtcagatcacggagtaggtgtaaatagttgcctttaggatgtgaagctggggctcggagaggagaggccagcttcttgaagactgaagagcctagaagattctgtgcaacctgtgtgtggctcaagagcctgtgcttctcccaggggtgacagctcccccactagatgccgtgtccttggagacttgaactccccctgtgctctgaacacaccagctgccgtggtagccatcagacgtccctactggagccattttggcccaagagaagtggctgagatggggatatggccctggtttgtgcaaactcagggaaactcggggatgtgacctcctgcagctttgccgtgtgttttgacctctcccaactgcttgggtttctttttttttggagacagagtctcaccctgtcgcccaggctggaatgtggtggcgtgatcttggctcactgatactgccgcctcccgggttcaagcaattctcctgccttggcgtcctgagtagttgggattacagacgtgcgccaccactcctggctaatttttatatttttagtagagatggggtttcactgtgttggccacgctggtctcggaactcccgacctcaggtgatacgcccgccgtggcctcccaaagtgctgggattacaggcatgaaccactttacccggcctgcttggggttcctttgaggccttggacatccgacagcattactgagggccggatttcaatcctttccacagcatctt

SEQ ID NO: 383065 - DNA, 306 bp, Homo sapiens
ttcttgtgactttttaatttcaaagctaatgagcaagattttgtgttttccccgtcctcaaaacaacaggaaagcattttggaaggccaagtgtttttcttacatttcaataaatcaattttagctgaattatcatttttaaagcactggcgggcatggtggcacatgcctgtaatctcagcaactagggaggctggggagggcaggtagcttgagcccaggaattccaggttacagtgagataggatagcgccaatgcactctaggccagcagcaacagaacaagaccatatctctatttaaaac

SEQ ID NO: 383066 - DNA, 6159 bp, Homo sapiens
  misc_feature (2)..(2): n is a, c, g, or t
  misc_feature (9)..(10): n is a, c, g, or t
  misc_feature (14)..(15): n is a, c, g, or t
  misc_feature (20)..(20): n is a, c, g, or t
  misc_feature (24)..(24): n is a, c, g, or t
anggtgggnncacnncttgnccanaggtgtgccgccgccctccatcacctggtacaaggacgcagccgtggtggaggtggagaagttgacccgcttccggcagcgcaacgacgggggcctgcagatcagcggcctggtgcccgatgataccggcatgttccagtgcttcgcccgcaatgcagccggcgaggtgcaaacttccacctacctggctgtcaccagcatcgcccctaacatcaccagaggccccctggacagcacggtgatcgatggcatgtcagtggtgctagcatgtgagacctcgggggcgccccgaccagctatcacttggcagaaaggggagcgcatcttggccagtggctctgtgcagctgcctcgcttcacacccctggagtcgggcagcctcctcatcagccccacacacatctccgatgcggggacctacacctgcctggccaccaactctcggggggtcgatgaggcctcagcagacctagtcgtttgggctcggacccgcatcaccaagcccccccaggatcagagtgtcatcaagggcacccaggcctccatggtgtgcggagtgacccacgacccccgagtaaccatcaggtacatctgggagaaggacggggccaccctgggcacggagagccatcctcgtatccgcctggacagaaacggctccctgcacatctcacagacgtggtcgggagacatcggcacgtacacctgccgggtgatctcagcaggaggcaacgactctcgcagtgcccacctgcgagtcaggcaactgccccacgcgcccgagcacccagtggccactctcagcaccgtggaaaggcgagccatcaacctgacgtggaccaagccctttgatggcaacagccccctgatccgctacattctggagatgtcggagaacaatgccccctggactgtactcctggccagtgtggaccccaaagctacctcagtgacagtcaagggcctggttcctgcacgctcctaccagttccgtctttgtgccgtcaacgacgtggggaaaggacagttcagcaaagacaccgagagggtctccctccccgaggagccccccacggcccctccacagaacgtcatcgccagcggtcgaaccaaccagtccatcatgatccagtggcagccgcctcctgagagccaccagaatggaattctcaagggttacatcatcaggtactgcctggccgggctgcccgtggggtaccagtttaagaacatcacggatgctgatgtgaacaacctgctgctggaggatctcatcatttggaccaactacgagatcgaggtggctgcttacaacagcgctgggctgggggtctacagcagtaaagtcaccgagtggacgctgcagggagttcccacagtccctccgggcaatgtgcacgcggaagccaccaattccacgaccatccgcttcacctggaacgcccccagcccccagttcatcaacggcatcaaccagggctacaagctgatcgcctgggagccggaacaggaagaggaggttaccatggtgaccgcccggcctaactttcaagacagcatccacgtgggcttcgtgtctggcctgaagaagttcaccgagtacttcacctcagtgctgtgtttcaccacccccggggacgggccacgcagcaccccgcagctggtgcgcacccatgaggatgtgcctgggcccgtgggacacctgagcttcagtgagatcctggacacatcgctgaaggtcagctggcaagagccgggagagaaaaatggcatcctcacagggtaccggatctcctgggaggagtacaatcgaaccaacacccgtgtgacccactacctgcccaacgtgaccctggagtaccgtgtcacgggcctcaccgcgctcaccacctacaccatcgaggtggccgccatgacctcaaagggccagggccaagtgtccgcctccaccatctcctctggggtgccccagaactcccagggccccccaccaacctgggcatttccaacatcggcccccgctctgtgaccttgcagttcaggccaggctacgatgggaaaacctccatctcccgctggctggtggaagcccaggtaggcgtggttggggagggagaggagtggttgctgatccaccagctctccaatgagcccgatgcccgctccatggaggtgcccgacctcaaccccttcacctgctacagcttccgcatgcgccaggtgaacatcgtgggcaccagcccccccagtcagccttctagaaagatccagaccctgcaggcaccccctgacatggccccagccaatgtgtctctgcgcacagccagtgagaccagcctgtggctgcgctggatgcctctcccggagatggaatacaatgggaaccctgagtccgtgggctataagatcaagtacagccggtcagacgggcatggcaagacgctgagccacgtggtgcaggaccgtgtggagcgggactacaccatcgaggacctggaggagtggacagagtaccgcgtccaggtccaggccttcaacgccatcgggagcgggccctggagccagacggtggtgggcaggacccgggagtcagttccctcttccggccccaccaatgtgtctgcactggccaccacctccagcagcatgctggtgcgctggagcgaggtccccgaggctgatcgcaacgggctcgtgctgggctataaggtgatgtataaggagaaggactcggacacccagccccgattctggctggtggaaggcaactcgtctcgcagtgcccagctcaccggcttgggcaaatacgtgctctatgaagtccaggtgctggccttcacacgcatcggggacggcagccccagccaccctcccatcctggagcggacgctggatgatgtcccaggaccacccatgggcatcctgttcccagaggtgcggaccacgtctgtgcggctgatctggcagccccctgccgcccccaatggcatcattcttgcttaccagatcacacaccggctcaacaccaccacggccaacaccgccactgtggaggtgctggcacccagcgcccggcagtacacagccacgggcctcaagccagagtctgtctacctgttccgcatcacggcccagacccgcaagggctggggagaagctgccgaggccttggtggtgaccaccgagaagagagaccgtccgcagccccccagcaggccgatggtgcagcaggaggatgtgagagcacgcagcgtgctgctgtcctgggagccagggagcgacgggctctcccctgtgcgctactacaccatccagacccgcgagctgcccagcggcaggtgggcactgcactcggcctccgtgagccacaatgcctccagcttcattgtggacaggctgaagcccttcacgtcctacaagttccgagtgaaggcgaccaatgacattggcgacagcgagttcagcgaggagtcggagtcactgaccaccctgcaggctgcccccgatgaagcacccaccatcctctccgtgacgccccacaccaccacctccgtgctaatccgatggcagccgccagcagaggacaagatcaatggcatcctcctgggcttccggatccgataccgggagctgctctatgaaggactgaggggcttcacgcttcgaggcatcaacaacccaggggccacatgggctgagcttacctacctgaacaagcacaggcggtacgagatacggatgagcgtgtacaacgctgtgggtgaggggccctccagccccccgcaggaggtctttgttggggaggcagtgcccacagcagcacctcgtaacgtggtcgtccacggcgccacggccacacagctggacgtgacttgggagccacctccgctggacagccagaatggagacatccaggggtacaagatttatttctgggaagcccagcgggggaacctcacagagcgagtgaagacgcttttcccggctgagaacagcgtgaagctcaagaacttgactggctacacggcctacatggtcagcgtggccgccttcaacgccgctggggatgggcctcggagcacccccacccaaggccagacccagcaagcagcccccagcgctcccagctcggtcaagttcagtgagctgaccacaacctcagtgaatgtgtcctgggaagccccgcagttccccaatggcatcctggagggctacaggctggtgtacgagccctgcagccccgtggatggagtcagcaagatcgtgaccgtggacgtgaaggggaacagccccctgtggctgaaggtgaaggacctggcggagggggtgacctacaggttccgcatcagagccaagaccttcacctacgggccggagatcgaagccaacgtcaccacgggccccggagaaggtgccccaggaccgcctggcgtgcccatcatcgtgcggtacagctctgccatcgccattcactggtccagcggagacccgggcaaagggcccatcacccgctacgtcatcgaggccagaccttcagacgagggactatgggacatcctcatcaaagacatccccaaggaggtgagctcctacacgttcagcatggacatcctgaagccgggcgtgagctatgacttccgggtcatcgcggtcaacgactatggtttcggcacccccagcagcccctcccagtctgtgccagcccagaaagccaaccccttctatgaggagtggtggttcttggtggtcattgccctggtcggcctcatcttcatcctgcttctggtcttcgtgctcatcatccggggccagagcaagaagtacgccaagaagacagactcggggaacagtgccaagtctggagccctaggccacagcgagatgatgagcttggatgaaagcagcttccctgccctggaactcaacaacaggcggctctccgtcaagaactctttctgccgaaagaacggcctgtacaccaggtctccccccaggcccagcccaggcagcctgcactactcggatgaggatgtcaccaaatacaacgacctcatccctgcagagagcagcagcctgacggagaagccctcagaaatctccgactctcagggaagtgacagcgagtacgaggtcgactcaaaccaccagaaggcccactcctttgtcaaccactacatcagtgaccccacatactacaactcgtggcggcgacagcagaggggcatctcgagggcacaggcctacagctacacggagagcgactcgggtgagccagaccacaccaccgtcaccaacagcaccagcacccagcagggcagcctctttcggcccaaggccagtcggactccaacgccccagaacccccctaaccccccaagtcagcagagcaccctctaccgtccccccagcagcctggccccaggctcccgggctcccatagcaggattttcatcatttgtttgacatcagaagaggaaaaagcagaaagagaaatggcaccaaactcctccttcacccctcctctcactgcctgccagaaaacaaaaacaccaagaaaccaagtcaacttttcacctcctgagtttatttttccagagattccagggccagcaaagccggcgttcagaaggagggagaaaaccgtgagaggatgtgtgtggccagcagctcttcagctttgagatggtggggttcactgctcccttgggaattacacggagctggggaagtggctgtgtcactgctatggacacggagtggggcgggcatctggagagagagagggagcggaggctaaggactggaggccgccaggcaggcgtggccgagggaagaaaaagcttctggatgtccagccagctgcccccttccagcccctccaggacccctggacccactgccgctgctctctgcaaaaagaatgggcatcccggaggccacgcctatcttctctctctgctcctccttccctccatgcaccatcactgtggctggcaggcatcggacagcctcatccagaccccctgccctgtcttggcaacctctactgcccatctcccctgctcaacttctccaccaagcatttggtttatttagaaaaaggaagaaaaacaaaaaacaaaaaactaaagggtg

SEQ ID NO: 383067 - DNA, 6014 bp, Homo sapiens
  misc_feature (2)..(2): n is a, c, g, or t
  misc_feature (9)..(10): n is a, c, g, or t
  misc_feature (14)..(15): n is a, c, g, or t
  misc_feature (20)..(20): n is a, c, g, or t
  misc_feature (24)..(24): n is a, c, g, or t
anggtgggnncacnncttgnccanaggtgtgccgccgccctccatcacctggtacaaggacgcagccgtggtggaggtggagaagttgacccgcttccggcagcgcaacgacgggggcctgcagatcagcggcctggtgcccgatgataccggcatgttccagtgcttcgcccgcaatgcagccggcgaggtgcaaacttccacctacctggctgtcaccagcatcgcccctaacatcaccagaggccccctggacagcacggtgatcgatggcatgtcagtggtgctagcatgtgagacctcgggggcgccccgaccagctatcacttggcagaaaggggagcgcatcttggccagtggctctgtgcagctgcctcgcttcacacccctggagtcgggcagcctcctcatcagccccacacacatctccgatgcggggacctacacctgcctggccaccaactctcggggggtcgatgaggcctcagcagacctagtcgtttgggctcggacccgcatcaccaagcccccccaggatcagagtgtcatcaagggcacccaggcctccatggtgtgcggagtgacccacgacccccgagtaaccatcaggtacatctgggagaaggacggggccaccctgggcacggagagccatcctcgtatccgcctggacagaaacggctccctgcacatctcacagacgtggtcgggagacatcggcacgtacacctgccgggtgatctcagcaggaggcaacgactctcgcagtgcccacctgcgagtcaggcaactgccccacgcgcccgagcacccagtggccactctcagcaccgtggaaaggcgagccatcaacctgacgtggaccaagccctttgatggcaacagccccctgatccgctacattctggagatgtcggagaacaatgccccctggactgtactcctggccagtgtggaccccaaagctacctcagtgacagtcaagggcctggttcctgcacgctcctaccagttccgtctttgtgccgtcaacgacgtggggaaaggacagttcagcaaagacaccgagagggtctccctccccgaggagccccccacggcccctccacagaacgtcatcgccagcggtcgaaccaaccagtccatcatgatccagtggcagccgcctcctgagagccaccagaatggaattctcaagggttacatcatcaggtactgcctggccgggctgcccgtggggtaccagtttaagaacatcacggatgctgatgtgaacaacctgctgctggaggatctcatcatttggaccaactacgagatcgaggtggctgcttacaacagcgctgggctgggggtctacagcagtaaagtcaccgagtggacgctgcagggagttcccacagtccctccgggcaatgtgcacgcggaagccaccaattccacgaccatccgcttcacctggaacgcccccagcccccagttcatcaacggcatcaaccagggctacaagctgatcgcctgggagccggaacaggaagaggaggttaccatggtgaccgcccggcctaactttcaagacagcatccacgtgggcttcgtgtctggcctgaagaagttcaccgagtacttcacctcagtgctgtgtttcaccacccccggggacgggccacgcagcaccccgcagctggtgcgcacccatgaggatgtgcctgggcccgtgggacacctgagcttcagtgagatcctggacacatcgctgaaggtcagctggcaagagccgggagagaaaaatggcatcctcacagggtaccggatctcctgggaggagtacaatcgaaccaacacccgtgtgacccactacctgcccaacgtgaccctggagtaccgtgtcacgggcctcaccgcgctcaccacctacaccatcgaggtggccgccatgacctcaaagggccagggccaagtgtccgcctccaccatctcctctggggtgccccagaactcccagggccccccaccaacctgggcatttccaacatcggcccccgctctgtgaccttgcagttcaggccaggctacgatgggaaaacctccatctcccgctggctggtggaagcccaggtaggcgtggttggggagggagaggagtggttgctgatccaccagctctccaatgagcccgatgcccgctccatggaggtgcccgacctcaaccccttcacctgctacagcttccgcatgcgccaggtgaacatcgtgggcaccagcccccccagtcagccttctagaaagatccagaccctgcaggcaccccctgacatggccccagccaatgtgtctctgcgcacagccagtgagaccagcctgtggctgcgctggatgcctctcccggagatggaatacaatgggaaccctgagtccgtgggctataagatcaagtacagccggtcagacgggcatggcaagacgctgagccacgtggtgcaggaccgtgtggagcgggactacaccatcgaggacctggaggagtggacagagtaccgcgtccaggtccaggccttcaacgccatcgggagcgggccctggagccagacggtggtgggcaggacccgggagtcagttccctcttccggccccaccaatgtgtctgcactggccaccacctccagcagcatgctggtgcgctggagcgaggtccccgaggctgatcgcaacgggctcgtgctgggctataaggtgatgtataaggagaaggactcggacacccagccccgattctggctggtggaaggcaactcgtctcgcagtgcccagctcaccggcttgggcaaatacgtgctctatgaagtccaggtgctggccttcacacgcatcggggacggcagccccagccaccctcccatcctggagcggacgctggatgatgtcccaggaccacccatgggcatcctgttcccagaggtgcggaccacgtctgtgcggctgatctggcagccccctgccgcccccaatggcatcattcttgcttaccagatcacacaccggctcaacaccaccacggccaacaccgccactgtggaggtgctggcacccagcgcccggcagtacacagccacgggcctcaagccagagtctgtctacctgttccgcatcacggcccagacccgcaagggctggggagaagctgccgaggccttggtggtgaccaccgagaagagagaccgtccgcagccccccagcaggccgatggtgcagcaggaggatgtgagagcacgcagcgtgctgctgtcctgggagccagggagcgacgggctctcccctgtgcgctactacaccatccagacccgcgagctgcccagcggcaggtgggcactgcactcggcctccgtgagccacaatgcctccagcttcattgtggacaggctgaagcccttcacgtcctacaagttccgagtgaaggcgaccaatgacattggcgacagcgagttcagcgaggagtcggagtcactgaccaccctgcaggctgcccccgatgaagcacccaccatcctctccgtgacgccccacaccaccacctccgtgctaatccgatggcagccgccagcagaggacaagatcaatggcatcctcctgggcttccggatccgataccgggagctgctctatgaaggactgaggggcttcacgcttcgaggcatcaacaacccaggggccacatgggctgagcttacctccatgtactccatgcggaacctgagccggcccagcctcacgcagtacgagctggacaacctgaacaagcacaggcggtacgagatacggatgagcgtgtacaacgctgtgggtgaggggccctccagccccccgcaggaggtctttgttggggaggcagtgcccacagcagcacctcgtaacgtggtcgtccacggcgccacggccacacagctggacgtgacttgggagccacctccgctggacagccagaatggagacatccaggggtacaagatttatttctgggaagcccagcgggggaacctcacagagcgagtgaagacgcttttcccggctgagaacagcgtgaagctcaagaacttgactggctacacggcctacatggtcagcgtggccgccttcaacgccgctggggatgggcctcggagcacccccacccaaggccagacccagcaagcagcccccagcgctcccagctcggtcaagttcagtgagctgaccacaacctcagtgaatgtgtcctgggaagccccgcagttccccaatggcatcctggagggctacaggctggtgtacgagccctgcagccccgtggatggagtcagcaagatcgtgaccgtggacgtgaaggggaacagccccctgtggctgaaggtgaaggacctggcggagggggtgacctacaggttccgcatcagagccaagaccttcacctacgggccggagatcgaagccaacgtcaccacgggccccggagaaggtgccccaggaccgcctggcgtgcccatcatcgtgcggtacagctctgccatcgccattcactggtccagcggagacccgggcaaagggcccatcacccgctacgtcatcgaggccagaccttcagacgagggactatgggacatcctcatcaaagacatccccaaggaggtgagctcctacacgttcagcatggacatcctgaagccgggcgtgagctatgacttccgggtcatcgcggtcaacgactatggtttcggcacccccagcagcccctcccagtctgtgccagcccagaaagccaaccccttctatgaggagtggtggttcttggtggtcattgccctggtcggcctcatcttcatcctgcttctggtcttcgtgctcatcatccggggccagagcaagaagtacgccaagaagacagactcggggaacagtgccaagtctggagccctaggccacagcgagatgatgagcttggatgaaagcagcttccctgccctggaactcaacaacaggcggctctccgtcaagaactctttctgccgaaagaacggcctgtacaccaggtctccccccaggcccagcccaggcagcctgcactactcggatgaggatgtcaccaaatacaacgacctcatccctgcagagagcagcagcctgacggagaagccctcagaaatctccgactctcagggaagtgacagcgagtacgaggtcgactcaaaccaccagaaggcccactcctttgtcaaccactacatcagtgaccccacatactacaactcgtggcggcgacagcagaggggcatctcgagggcacaggcctacagctacacggagagcgactcgggtgagccagaccacaccaccgtcaccaacagcaccagcacccagcagggcagcctctttcggcccaaggccagtcggactccaacgccccagaacccccctaaccccccaagtcagcagagcaccctctaccgtccccccagcaaagccggcgttcagaaggagggagaaaaccgtgagaggatgtgtgtggccagcagctcttcagctttgagatggtggggttcactgctcccttgggaattacacggagctggggaagtggctgtgtcactgctatggacacggagtggggcgggcatctggagagagagagggagcggaggctaaggactggaggccgccaggcaggcgtggccgagggaagaaaaagcttctggatgtccagccagctgcccccttccagcccctccaggacccctggacccactgccgctgctctctgcaaaaagaatgggcatcccggaggccacgcctatcttctctctctgctcctccttccctccatgcaccatcactgtggctggcaggcatcggacagcctcatccagaccccctgccctgtcttggcaacctctactgcccatctcccctgctcaacttctccaccaagcatttggtttatttagaaaaaggaagaaaaacaaaaaacaaaaaactaaagggtg

SEQ ID NO: 383068 - DNA, 5327 bp, Homo sapiens
  misc_feature (2)..(2): n is a, c, g, or t
  misc_feature (9)..(10): n is a, c, g, or t
  misc_feature (14)..(15): n is a, c, g, or t
  misc_feature (20)..(20): n is a, c, g, or t
  misc_feature (24)..(24): n is a, c, g, or t
anggtgggnncacnncttgnccanaggtgtgccgccgccctccatcacctggtacaaggacgcagccgtggtggaggtggagaagttgacccgcttccggcagcgcaacgacgggggcctgcagatcagcggcctggtgcccgatgataccggcatgttccagtgcttcgcccgcaatgcagccggcgaggtgcaaacttccacctacctggctgtcaccagcatcgcccctaacatcaccagaggccccctggacagcacggtgatcgatggcatgtcagtggtgctagcatgtgagacctcgggggcgccccgaccagctatcacttggcagaaaggggagcgcatcttggccagtggctctgtgcagctgcctcgcttcacacccctggagtcgggcagcctcctcatcagccccacacacatctccgatgcggggacctacacctgcctggccaccaactctcggggggtcgatgaggcctcagcagacctagtcgtttgggctcggacccgcatcaccaagcccccccaggatcagagtgtcatcaagggcacccaggcctccatggtgtgcggagtgacccacgacccccgagtaaccatcaggtacatctgggagaaggacggggccaccctgggcacggagagccatcctcgtatccgcctggacagaaacggctccctgcacatctcacagacgtggtcgggagacatcggcacgtacacctgccgggtgatctcagcaggaggcaacgactctcgcagtgcccacctgcgagtcaggcaactgccccacgcgcccgagcacccagtggccactctcagcaccgtggaaaggcgagccatcaacctgacgtggaccaagccctttgatggcaacagccccctgatccgctacattctggagatgtcggagaacaatgccccctggactgtactcctggccagtgtggaccccaaagctacctcagtgacagtcaagggcctggttcctgcacgctcctaccagttccgtctttgtgccgtcaacgacgtggggaaaggacagttcagcaaagacaccgagagggtctccctccccgaggagccccccacggcccctccacagaacgtcatcgccagcggtcgaaccaaccagtccatcatgatccagtggcagccgcctcctgagagccaccagaatggaattctcaagggttacatcatcaggtactgcctggccgggctgcccgtggggtaccagtttaagaacatcacggatgctgatgtgaacaacctgctgctggaggatctcatcatttggaccaactacgagatcgaggtggctgcttacaacagcgctgggctgggggtctacagcagtaaagtcaccgagtggacgctgcagggagttcccacagtccctccgggcaatgtgcacgcggaagccaccaattccacgaccatccgcttcacctggaacgcccccagcccccagttcatcaacggcatcaaccagggctacaagctgatcgcctgggagccggaacaggaagaggaggttaccatggtgaccgcccggcctaactttcaagacagcatccacgtgggcttcgtgtctggcctgaagaagttcaccgagtacttcacctcagtgctgtgtttcaccacccccggggacgggccacgcagcaccccgcagctggtgcgcacccatgaggatgtgcctgggcccgtgggacacctgagcttcagtgagatcctggacacatcgctgaaggtcagctggcaagagccgggagagaaaaatggcatcctcacagggtaccggatctcctgggaggagtacaatcgaaccaacacccgtgtgacccactacctgcccaacgtgaccctggagtaccgtgtcacgggcctcaccgcgctcaccacctacaccatcgaggtggccgccatgacctcaaagggccagggccaagtgtccgcctccaccatctcctctggggtgccccagaactcccagggccccccaccaacctgggcatttccaacatcggcccccgctctgtgaccttgcagttcaggccaggctacgatgggaaaacctccatctcccgctggctggtggaagcccaggtaggcgtggttggggagggagaggagtggttgctgatccaccagctctccaatgagcccgatgcccgctccatggaggtgcccgacctcaaccccttcacctgctacagcttccgcatgcgccaggtgaacatcgtgggcaccagcccccccagtcagccttctagaaagatccagaccctgcaggcaccccctgacatggccccagccaatgtgtctctgcgcacagccagtgagaccagcctgtggctgcgctggatgcctctcccggagatggaatacaatgggaaccctgagtccgtgggctataagatcaagtacagccggtcagacgggcatggcaagacgctgagccacgtggtgcaggaccgtgtggagcgggactacaccatcgaggacctggaggagtggacagagtaccgcgtccaggtccaggccttcaacgccatcgggagcgggccctggagccagacggtggtgggcaggacccgggagtcagttccctcttccggccccaccaatgtgtctgcactggccaccacctccagcagcatgctggtgcgctggagcgaggtccccgaggctgatcgcaacgggctcgtgctgggctataaggtgatgtataaggagaaggactcggacacccagccccgattctggctggtggaaggcaactcgtctcgcagtgcccagctcaccggcttgggcaaatacgtgctctatgaagtccaggtgctggccttcacacgcatcggggacggcagccccagccaccctcccatcctggagcggacgctggatgatgtcccaggaccacccatgggcatcctgttcccagaggtgcggaccacgtctgtgcggctgatctggcagccccctgccgcccccaatggcatcattcttgcttaccagatcacacaccggctcaacaccaccacggccaacaccgccactgtggaggtgctggcacccagcgcccggcagtacacagccacgggcctcaagccagagtctgtctacctgttccgcatcacggcccagacccgcaagggctggggagaagctgccgaggccttggtggtgaccaccgagaagagagaccgtccgcagccccccagcaggccgatggtgcagcaggaggatgtgagagcacgcagcgtgctgctgtcctgggagccagggagcgacgggctctcccctgtgcgctactacaccatccagacccgcgagctgcccagcggcaggtgggcactgcactcggcctccgtgagccacaatgcctccagcttcattgtggacaggctgaagcccttcacgtcctacaagttccgagtgaaggcgaccaatgacattggcgacagcgagttcagcgaggagtcggagtcactgaccaccctgcaggctgcccccgatgaagcacccaccatcctctccgtgacgccccacaccaccacctccgtgctaatccgatggcagccgccagcagaggacaagatcaatggcatcctcctgggcttccggatccgataccgggagctgctctatgaaggactgaggggcttcacgcttcgaggcatcaacaacccaggggccacatgggctgagcttacctccatgtactccatgcggaacctgagccggcccagcctcacgcagtacgagctggacaacctgaacaagcacaggcggtacgagatacggatgagcgtgtacaacgctgtgggtgaggggccctccagccccccgcaggaggtctttgttggggaggcagtgcccacagcagcacctcgtaacgtggtcgtccacggcgccacggccacacagctggacgtgacttgggagccacctccgctggacagccagaatggagacatccaggggtacaagatttatttctgggaagcccagcgggggaacctcacagagcgagtgaagacgcttttcccggctgagaacagcgtgaagctcaagaacttgactggctacacggcctacatggtcagcgtggccgccttcaacgccgctggggatgggcctcggagcacccccacccaaggccagacccagcaagcagcccccagcgctcccagctcggtcaagttcagtgagctgaccacaacctcagtgaatgtgtcctgggaagccccgcagttccccaatggcatcctggagggctacaggctggtgtacgagccctgcagccccgtggatggagtcagcaagatcgtgaccgtggacgtgaaggggaacagccccctgtggctgaaggtgaaggacctggcggagggggtgacctacaggttccgcatcagagccaagaccttcacctacgggccggagatcgaagccaacgtcaccacgggccccggagaaggtgccccaggaccgcctggcgtgcccatcatcgtgcggtacagctctgccatcgccattcactggtccagcggagacccgggcaaagggcccatcacccgctacgtcatcgaggccagaccttcaggtgcgccccgccctgctgggctgagaccccacagctcattatctcccttcttcctgggtccctccacttggggcacttgcctctgtcctccgcctgagaaggcgcttgtgctactacaggtgaagtcacctggccctgttgaggagtgggaaactgggttggggggctcctagagctggactcctagctaagtaacccccaggaggcccccagagaacggctgttagtgctagctgaggaccagcttgggttgaggattgctcaggaagccggaagcctgagcacgtggctcacgtgggtcacacaccgaatcctccacacgaccccactgatgggtgccccataactaagaagaccctggctgcctctcgaagccctgtctctgccatcatggctgtctcagtggctgctataatcgtaccagcctttcctgtcaagcctgaaattgaatcacaagaacttccaaagccatcaggagatgagtgacagataagtcagtcggggggctgctccccactgctccggtttcacccatcctgacacccgcttgctgggctctgcttactctcaggagcttgcagccactgccagctccctgcgttgctaggtttccaagttaatcagaggtgccagagtcagcaagagcaggaggcctgttctctgtatcccatggatccgcggttaggtgattaaaattgagaaggaaaac

SEQ ID NO: 383069 - DNA, 5120 bp, Homo sapiens
ctagtcgacgtctaggtggaaagcgcgtgcacattgcccggagggaccgtgggaactccctgcagctgtccactcggtgactttactgctgtagacccccagtccatcatgatccagtggcagccgcctcctgagagccaccagaatggaattctcaagggttacatcatcaggtactgcctggccgggctgcccgtggggtaccagtttaagaacatcacggatgctgatgtgaacaacctgctgctggaggatctcatcatttggaccaactacgagatcgaggtggctgcttacaacagcgctgggctgggggtctacagcagtaaagtcaccgagtggacgctgcagggagttcccacagtccctccgggcaatgtgcacgcggaagccaccaattccacgaccatccgcttcacctggaacgcccccagcccccagttcatcaacggcatcaaccagggctacaagctgatcgcctgggagccggaacaggaagaggaggttaccatggtgaccgcccggcctaactttcaagacagcatccacgtgggcttcgtgtctggcctgaagaagttcaccgagtacttcacctcagtgctgtgtttcaccacccccggggacgggccacgcagcaccccgcagctggtgcgcacccatgaggatgtgcctgggcccgtgggacacctgagcttcagtgagatcctggacacatcgctgaaggtcagctggcaagagccgggagagaaaaatggcatcctcacagggtaccggatctcctgggaggagtacaatcgaaccaacacccgtgtgacccactacctgcccaacgtgaccctggagtaccgtgtcacgggcctcaccgcgctcaccacctacaccatcgaggtggccgccatgacctcaaagggccagggccaagtgtccgcctccaccatctcctctggggtgccccagaactcccagggccccccaccaacctgggcatttccaacatcggcccccgctctgtgaccttgcagttcaggccaggctacgatgggaaaacctccatctcccgctggctggtggaagcccaggtaggcgtggttggggagggagaggagtggttgctgatccaccagctctccaatgagcccgatgcccgctccatggaggtgcccgacctcaaccccttcacctgctacagcttccgcatgcgccaggtgaacatcgtgggcaccagcccccccagtcagccttctagaaagatccagaccctgcaggcaccccctgacatggccccagccaatgtgtctctgcgcacagccagtgagaccagcctgtggctgcgctggatgcctctcccggagatggaatacaatgggaaccctgagtccgtgggctataagatcaagtacagccggtcagacgggcatggcaagacgctgagccacgtggtgcaggaccgtgtggagcgggactacaccatcgaggacctggaggagtggacagagtaccgcgtccaggtccaggccttcaacgccatcgggagcgggccctggagccagacggtggtgggcaggacccgggagtcagttccctcttccggccccaccaatgtgtctgcactggccaccacctccagcagcatgctggtgcgctggagcgaggtccccgaggctgatcgcaacgggctcgtgctgggctataaggtgatgtataaggagaaggactcggacacccagccccgattctggctggtggaaggcaactcgtctcgcagtgcccagctcaccggcttgggcaaatacgtgctctatgaagtccaggtgctggccttcacacgcatcggggacggcagccccagccaccctcccatcctggagcggacgctggatgatgtcccaggaccacccatgggcatcctgttcccagaggtgcggaccacgtctgtgcggctgatctggcagccccctgccgcccccaatggcatcattcttgcttaccagatcacacaccggctcaacaccaccacggccaacaccgccactgtggaggtgctggcacccagcgcccggcagtacacagccacgggcctcaagccagagtctgtctacctgttccgcatcacggcccagacccgcaagggctggggagaagctgccgaggccttggtggtgaccaccgagaagagagaccgtccgcagccccccagcaggccgatggtgcagcaggaggatgtgagagcacgcagcgtgctgctgtcctgggagccagggagcgacgggctctcccctgtgcgctactacaccatccagacccgcgagctgcccagcggcaggtgggcactgcactcggcctccgtgagccacaatgcctccagcttcattgtggacaggctgaagcccttcacgtcctacaagttccgagtgaaggcgaccaatgacattggcgacagcgagttcagcgaggagtcggagtcactgaccaccctgcaggctgcccccgatgaagcacccaccatcctctccgtgacgccccacaccaccacctccgtgctaatccgatggcagccgccagcagaggacaagatcaatggcatcctcctgggcttccggatccgataccgggagctgctctatgaaggactgaggggcttcacgcttcgaggcatcaacaacccaggggccacatgggctgagcttacctacctgaacaagcacaggcggtacgagatacggatgagcgtgtacaacgctgtgggtgaggggccctccagccccccgcaggaggtctttgttggggaggcagtgcccacagcagcacctcgtaacgtggtcgtccacggcgccacggccacacagctggacgtgacttgggagccacctccgctggacagccagaatggagacatccaggggtacaagatttatttctgggaagcccagcgggggaacctcacagagcgagtgaagacgcttttcccggctgagaacagcgtgaagctcaagaacttgactggctacacggcctacatggtcagcgtggccgccttcaacgccgctggggatgggcctcggagcacccccacccaaggccagacccagcaagcagcccccagcgctcccagctcggtcaagttcagtgagctgaccacaacctcagtgaatgtgtcctgggaagccccgcagttccccaatggcatcctggagggctacaggctggtgtacgagccctgcagccccgtggatggagtcagcaagatcgtgaccgtggacgtgaaggggaacagccccctgtggctgaaggtgaaggacctggcggagggggtgacctacaggttccgcatcagagccaagaccttcacctacgggccggagatcgaagccaacgtcaccacgggccccggagaaggtgccccaggaccgcctggcgtgcccatcatcgtgcggtacagctctgccatcgccattcactggtccagcggagacccgggcaaagggcccatcacccgctacgtcatcgaggccagaccttcagacgagggactatgggacatcctcatcaaagacatccccaaggaggtgagctcctacacgttcagcatggacatcctgaagccgggcgtgagctatgacttccgggtcatcgcggtcaacgactatggtttcggcacccccagcagcccctcccagtctgtgccagcccagaaagccaaccccttctatgaggagtggtggttcttggtggtcattgccctggtcggcctcatcttcatcctgcttctggtcttcgtgctcatcatccggggccagagcaagaagtacgccaagaagacagactcggggaacagtgccaagtctggagccctaggccacagcgagatgatgagcttggatgaaagcagcttccctgccctggaactcaacaacaggcggctctccgtcaagaactctttctgccgaaagaacggcctgtacaccaggtctccccccaggcccagcccaggcagcctgcactactcggatgaggatgtcaccaaatacaacgacctcatccctgcagagagcagcagcctgacggagaagccctcagaaatctccgactctcagggaagtgacagcgagtacgaggtcgactcaaaccaccagaaggcccactcctttgtcaaccactacatcagtgaccccacatactacaactcgtggcggcgacagcagaggggcatctcgagggcacaggcctacagctacacggagagcgactcgggtgagccagaccacaccaccgtcaccaacagcaccagcacccagcagggcagcctctttcggcccaaggccagtcggactccaacgccccagaacccccctaaccccccaagtcagcagagcaccctctaccgtccccccagcagcctggccccaggctcccgggctcccatagcaggattttcatcatttgtttgacatcagaagaggaaaaagcagaaagagaaatggcaccaaactcctccttcacccctcctctcactgcctgccagaaaacaaaaacaccaagaaaccaagtcaacttttcacctcctgagtttatttttccagagattccagggccagcaaagccggcgttcagaaggagggagaaaaccgtgagaggatgtgtgtggccagcagctcttcagctttgagatggtggggttcactgctcccttgggaattacacggagctggggaagtggctgtgtcactgctatggacacggagtggggcgggcatctggagagagagagggagcggaggctaaggactggaggccgccaggcaggcgtggccgagggaagaaaaagcttctggatgtccagccagctgcccccttccagcccctccaggacccctggacccactgccgctgctctctgcaaaaagaatgggcatcccggaggccacgcctatcttctctctctgctcctccttccctccatgcaccatcactgtggctggcaggcatcggacagcctcatccagaccccctgccctgtcttggcaacctctactgcccatctcccctgctcaacttctccaccaagcatttggtttatttagaaaaaggaagaaaaacaaaaaacaaaaaactaaagggtg

SEQ ID NO: 383070 - DNA, 1379 bp, Homo sapiens
ggggaatcacttgagcctaggagtgtagaccagcctcggtaacaccgtgagaccatctctacaaaaaaaaaaaaaaaataagaagaaaaattagttgggtgtggtgacgagtacacataggcccagccactcgggaagctgaggtgggaggatcacttgagcctggaaagtcgaggccccagtgagccgagattgtaccactgtactccagcctgggcaacagagccagaccctgtctcaaaaaacaaacaacttgatttttaataactctgatagtccatcttatatatcataatatacagttaacgactgagtaagtatgtaggttttcaatctgtgttcgttataagcacacctacataactttgtgttttctaatatctttagggcagatcaaaggaaggaaagtgggggaggagagagggaaaatagtgtaaatgaagaaactgagcagtgtattgtgcagaattggtgtctgacgttaaagaagaaaaaacaagggtaccttgatgccccagggtggtctttgtaaaataatccaaagactataaagttcagtttaaaaaaaccaaacacatagctataataaattaggaccatctgttgttctacccaggcctgcgtactcagtctccagcctgttgcttatttaagaatgcctttacaatggtgaaggagtgctgccagggtgtctggagggagtcaggggaggcgtgtggggcaaggaggaaggcagcagcttggggagccagcatgggctgctgtgctgttcccacactggttaccctttggggccagaatcaatgtggccactgtggccttgagattcttgccacctgtggcctttgacagcccatccatgggtatgggatgggagttggggttggcctgcttaaaaaaaaaaaaaaaaaaacaaaacaagtgaaatcaattttagaatgttttgtaaaaaagggaatttcacttgaacatttaataacctatgactcttttacatatacagcctcccttggtgttcaaggggaattggttccaggacctcccgctacaccaaaatctgtagatgttaaagtcctttatatatataaaagggtgtagtatttgcatataagctatgcgcatcctcctgtatactttaaatcatctctagttacttataatagctaatacagtgtgaatgctatgtaaatagttgttatactgtcttgtttctttatttgtattcttatttttcctgaaatttttgatctatggttggtagaatccatggaaatggagggcgggctatacctgtctctgcatgagcctagtattaatctgttttgcaaagtctgtgaaccaatctaatgtaggagctttgcctggggatcctctagtgg

SEQ ID NO: 383071 - DNA, 471 bp, Homo sapiens
cagcaaacaccttggttgcaaccccatgaaagaccttggtccagaagttcccagtaagccacacctggcttcctgacccaaaataacagatgtttgtgttttcagctgctaagctttaagataatttgtttatgtagaaataaataagggacaaagacccctggagatctttgaggaatcccactttgtatatgtagaaactgagggccaaaaggagaacaatcacttacacaaagtctggagacgactcacatggtcactaaatccttttgctctttctcatttttactctttaactggctcctcactttgtagatggttggcactgggctttgcagcaacccattgttatgtttctcttgaggcttctaaagcctcattaattcagtcatcaaatattttttgggtgtccactatgtgccaggttaatgctaggttcaagaaatacagtaatatacaaaaacaatccta

SEQ ID NO: 383072 - DNA, 883 bp, Homo sapiens
attctttttttcccttagattttaatccaagtgattatgaatgtcaaggattaaaatttgggggggttatttgggattccctggattcagatttctgagattatgcttcctttcctttaaggaaaggttttcattttcattataatacaaaaagcaaactgcttattacttttccaccgtacaaaatgcagttgacctacctcaacgctttgtgcattcacctgaacagaagcattttggataactaacgcgtgcttaagcctctgaggacctcattcactaagaggacgaggcggcgcaagtccagctgtggtcagtctcagtgttcccttcagggtccgccggctcacgctgggagaatgagagggacttcagatgctgcttcagttcccagctgtggctgaagctactgggttcacccagctcacctacagtttacagagaaataaagcaaaactcagatgcattcagacagaaccccacctcgagggcaagcctcagctctgatgaagaccagctgacaggcccctggctcccctaagccatggcagaggagatcattcattcacatgtcagagacaaagccccaggagtctggattgtgaagtaaacgctgagcccgaccacaaccactgtgaatactgggcaactggggcgtctcagaggattcaggtaattgaacaaatagacttcatacggaatctcaactctcctctggtcagcaatatcagatgtacttctgtgtgaataataaaccagactgcctggatgcgggagcacacgcctggaatcctggcactttgggaggctgagatgggaggatcactccagcctaggagtttgagacctgcctgggcaacatagtgagatcccatctttatta

SEQ ID NO: 383073 - DNA, 92 bp, Homo sapiens
actgcaggaacagccagcaccagagatatctcctgcaaggcctcctaggtgggttcttggaagaaaggaatgccaatgaatatgattgcaag

SEQ ID NO: 383074 - DNA, 329 bp, Homo sapiens
tccagggctaaaaagttaaacaacaacaataaaaaggctgaaactagagtagtatactagcagtgtgtttcctttgggggcatttggctgatagcagaagtagagcacaatcagggacaggtgacaggctgctctctacccaaagcagagagatagaattcatatccctgtaacctcccaggcacatgcttcaatgtcaatgggtgccattccatggtagttgaggtaaatggtacctgtgtttcagggggtgatgttttcatagaataaagtttaagtatttccacttgaaattgtacaactcatggtattggagaagcaccttgccc

SEQ ID NO: 383075 - DNA, 411 bp, Homo sapiens
ggcatctcatccagcctcataaagctatgaggatggctataacatgacatcacgggtaagaagacagccctgttccctacatatttctcctgctttgctcactgattactgaaactttttttttttttttttttttgacagaagcaaaggctttcactttctggagtgaaaagagaaagggaacatggacatgctccttgaatggttaatcaccctgccccccactgatgcctgtgtgacccaagctttcctccttccttgctagtcacttgccccaagacttctacacatcaactccccgctctggagtctcctctgttgtcataaaccattgggttgtccagaatcttggctctcaaaacatggtccatgaaccagcagtattagcatcacctatgaatttgtgtccaa

SEQ ID NO: 383076 - DNA, 728 bp, Homo sapiens
aatttttttgttttttattgtagacatcttttacagttttgttaattcctaggcattttattttatgtgtagcccttgtaaatgatttttttcagattgttcactattggcatttagaactgttactgattttttgtatgtcaattttgtatcctgcaacctcactaaattgttttataacttcaaatgattttttggtgaagtacttaggcttttctaaatataagattatattataaatttgacatctccctttccagtttacatgtcctttgtttctttttcttttttgaagggatagcagagaacttcttaaacctagagaaagacataaatatccaagtacaagaagaatatagaacaccaaacagatttaacccaaataagactaaatcaagacatttaataatcaaactccccaagaacaaggataaagaaaagatggccaggtgcggtgactcacgcctataatcccagcactttgggaagctgaggcgggtggatcacctgaggtcaggagtttgagaccagcctcaacatggagaaaccccgtctcttctaaaaatacaaaattagccgggtgtggtggtgcatgcctgtaatcccagctacttgggaggctgaggcaggagaattgcttgaacctgggaggcggaggttgcggtgagctgagattgcgccattgcactccagcctgggcaacaagagcgaaactccatctcaaaaaa

SEQ ID NO: 383077 - DNA, 3484 bp, Homo sapiens
gccgcccagcagcccgtgggcaggcgcggcggagcgagcggggccggcggcgggcgccgagggacgccgaggcctcgggcgggggctggcccggggttccaggtctccagtgggggctgcagactaagcaaaatgaggcggttcctgaggccagggcatgaccctgtgcgggagaggctcaagcgggacctgttccagtttaacaagacggtggagcatggcttcccgcaccagcccagcgccctcggctacagcccgtccctgcacatcctggccatcggcacccgttctggagccatcaagctctacggagccccaggcgtggagttcatggggctgcaccaggagaacaacgctgtgacgcagatccacctcctgcccggccagtgccagctggtcaccctgctggatgacaacagcctgcacctttggagcctgaaggtcaagggcggggcatcggagctgcaggaggatgagagcttcacactgcgtggacccccaggggctgcccccagtgccacacagatcaccgtggtcctgccacattcctcctgcgagctgctctacctgggcaccgagagtggcaacgtgtttgtggtgcagctgccagcttttcgtgcgctggaggaccggaccatcagctcggacgcggtgctgcagcggttgccagaggaggcccgccaccggcgtgtgttcgagatggtggaggcactgcaggagcaccctcgagaccccaaccagatcctgatcggctacagccgaggcctcgttgtcatctgggacctacagggcagccgcgtgctctaccacttcctcagcagccagcaactggagaacatctggtggcagcgggacggccgcctgctcgtcagctgtcactctgacggcagctactgccagtggcccgtgtccagcgaagcccagcaaccagagcccctccgcagcctcgtgccttacggtccctttccttgcaaagcgattaccagaatcctctggctgaccactaggcaggggttgcccttcaccatcttccagggtggcatgccacgggccagctacggggaccgccactgcatctcagtgatccacgatggccagcagacggccttcgacttcacctcccgtgtcatcggcttcactgtcctcacagaggcagaccctgcagccagcctttgacgacccctatgccctggtggtgctggctgaggaggagctggtggtgattgacctgcagacagcaggctggccaccggtccagctgccctacctggcttctctgcactgttccgccatcacctgctctcaccacgtctccaacatcccgctgaagctgtgggagcggatcattgccgccggcagccggcagaacgcacacttctccaccatggagtggccaattgatggtggcaccagcctgaccccagccccaccccagagggacctgctgctcacagggcacgaggacggcacggtgcggttctgggatgcctcgggtgtctgcctgcggctgctctacaaactcagcactgtgcgcgtgttcctcaccgacacggaccccaacgagaacttcagtgcccagggcgaggacgagtggcccccactccgcaaggtgggctcctttgacccctacagtgatgacccccggctgggcatccagaagatcttcctctgcaagtacagcggctacctggctgtggcaggcacggcagggcaggtgctggtactggaactgaatgacgaggcagcggagcaggctgtggagcaggtggaggccgacctgctgcaggaccaagagggctaccgctggaaggggcacgagcgcctggcagcccgctcagggcccgtgcgctttgagcctggctttcagcccttcgtgttggtgcagtgtcagcccccggctgtggtcacctccttggccctgcactctgagtggcggctcgtggccttcggcaccagccatggctttggcctctttgaccaccagcagcggcggcaggtctttgttaagtgcacactgcaccccagtgaccagctggccttggagggcccactctcccgcgtcaagtccctcaagaagtccttgcgtcagtcattccgccggatgcgtcggagccgggtgtccagccggaagcggcacccggctggccccccaggagaggcacaggaggggagtgccaaggctgagcggccaggcctccagaacatggagctggcgcctgtgcagcgcaagatcgaggctcgctcggcagaggactccttcacaggcttcgtccggaccctgtactttgctgacacctacctgaaggacagctcccggcactgcccctcgctgtgggctggcaccaatgggggcaccatctatgccttctccctgcgtgtgcctcccgccgagcggagaatggatgagcctgtgcgggcagagcaggccaaggagatccagctgatgcaccgggcgccggtggtgggcatcctggtgctcgacggacacagcgtaccccttcccgagcccctcgaagtggcccatgatctgtcgaagagccctgacatgcagggaagccaccagctgctcgtcgtatcagaggagcagttcaaggtgttcacgctgcccaaggtgagtgccaagctgaagttgaagctgacggccctggagggctcaagagtgcggcgggtcagcgtggcccacttcggcagtcgtcgagccgaggactacggggagcaccacctggcagtccttaccaacctgggcgacatccaggtggtctcgctgcccctgctcaagccccaggtgcgctacagctgcatccgccgggaggacgtcagtggcatcgcctcctgcgtcttcaccaaatatggccaaggcttctacctgatctcaccctcggagtttgagcgcttctctctctccaccaagtggctggtggagccccggtgtctggtggattcagcagaaaccaagaaccaccgccctggtaacggtgcgggccccaagaaggccccgagccgagccaggaactcagggactcagagtgatggcgaggagaagcagcccggcctggtgatggagcgcgctctgctcagtgatgagagagcggcaactggcgttcacatcgagccgccgtggggtgcagcctcagcaatggcggagcagagtgagtggctgagcgtccaggctgcgcgatgagcacacactactactgatggcctttcgggggtccctgccccaaccggagaggccggtgcacagggccccgccaggggctgggggcatcccggcttccacaatgcagctgctctgggcctcgggagaggagagaccccagtcccctgggctgcccttcccgggcctcgtctgtctgggtcctttggtcaatgttgcacagtttttattgctcccatccctttttgtagtgggctgggttttaagttataaatgttaactgcctctgggtgaaaaagtttttaataaacacctattacctcttga

SEQ ID NO: 383078 - DNA, 429 bp, Homo sapiens
caggaccatcagtaaagacagggccaggtgcagtggctcctgcctgtaaccccagtgctgtgggaggccaagtaggagagcttcgggagtgggtgcccagggttaggtgtgggaggcatggggcaggaccatcagtaaagacagggccaggtgcagtggctcctgcctgtaaccccagtgctgtgggaggccaaggtggtaggatcgcttgaacccaggagttcaagtccagcctggacaacgtagggagacccttgtctctacaaaaaataaaaaaattagccaggtgttgtggcacgtacctgtagtcctagctactcaggaggctgaggtgggaggatcacttgagcctgggaggtggaggttgcagcgaaccaggatcatgctactgtactcagcctgggtgacatagccagactgtgtctcaaa

SEQ ID NO: 383079 - DNA, 309 bp, Homo sapiens
ctagaggatcccgcattgcttctgtgtttcaccaaatatggcaaggcttctacctgatctcaccctcggagtttgagcgcttctctctctccaccaagtggctggtggagccccggtgtctggtggattcagcagaaaccaagaaccaccgccctggtaacggtgcgggccccaagaaggccccgagccgagccaggaactcagggactcagagtgatggcgaggagaagcagcccggcctggtgatggagcgcgctctgctcagtgatgagaagtcctgaaggaaatccagagcacgggtaccgagct

SEQ ID NO: 383080 - DNA, 3562 bp, Homo sapiens
gactgtgaagctggcctggccccggggtggcagcctactggactcggagagagaggccctgctccacctgtttgggccgggcctaatcgatacctgagtgccaggacagacccctgcagctccttctgtttctccaggtctccagtgggggctgcagactaagcaaaatgaggcggttcctgaggccagggcatgaccctgtgcgggagaggctcaagcgggacctgttccagtttaacaagacggtggagcatggcttcccgcaccagcccagcgccctcggctacagcccgtccctgcacatcctggccatcggcacccgttctggagccatcaagctctacggagccccaggcgtggagttcatggggctgcaccaggagaacaacgctgtgacgcagatccacctcctgcccggccagtgccagctggtcaccctgctggatgacaacagcctgcacctttggagcctgaaggtcaagggcggggcatcggagctgcaggaggatgagagcttcacactgcgtggacccccaggggctgcccccagtgccacacagatcaccgtggtcctgccacattcctcctgcgagctgctctacctgggcaccgagagtggcaacgtgtttgtggtgcagctgccagcttttcgtgcgctggaggaccggaccatcagctcggacgcggtgctgcagcggttgccagaggaggcccgccaccggcgtgtgttcgagatggtggaggcactgcaggagcaccctcgagaccccaaccagatcctgatcggctacagccgaggcctcgttgtcatctgggacctacagggcagccgcgtgctctaccacttcctcagcagccagcaactggagaacatctggtggcagcgggacggccgcctgctcgtcagctgtcactctgacggcagctactgccagtggcccgtgtccagcgaagcccagcaaccagagcccctccgcagcctcgtgccttacggtccctttccttgcaaagcgattaccagaatcctctggctgaccactaggcaggggttgcccttcaccatcttccagggtggcatgccacgggccagctacggggaccgccactgcatctcagtgatccacgatggccagcagacggccttcgacttcacctcccgtgtcatcggcttcactgtcctcacagaggcagaccctgcagccagcctttgacgacccctatgccctggtggtgctggctgaggaggagctggtggtgattgacctgcagacagcaggctggccaccggtccagctgccctacctggcttctctgcactgttccgccatcacctgctctcaccacgtctccaacatcccgctgaagctgtgggagcggatcattgccgccggcagccggcagaacgcacacttctccaccatggagtggccaattgatggtggcaccagcctgaccccagccccaccccagagggacctgctgctcacagggcacgaggacggcacggtgcggttctgggatgcctcgggtgtctgcctgcggctgctctacaaactcagcactgtgcgcgtgttcctcaccgacacggaccccaacgagaacttcagtgcccagggcgaggacgagtggcccccactccgcaaggtgggctcctttgacccctacagtgatgacccccggctgggcatccagaagatcttcctctgcaagtacagcggctacctggctgtggcaggcacggcagggcaggtgctggtactggaactgaatgacgaggcagcggagcaggctgtggagcaggtggaggccgacctgctgcaggaccaagagggctaccgctggaaggggcacgagcgcctggcagcccgctcagggcccgtgcgctttgagcctggctttcagcccttcgtgttggtgcagtgtcagcccccggctgtggtcacctccttggccctgcactctgagtggcggctcgtggccttcggcaccagccatggctttggcctctttgaccaccagcagcggcggcaggtctttgttaagtgcacactgcaccccagtgaccagctggccttggagggcccactctcccgcgtcaagtccctcaagaagtccttgcgtcagtcattccgccggatgcgtcggagccgggtgtccagccggaagcggcacccggctggccccccaggagaggcacaggaggggagtgccaaggctgagcggccaggcctccagaacatggagctggcgcctgtgcagcgcaagatcgaggctcgctcggcagaggactccttcacaggcttcgtccggaccctgtactttgctgacacctacctgaaggacagctcccggcactgcccctcgctgtgggctggcaccaatgggggcaccatctatgccttctccctgcgtgtgcctcccgccgagcggagaatggatgagcctgtgcgggcagagcaggccaaggagatccagctgatgcaccgggcgccggtggtgggcatcctggtgctcgacggacacagcgtaccccttcccgagcccctcgaagtggcccatgatctgtcgaagagccctgacatgcagggaagccaccagctgctcgtcgtatcagaggagcagttcaaggtgttcacgctgcccaaggtgagtgccaagctgaagttgaagctgacggccctggagggctcaagagtgcggcgggtcagcgtggcccacttcggcagtcgtcgagccgaggactacggggagcaccacctggcagtccttaccaacctgggcgacatccaggtggtctcgctgcccctgctcaagccccaggtgcgctacagctgcatccgccgggaggacgtcagtggcatcgcctcctgcgtcttcaccaaatatggccaaggcttctacctgatctcaccctcggagtttgagcgcttctctctctccaccaagtggctggtggagccccggtgtctggtggattcagcagaaaccaagaaccaccgccctggtaacggtgcgggccccaagaaggccccgagccgagccaggaactcagggactcagagtgatggcgaggagaagcagcccggcctggtgatggagcgcgctctgctcagtgatgagagagtcctgaaggaaatccagagcacactggagggagaccgcgggagcggcaactggcgttcacatcgagccgccgtggggtgcagcctcagcaatggcggagcagagtgagtggctgagcgtccaggctgcgcgatgagcacacactactactgatggcctttcgggggtccctgccccaaccggagaggccggtgcacagggccccgccaggggctgggggcatcccggcttccacaatgcagctgctctgggcctcgggagaggagagaccccagtcccctgggctgcccttcccgggcctcgtctgtctgggtcctttggtcaatgttgcacagtttttattgctcccatccctttttgtagtgggctgggttttaagttataaatgttaactgcctctgggtgaaaaagtttttaataaacacctattacctcttga

SEQ ID NO: 383081 - DNA, 3843 bp, Homo sapiens
gccgcccagcagcccgtgggcaggcgcggcggagcgagcggggccggcggcgggcgccgagggacgccgaggcctcgggcgggggctggcccggggttccaggtctccagtgggggctgcagactaagcaaaatgaggcggttcctgaggccagggcatgaccctgtgcgggagaggctcaagcgggacctgttccagtttaacaagacggtggagcatggcttcccgcaccagcccagcgccctcggctacagcccgtccctgcacatcctggccatcggcacccgttctggagccatcaagctctacggagccccaggcgtggagttcatggggctgcaccaggagaacaacgctgtgacgcagatccacctcctgcccggccagtgccagctggtcaccctgctggatgacaacagcctgcacctttggagcctgaaggtcaagggcggggcatcggagctgcaggaggatgagagcttcacactgcgtggacccccaggggctgcccccagtgccacacagatcaccgtggtcctgccacattcctcctgcgagctgctctacctgggcaccgagagtggcaacgtgtttgtggtgcagctgccagcttttcgtgcgctggaggaccggaccatcagctcggacgcggtgctgcagcggttgccagaggaggcccgccaccggcgtgtgttcgagatggtggaggcactgcaggagcaccctcgagaccccaaccagatcctgatcggctacagccgaggcctcgttgtcatctgggacctacagggcagccgcgtgctctaccacttcctcagcagccagcaactggagaacatctggtggcagcgggacggccgcctgctcgtcagctgtcactctgacggcagctactgccagtggcccgtgtccagcgaagcccagcaaccagagcccctccgcagcctcgtgccttacggtccctttccttgcaaagcgattaccagaatcctctggctgaccactaggcaggggttgcccttcaccatcttccagggtggcatgccacgggccagctacggggaccgccactgcatctcagtgatccacgatggccagcagacggccttcgacttcacctcccgtgtcatcggcttcactgtcctcacagaggcagaccctgcagccagcctttgacgacccctatgccctggtggtgctggctgaggaggagctggtggtgattgacctgcagacagcaggctggccaccggtccagctgccctacctggcttctctgcactgttccgccatcacctgctctcaccacgtctccaacatcccgctgaagctgtgggagcggatcattgccgccggcagccggcagaacgcacacttctccaccatggagtggccaattgatggtggcaccagcctgaccccagccccaccccagagggacctgctgctcacagggcacgaggacggcacggtgcggttctgggatgcctcgggtgtctgcctgcggctgctctacaaactcagcactgtgcgcgtgttcctcaccgacacggaccccaacgagaacttcagtgcccagggcgaggacgagtggcccccactccgcaaggtgggctcctttgacccctacagtgatgacccccggctgggcatccagaagatcttcctctgcaagtacagcggctacctggctgtggcaggcacggcagggcaggtgctggtactggaactgaatgacgaggcagcggagcaggctgtggagcaggtggaggccgacctgctgcaggaccaagagggctaccgctggaaggggcacgagcgcctggcagcccgctcagggcccgtgcgctttgagcctggctttcagcccttcgtgttggtgcagtgtcagcccccggctgtggtcacctccttggccctgcactctgagtggcggctcgtggccttcggcaccagccatggctttggcctctttgaccaccagcagcggcggcaggtctttgttaagtgcacactgcaccccagtgaccagctggccttggagggcccactctcccgcgtcaagtccctcaagaagtccttgcgtcagtcattccgccggatgcgtcggagccgggtgtccagccggaagcggcacccggctggccccccaggagaggcacaggaggggagtgccaaggctgagcggccaggcctccagaacatggagctggcgcctgtgcagcgcaagatcgaggctcgctcggcagaggactccttcacaggcttcgtccggaccctgtactttgctgacacctacctgaaggacagctcccggcactgcccctcgctgtgggctggcaccaatgggggcaccatctatgccttctccctgcgtgtgcctcccgccgagcggagaatggatgagcctgtgcgggcagagcaggccaaggagatccagctgatgcaccgggcgccggtggtgggcatcctggtgctcgacggacacagcgtaccccttcccgagcccctcgaagtggcccatgatctgtcgaagagccctgacatgcagggaagccaccagctgctcgtcgtatcagaggagcagttcaaggtgttcacgctgcccaaggtgagtgccaagctgaagttgaagctgacggccctggagggctcaagagtgcggcgggtcagcgtggcccacttcggcagtcgtcgagccgaggactacggggagcaccacctggcagtccttaccaacctgggcgacatccaggtggtctcgctgcccctgctcaagccccaggtgcgctacagctgcatccgccgggaggacgtcagtggcatcgcctcctgcgtcttcaccaaatatggccaaggcttctacctgatctcaccctcggagtttgagcgcttctctctctccaccaagtggctggtggagccccggtgtctggtggattcagcagaaaccaagaaccaccgccctggtaacggtgcgggccccaagaaggccccgagccgagccaggaactcagggactcagagtgatggcgaggagaagcagcccggcctggtgatggagcgcgctctgctcagtgatgagagagtcctgaaggaaatccagagcacactggagggagaccgcgggtgaggcaccgcccaggccagctggggtgggcccgaggctctgccagagggctcaggggagcgctgagagtggaggtccctgaggccatgactcccctgtctttgcctgtgcaggagcggcaactggcgttcacatcgagccgccgtggggtgcagcctcagcaatggcggaggtgggggctctgggcttgagtgcagctgccaaccgtgctgggaagggctgggaggaagagccccggccccactcccctgggtcccacggggctgacacgtgccctgatgaccaggaaagcaccatgtctgggctcagcgtgggcggctggggcaccccgtcctgcccagggtgatcttgagctgtccctctgtgtccttcagcagagtgagtggctgagcgtccaggctgcgcgatgagcacacactactactgatggcctttcgggggtccctgccccaaccggagaggccggtgcacagggccccgccaggggctgggggcatcccggcttccacaatgcagctgctctgggcctcgggagaggagagaccccagtcccctgggctgcccttcccgggcctcgtctgtctgggtcctttggtcaatgttgcacagtttttattgctcccatccctttttgtagtgggctgggttttaagttataaatgttaactgcctctgggtgaaaaagtttttaataaacacctattacctcttga

SEQ ID NO: 383082 - DNA, 4990 bp, Homo sapiens
  misc_feature (4337)..(4337): n is a, c, g, or t
  misc_feature (4718)..(4718): n is a, c, g, or t
  misc_feature (4878)..(4878): n is a, c, g, or t
  misc_feature (4973)..(4973): n is a, c, g, or t
  misc_feature (4985)..(4985): n is a, c, g, or t
  misc_feature (4990)..(4990): n is a, c, g, or t
gccgcccagcagcccgtgggcaggcgcggcggagcgagcggggccggcggcgggcgccgagggacgccgaggcctcgggcgggggctggcccggggttccaggtctccagtgggggctgcagactaagcaaaatgaggcggttcctgaggccagggcatgaccctgtgcgggagaggctcaagcgggacctgttccagtttaacaagacggtggagcatggcttcccgcaccagcccagcgccctcggctacagcccgtccctgcacatcctggccatcggcacccgttctggagccatcaagctctacggagccccaggcgtggagttcatggggctgcaccaggagaacaacgctgtgacgcagatccacctcctgcccggccagtgccagctggtcaccctgctggatgacaacagcctgcacctttggagcctgaaggtcaagggcggggcatcggagctgcaggaggatgagagcttcacactgcgtggacccccaggggctgcccccagtgccacacagatcaccgtggtcctgccacattcctcctgcgagctgctctacctgggcaccgagagtggcaacgtgtttgtggtgcagctgccagcttttcgtgcgctggaggaccggaccatcagctcggacgcggtgctgcagcggttgccagaggaggcccgccaccggcgtgtgttcgagatggtggaggcactgcaggagcaccctcgagaccccaaccagatcctgatcggctacagccgaggcctcgttgtcatctgggacctacagggcagccgcgtgctctaccacttcctcagcagccagcaactggagaacatctggtggcagcgggacggccgcctgctcgtcagctgtcactctgacggcagctactgccagtggcccgtgtccagcgaagcccagcaaccagagcccctccgcagcctcgtgccttacggtccctttccttgcaaagcgattaccagaatcctctggctgaccactaggcaggggttgcccttcaccatcttccagggtggcatgccacgggccagctacggggaccgccactgcatctcagtgatccacgatggccagcagacggccttcgacttcacctcccgtgtcatcggcttcactgtcctcacagaggcagaccctgcagccagcctttgacgacccctatgccctggtggtgctggctgaggaggagctggtggtgattgacctgcagacagcaggctggccaccggtccagctgccctacctggcttctctgcactgttccgccatcacctgctctcaccacgtctccaacatcccgctgaagctgtgggagcggatcattgccgccggcagccggcagaacgcacacttctccaccatggagtggccaattgatggtggcaccagcctgaccccagccccaccccagagggacctgctgctcacagggcacgaggacggcacggtgcggttctgggatgcctcgggtgtctgcctgcggctgctctacaaactcagcactgtgcgcgtgttcctcaccgacacggaccccaacgagaacttcagtgcccagggcgaggacgagtggcccccactccgcaaggtgggctcctttgacccctacagtgatgacccccggctgggcatccagaagatcttcctctgcaagtacagcggctacctggctgtggcaggcacggcagggcaggtgctggtactggaactgaatgacgaggcagcggagcaggctgtggagcaggtggaggccgacctgctgcaggaccaagagggctaccgctggaaggggcacgagcgcctggcagcccgctcagggcccgtgcgctttgagcctggctttcagcccttcgtgttggtgcagtgtcagcccccggctgtggtcacctccttggccctgcactctgagtggcggctcgtggccttcggcaccagccatggctttggcctctttgaccaccagcagcggcggcaggtctttgttaagtgcacactgcaccccagtgaccagctggccttggagggcccactctcccgcgtcaagtccctcaagaagtccttgcgtcagtcattccgccggatgcgtcggagccgggtgtccagccggaagcggcacccggctggccccccaggagaggcacaggaggggagtgccaaggctgagcggccaggcctccagaacatggagctggcgcctgtgcagcgcaagatcgaggctcgctcggcagaggactccttcacaggcttcgtccggaccctgtactttgctgacacctacctgaaggacagctcccggcactgcccctcgctgtgggctggcaccaatgggggcaccatctatgccttctccctgcgtgtgcctcccgccgagcggagaatggatgagcctgtgcgggcagagcaggccaaggagatccagctgatgcaccgggcgccggtggtgggcatcctggtgctcgacggacacagcgtaccccttcccgagcccctcgaagtggcccatgatctgtcgaagagccctgacatgcagggaagccaccagctgctcgtcgtatcagaggagcagttcaaggtgttcacgctgcccaaggtgagtgccaagctgaagttgaagctgacggccctggagggctcaagagtgcggcgggtcagcgtggcccacttcggcagtcgtcgagccgaggactacggggagcaccacctggcagtccttaccaacctgggcgacatccaggtggtctcgctgcccctgctcaagccccaggtgcgctacagctgcatccgccgggaggacgtcagtggcatcgcctcctgcgtcttcaccaaatatggccaaggcttctacctgatctcaccctcggagtttgagcgcttctctctctccaccaagtggctggtggagccccggtgtctggtggattcagcagaaaccaagaaccaccgccctggtaacggtgcgggccccaagaaggccccgagccgagccaggaactcagggactcagagtgatggcgaggccctgggccctgggcttccacatcctgacctcagtaaggagagagagagccaggccgaggagggcccaggcggggcgccctgacccggcctctaccttccagagaagcagcccggcctggtgatggagcgcgctctgctcagtgatgagagagtcctgaaggaaatccagagcacactggagggagaccgcgggagcggcaactggcgttcacatcgagccgccgtggggtgcagcctcagcaatggcggagcagagtgagtggctgagcgtccaggctgcgcgatgagcacacactactactgatggcctttcgggggtccctgccccaaccggagaggccggtgcacagggccccgccaggggctgggggcatcccggcttccacaatgcagctgctctgggcctcgggagaggagagaccccagtcccctgggctgcccttcccgggcctcgtctgtctgggtcctttggtcaatgttgcacagtttttattgctcccatccctttttgtagtgggctgggttttaagttataaatgttaactgcctctgggtgaaaaagtttttaataaacacctattacctcttgaaaaaaaaaaaaaaaaaaaaaaaaaaaaaaaaaaaaaaaaaaaaaaaaaaaagaaagaggagcaaaaattaaaacaagaagagaccaagaataacacagataaccaaatagatcgaaatgcaacagggccccccaagatggatacataacaatacaactaccggactaggaccgcagcatataaacaacctactaactcaatgagcaagacagacgtaaacctcagcaacactctcttaataacagcagacaccagcaacttctggggcgatcaggaaccactaatagtgaggccacacgatctactcgcacaaagccgaaatgtaaattaagcagcccccatccatagcggcacagagagaataacaagcccatacgcgaagcgtgaggaataaacggcgactatcagataaacacaatcacgagaaccacaacgatctacagtgacggacgtctaggacagacgagacatgacccaacactacaagggtcaaggaaagtgcacatacgcgtgaaccagcatcatcatacatcatgcacggcagcagcacgcgaacaaacacataaggcaacgcagtccaaccgaacagagcatcaacgacagacaacctcacactccagcaccatgaacaccagaacaacatacaacagccagccgactacagcacatgaatacaacaccaggagacaacaagagtagagtagaagnaacgtgaacgagacgacaatagaactgacgtgaagaagcaacgacaggacagacgaaggagaaagagaagacagaaggggacggacgtaagagcgaagatacggaaacgatgagagatgaaggaggaacgaagagaggaatacgctcacatgagagatcaagcagggacaggacgcaggagtcgataagcaagcgagacgaagatcgactgaagagacgaatgaagcacgagcggaagagtacagaagacacgagtacatacaagcaaacgaacagacgaacgacagaggacgaagcagcgagtgcgcgagacagcaccaaagagtgagcagacgacgaagaaatcagcatcgtagagacaggaccgaatcagaaaataanaaacgtgcgtgcacaggtgaacacgctgtagctgagaagcaagaaacgcacgtgagacaagaacaagaatcagacgcagtgaacgacgcatagttcaagaacgaggaccagaacgtgcatgagagccaaccagacgctagaacacagaagcagatgcacncaggaacaagacgaagacgagagcgaacgaagaagagcaatgcacgtgcgaccgagcacagccatagagcaagcagggcagcagaagcgcacagncaaagtgaagcngaagn

SEQ ID NO: 383083 - DNA, 3524 bp, Homo sapiens
gccgcccagcagcccgtgggcaggcgcggcggagcgagcggggccggcggcgggcgccgagggacgccgaggcctcgggcgggggctggcccggggttccaggtctccagtgggggctgcagactaagcaaaatgaggcggttcctgaggccagggcatgaccctgtgcgggagaggctcaagcgggacctgttccagtttaacaagacggtggagcatggcttcccgcaccagcccagcgccctcggctacagcccgtccctgcacatcctggccatcggcacccgttctggagccatcaagctctacggagccccaggcgtggagttcatggggctgcaccaggagaacaacgctgtgacgcagatccacctcctgcccggccagtgccagctggtcaccctgctggatgacaacagcctgcacctttggagcctgaaggtcaagggcggggcatcggagctgcaggaggatgagagcttcacactgcgtggacccccaggggctgcccccagtgccacacagatcaccgtggtcctgccacattcctcctgcgagctgctctacctgggcaccgagagtggcaacgtgtttgtggtgcagctgccagcttttcgtgcgctggaggaccggaccatcagctcggacgcggtgctgcagcggttgccagaggaggcccgccaccggcgtgtgttcgagatggtggaggcactgcaggagcaccctcgagaccccaaccagatcctgatcggctacagccgaggcctcgttgtcatctgggacctacagggcagccgcgtgctctaccacttcctcagcagccagcaactggagaacatctggtggcagcgggacggccgcctgctcgtcagctgtcactctgacggcagctactgccagtggcccgtgtccagcgaagcccagcaaccagagcccctccgcagcctcgtgccttacggtccctttccttgcaaagcgattaccagaatcctctggctgaccactaggcaggggttgcccttcaccatcttccagggtggcatgccacgggccagctacggggaccgccactgcatctcagtgatccacgatggccagcagacggccttcgacttcacctcccgtgtcatcggcttcactgtcctcacagaggcagaccctgcagccagcctttgacgacccctatgccctggtggtgctggctgaggaggagctggtggtgattgacctgcagacagcaggctggccaccggtccagctgccctacctggcttctctgcactgttccgccatcacctgctctcaccacgtctccaacatcccgctgaagctgtgggagcggatcattgccgccggcagccggcagaacgcacacttctccaccatggagtggccaattgatggtggcaccagcctgaccccagccccaccccagagggacctgctgctcacagggcacgaggacggcacggtgcggttctgggatgcctcgggtgtctgcctgcggctgctctacaaactcagcactgtgcgcgtgttcctcaccgacacggaccccaacgagaacttcagtgcccagggcgaggacgagtggcccccactccgcaaggtgggctcctttgacccctacagtgatgacccccggctgggcatccagaagatcttcctctgcaagtacagcggctacctggctgtggcaggcacggcagggcaggtgctggtactggaactgaatgacgaggcagcggagcaggctgtggagcaggtggaggccgacctgctgcaggaccaagagggctaccgctggaaggggcacgagcgcctggcagcccgctcagggcccgtgcgctttgagcctggctttcagcccttcgtgttggtgcagtgtcagcccccggctgtggtcacctccttggccctgcactctgagtggcggctcgtggccttcggcaccagccatggctttggcctctttgaccaccagcagcggcggcaggtctttgttaagtgcacactgcaccccagtgaccagctggccttggagggcccactctcccgcgtcaagtccctcaagaagtccttgcgtcagtcattccgccggatgcgtcggagccgggtgtccagccggaagcggcacccggctggccccccaggagaggcacaggaggggagtgccaaggctgagcggccaggcctccagaacatggagctggcgcctgtgcagcgcaagatcgaggctcgctcggcagaggactccttcacaggcttcgtccggaccctgtactttgctgacacctacctgaaggacagctcccggcactgcccctcgctgtgggctggcaccaatgggggcaccatctatgccttctccctgcgtgtgcctcccgccgagcggagaatggatgagcctgtgcgggcagagcaggccaaggagatccagctgatgcaccgggcgccggtggtgggcatcctggtgctcgacggacacagcgtaccccttcccgagcccctcgaagtggcccatgatctgtcgaagagccctgacatgcagggaagccaccagctgctcgtcgtatcagaggagcagttcaaggtgttcacgctgcccaaggtgagtgccaagctgaagttgaagctgacggccctggagggctcaagagtgcggcgggtcagcgtggcccacttcggcagtcgtcgagccgaggactacggggagcaccacctggcagtccttaccaacctgggcgacatccaggtggtctcgctgcccctgctcaagccccaggtgcgctacagctgcatccgccgggaggacgtcagtggcatcgcctcctgcgtcttcaccaaatatggccaaggcttctacctgatctcaccctcggagtttgagcgcttctctctctccaccaagtggctggtggagccccggtgtctggtggattcagcagaaaccaagaaccaccgccctggtaacggtgcgggccccaagaaggccccgagccgagccaggaactcagggactcagagtgatggcgaggagaagcagcccggcctggtgatggagcgcgctctgctcagtgatgagagagtcctgaaggaaatccagagcacactggagggagaccgcgggagcggcaactggcgttcacatcgagccgccgtggggtgcagcctcagcaatggcggagcagagtgagtggctgagcgtccaggctgcgcgatgagcacacactactactgatggcctttcgggggtccctgccccaaccggagaggccggtgcacagggccccgccaggggctgggggcatcccggcttccacaatgcagctgctctgggcctcgggagaggagagaccccagtcccctgggctgcccttcccgggcctcgtctgtctgggtcctttggtcaatgttgcacagtttttattgctcccatccctttttgtagtgggctgggttttaagttataaatgttaactgcttaacgcgaagttttataccttccggtgtgggttttgtgg

SEQ ID NO: 383084 - DNA, 3252 bp, Homo sapiens
  misc_feature (3016)..(3016): n is a, c, g, or t
gccgcccagcagcccgtgggcaggcgcggcggagcgagcggggccggcggcgggcgccgagggacgccgaggcctcgggcgggggctggcccggggttccaggtctccagtgggggctgcagactaagcaaaatgaggcggttcctgaggccagggcatgaccctgtgcgggagaggctcaagcgggacctgttccagtttaacaagacggtggagcatggcttcccgcaccagcccagcgccctcggctacagcccgtccctgcacatcctggccatcggcacccgttctggagccatcaagctctacggagccccaggcgtggagttcatggggctgcaccaggagaacaacgctgtgacgcagatccacctcctgcccggccagtgccagctggtcaccctgctggatgacaacagcctgcacctttggagcctgaaggtcaagggcggggcatcggagctgcaggaggatgagagcttcacactgcgtggacccccaggggctgcccccagtgccacacagatcaccgtggtcctgccacattcctcctgcgagctgctctacctgggcaccgagagtggcaacgtgtttgtggtgcagctgccagcttttcgtgcgctggaggaccggaccatcagctcggacgcggtgctgcagcggttgccagaggaggcccgccaccggcgtgtgttcgagatggtggaggcactgcaggagcaccctcgagaccccaaccagatcctgatcggctacagccgaggcctcgttgtcatctgggacctacagggcagccgcgtgctctaccacttcctcagcagccagcaactggagaacatctggtggcagcgggacggccgcctgctcgtcagctgtcactctgacggcagctactgccagtggcccgtgtccagcgaagcccagcaaccagagcccctccgcagcctcgtgccttacggtccctttccttgcaaagcgattaccagaatcctctggctgaccactaggcaggggttgcccttcaccatcttccagggtggcatgccacgggccagctacggggaccgccactgcatctcagtgatccacgatggccagcagacggccttcgacttcacctcccgtgtcatcggcttcactgtcctcacagaggcagaccctgcagccagcctttgacgacccctatgccctggtggtgctggctgaggaggagctggtggtgattgacctgcagacagcaggctggccaccggtccagctgccctacctggcttctctgcactgttccgccatcacctgctctcaccacgtctccaacatcccgctgaagctgtgggagcggatcattgccgccggcagccggcagaacgcacacttctccaccatggagtggccaattgatggtggcaccagcctgaccccagccccaccccagagggacctgctgctcacagggcacgaggacggcacggtgcggttctgggatgcctcgggtgtctgcctgcggctgctctacaaactcagcactgtgcgcgtgttcctcaccgacacggaccccaacgagaacttcagtgcccagggcgaggacgagtggcccccactccgcaaggtgggctcctttgacccctacagtgatgacccccggctgggcatccagaagatcttcctctgcaagtacagcggctacctggctgtggcaggcacggcagggcaggtgctggtactggaactgaatgacgaggcagcggagcaggctgtggagcaggtggaggccgacctgctgcaggaccaagagggctaccgctggaaggggcacgagcgcctggcagcccgctcagggcccgtgcgctttgagcctggctttcagcccttcgtgttggtgcagtgtcagcccccggctgtggtcacctccttggccctgcactctgagtggcggctcgtggccttcggcaccagccatggctttggcctctttgaccaccagcagcggcggcaggtctttgttaagtgcacactgcaccccagtgaccagctggccttggagggcccactctcccgcgtcaagtccctcaagaagtccttgcgtcagtcattccgccggatgcgtcggagccgggtgtccagccggaagcggcacccggctggccccccaggagaggcacaggaggggagtgccaaggctgagcggccaggcctccagaacatggagctggcgcctgtgcagcgcaagatcgaggctcgctcggcagaggactccttcacaggcttcgtccggaccctgtactttgctgacacctacctgaaggacagctcccggcactgcccctcgctgtgggctggcaccaatgggggcaccatctatgccttctccctgcgtgtgcctcccgccgagcggagaatggatgagcctgtgcgggcagagcaggccaaggagatccagctgatgcaccgggcgccggtggtgggcatcctggtgctcgacggacacagcgtaccccttcccgagcccctcgaagtggcccatgatctgtcgaagagccctgacatgcagggaagccaccagctgctcgtcgtatcagaggagcagttcaaggtgttcacgctgcccaaggtgagtgccaagctgaagttgaagctgacggccctggagggctcaagagtgcggcgggtcagcgtggcccacttcggcagtcgtcgagccgaggactacggggagcaccacctggcagtccttaccaacctgggcgacatccaggtggtctcgctgcccctgctcaagccccaggtgcgctacagctgcatccgccgggaggacgtcagtggcatcgcctcctgcgtcttcaccaaatatggccaaggcttctacctgatctcaccctcggagtttgagcgcttctctctctccaccaagtggctggtggagccccggtgtctggtggattcagcagaaaccaagaaccaccgccctggtaacggtgcgggccccaagaaggccccgagccgagccaggaactcnggactcacagtgatggcaagagaagcagccgggctgggatgagcgcgcccggtcaggatgagagagtccgaaggaagtcccaagccctcggggggacccgggagcgcaccggcggtccctccagcccccggggggcacctacaaggggccaaacgaggcctacgcacacgggagaagaccaatcagaggcgccggggcgcgcccccacagaggcaggcccccagcaggagcgcaca

SEQ ID NO: 383085 - DNA, 2959 bp, Homo sapiens
  misc_feature (2878)..(2878): n is a, c, g, or t
  misc_feature (2903)..(2903): n is a, c, g, or t
  misc_feature (2918)..(2918): n is a, c, g, or t
  misc_feature (2939)..(2939): n is a, c, g, or t
gccgcccagcagcccgtgggcaggcgcggcggagcgagcggggccggcggcgggcgccgagggacgccgaggcctcgggcgggggctggcccggggttccaggtctccagtgggggctgcagactaagcaaaatgaggcggttcctgaggccagggcatgaccctgtgcgggagaggctcaagcgggacctgttccagtttaacaagacggtggagcatggcttcccgcaccagcccagcgccctcggctacagcccgtccctgcacatcctggccatcggcacccgttctggagccatcaagctctacggagccccaggcgtggagttcatggggctgcaccaggagaacaacgctgtgacgcagatccacctcctgcccggccagtgccagctggtcaccctgctggatgacaacagcctgcacctttggagcctgaaggtcaagggcggggcatcggagctgcaggaggatgagagcttcacactgcgtggacccccaggggctgcccccagtgccacacagatcaccgtggtcctgccacattcctcctgcgagctgctctacctgggcaccgagagtggcaacgtgtttgtggtgcagctgccagcttttcgtgcgctggaggaccggaccatcagctcggacgcggtgctgcagcggttgccagaggaggcccgccaccggcgtgtgttcgagatggtggaggcactgcaggagcaccctcgagaccccaaccagatcctgatcggctacagccgaggcctcgttgtcatctgggacctacagggcagccgcgtgctctaccacttcctcagcagccagcaactggagaacatctggtggcagcgggacggccgcctgctcgtcagctgtcactctgacggcagctactgccagtggcccgtgtccagcgaagcccagcaaccagagcccctccgcagcctcgtgccttacggtccctttccttgcaaagcgattaccagaatcctctggctgaccactaggcaggggttgcccttcaccatcttccagggtggcatgccacgggccagctacggggaccgccactgcatctcagtgatccacgatggccagcagacggccttcgacttcacctcccgtgtcatcggcttcactgtcctcacagaggcagaccctgcagccagcctttgacgacccctatgccctggtggtgctggctgaggaggagctggtggtgattgacctgcagacagcaggctggccaccggtccagctgccctacctggcttctctgcactgttccgccatcacctgctctcaccacgtctccaacatcccgctgaagctgtgggagcggatcattgccgccggcagccggcagaacgcacacttctccaccatggagtggccaattgatggtggcaccagcctgaccccagccccaccccagagggacctgctgctcacagggcacgaggacggcacggtgcggttctgggatgcctcgggtgtctgcctgcggctgctctacaaactcagcactgtgcgcgtgttcctcaccgacacggaccccaacgagaacttcagtgcccagggcgaggacgagtggcccccactccgcaaggtgggctcctttgacccctacagtgatgacccccggctgggcatccagaagatcttcctctgcaagtacagcggctacctggctgtggcaggcacggcagggcaggtgctggtactggaactgaatgacgaggcagcggagcaggctgtggagcaggtggaggccgacctgctgcaggaccaagagggctaccgctggaaggggcacgagcgcctggcagcccgctcagggcccgtgcgctttgagcctggctttcagcccttcgtgttggtgcagtgtcagcccccggctgtggtcacctccttggccctgcactctgagtggcggctcgtggccttcggcaccagccatggctttggcctctttgaccaccagcagcggcggcaggtctttgttaagtgcacactgcaccccagtgaccagctggccttggagggcccactctcccgcgtcaagtccctcaagaagtccttgcgtcagtcattccgccggatgcgtcggagccgggtgtccagccggaagcggcacccggctggccccccaggagaggcacaggaggggagtgccaaggctgagcggccaggcctccagaacatggagctggcgcctgtgcagcgcaagatcgaggctcgctcggcagaggactccttcacaggcttcgtccggaccctgtactttgctgacacctacctgaaggacagctcccggcactgcccctcgctgtgggctggcaccaatgggggcaccatctatgccttctccctgcgtgtgcctcccgccgagcggagaatggatgagcctgtgcgggcagagcaggccaaggagatccagctgatgcaccgggcgccggtggtgggcatcctggtgctcgacggacacagcgtaccccttcccgagcccctcgaagtggcccatgatctgtcgaagagccctgacatgcagggaagccaccagctgctcgtcgtatcagaggagcagttcaaggtgttcacgctgcccaaggtgagtgccaagctgaagttgaagctgacggccctggagggctcaagagtgcggcgggtcagcgtggcccacttcggcagtcgtcgagccgaggactacggggagcaccacctggcagtccttaccaacctgggcgacatccaggtggtctcgctgcccctgctcaagccccaggtgcgctacagctgcatccgccgggaggacgtcagtggcatcgcctcctgcgtcttcaccaaatatggccaagaggctttcttaccttgattnttaaccctttggagttttaaggcgnttttttttttttccnaaccaagttggcttggttggnagcccccgggttttttttgg

SEQ ID NO: 383086 - DNA, 1526 bp, Homo sapiens
gccgcccagcagcccgtgggcaggcgcggcggagcgagcggggccggcggcgggcgccgagggacgccgaggcctcgggcgggggctggcccggggttccaggtctccagtgggggctgcagactaagcaaaatgaggcggttcctgaggccagggcatgaccctgtgcgggagaggctcaagcgggacctgttccagtttaacaagacggtggagcatggcttcccgcaccagcccagcgccctcggctacagcccgtccctgcacatcctggccatcggcacccgttctggagccatcaagctctacggagccccaggcgtggagttcatggggctgcaccaggagaacaacgctgtgacgcagatccacctcctgcccggccagtgccagctggtcaccctgctggatgacaacagcctgcacctttggagcctgaaggtcaagggcggggcatcggagctgcaggaggatgagagcttcacactgcgtggacccccaggggctgcccccagtgccacacagatcaccgtggtcctgccacattcctcctgcgagctgctctacctgggcaccgagagtggcaacgtgtttgtggtgcagctgccagcttttcgtgcgctggaggaccggaccatcagctcggacgcggtgctgcagcggttgccagaggaggcccgccaccggcgtgtgttcgagatggtggaggcactgcaggagcaccctcgagaccccaaccagatcctgatcggctacagccgaggcctcgttgtcatctgggacctacagggcagccgcgtgctctaccacttcctcagcagccagcaactggagaacatctggtggcagcgggacggccgcctgctcgtcagctgtcactctgacggcagctactgccagtggcccgtgtccagcgaagcccagcaaccagagcccctccgcagcctcgtgccttacggtccctttccttgcaaagcgattaccagaatcctctggctgaccactaggcaggggttgcccttcaccatcttccagggtggcatgccacgggccagctacggggaccgccactgcatctcagtgatccacgatggccagcagacggccttcgacttcacctcccgtgtcatcggcttcactgtcctcacagaggcagaccctgcagccagtaggagagcttcgggagtgggtgcccagggttaggtgtgggaggcatggggcaggaccatcagtaaagacagggccaggtgcagtggctcctgcctgtaaccccagtgctgtgggaggccaaggtggtaggatcgcttgaacccaggagttcaagtccagcctggacaacgtagggagacccttgtctctacaaaaaataaaaaaattagccaggtgttgtggcacgtacctgtagtcctagctactcaggaggctgaggtgggaggatcacttgagcctgggaggtggaggttgcagcgaaccaggatcatgctactgtactcagcctgggtgacatagccagactgtgtctcaaa

SEQ ID NO: 383087 - DNA, 1315 bp, Homo sapiens
gccgcccagcagcccgtgggcaggcgcggcggagcgagcggggccggcggcgggcgccgagggacgccgaggcctcgggcgggggctggcccggggttccaggtctccagtgggggctgcagactaagcaaaatgaggcggttcctgaggccagggcatgaccctgtgcgggagaggctcaagcgggacctgttccagtttaacaagacggtggagcatggcttcccgcaccagcccagcgccctcggctacagcccgtccctgcacatcctggccatcggcacccgttctggagccatcaagctctacggagccccaggcgtggagttcatggggctgcaccaggagaacaacgctgtgacgcagatccacctcctgcccggccagtgccagctggtcaccctgctggatgacaacagcctgcacctttggagcctgaaggtcaagggcggggcatcggagctgcaggaggatgagagcttcacactgcgtggacccccaggggctgcccccagtgccacacagatcaccgtggtcctgccacattcctcctgcgagctgctctacctgggcaccgagagtggcaacgtgtttgtggtgcagctgccagcttttcgtgcgctggaggaccggaccatcagctcggacgcggtgctgcagcggttgccagaggaggcccgccaccggcgtgtgttcgagatggtggaggcactgcaggagcaccctcgagaccccaaccagatcctgatcggctacagccgaggcctcgttgtcatctgggacctacagggcagccgcgtgctctaccacttcctcagcagccagcaactggagaacatctggtggcagcgggacggccgcctgctcgtcagctgtcactctgacggcagctactgccagtggcccgtgtccagcgaagcccagcaaccagagcccctccgcagcctcgtgccttacgtaggagagcttcgggagtgggtgcccagggttaggtgtgggaggcatggggcaggaccatcagtaaagacagggccaggtgcagtggctcctgcctgtaaccccagtgctgtgggaggccaaggtggtaggatcgcttgaacccaggagttcaagtccagcctggacaacgtagggagacccttgtctctacaaaaaataaaaaaattagccaggtgttgtggcacgtacctgtagtcctagctactcaggaggctgaggtgggaggatcacttgagcctgggaggtggaggttgcagcgaaccaggatcatgctactgtactcagcctgggtgacatagccagactgtgtctcaaa

SEQ ID NO: 383088 - DNA, 2972 bp, Homo sapiens
cgacagagtgtgaaaccgtctcgagaaaagaaaaaaaaaaaaaaagacaaatggtttaatcatccagcgcacatttattgagcactagctgggtccaggcctgagtgaggtgatgtgattgtgtgcagtaaagaaaatgccacccctagcaactggtgtgctgaagaccacgcgtgctgctgcctgtggggagaggcttgacaggtgcatctgagcagggagagcaggccccatggaggagaaaccagggaagagggttggcaggcacagctgcatgcctctggggtgcctatcctggttgggaccctgccttccagccaggtgtatccccccaggagccctgtgccagggagctctcagcagccttgcatgcagagccagggctactgcccacacctgctgccctcctggagatggaaaggctttgctcaagcagccaagaacagggctttctggatctgcagatgccctggctccaaccctggagcttctgattccacagagctgggctgcttcctcctggccccggcccctgacccttgccctgtaccccagcctttgacgacccctatgccctggtggtgctggctgaggaggagctggtggtgattgacctgcagacagcaggctggccaccggtccagctgccctacctggcttctctgcactgttccgccatcacctgctctcaccacgtctccaacatcccgctgaagctgtgggagcggatcattgccgccggcagccggcagaacgcacacttctccaccatggagtggccaattgatggtggcaccagcctgaccccagccccaccccagagggacctgctgctcacagggcacgaggacggcacggtgcggttctgggatgcctcgggtgtctgcctgcggctgctctacaaactcagcactgtgcgcgtgttcctcaccgacacggaccccaacgagaacttcagtgcccagggcgaggacgagtggcccccactccgcaaggtgggctcctttgacccctacagtgatgacccccggctgggcatccagaagatcttcctctgcaagtacagcggctacctggctgtggcaggcacggcagggcaggtgctggtactggaactgaatgacgaggcagcggagcaggctgtggagcaggtggaggccgacctgctgcaggaccaagagggctaccgctggaaggggcacgagcgcctggcagcccgctcagggcccgtgcgctttgagcctggctttcagcccttcgtgttggtgcagtgtcagcccccggctgtggtcacctccttggccctgcactctgagtggcggctcgtggccttcggcaccagccatggctttggcctctttgaccaccagcagcggcggcaggtctttgttaagtgcacactgcaccccagtgaccagctggccttggagggcccactctcccgcgtcaagtccctcaagaagtccttgcgtcagtcattccgccggatgcgtcggagccgggtgtccagccggaagcggcacccggctggccccccaggagaggcacaggaggggagtgccaaggctgagcggccaggcctccagaacatggagctggcgcctgtgcagcgcaagatcgaggctcgctcggcagaggactccttcacaggcttcgtccggaccctgtactttgctgacacctacctgaaggacagctcccggcactgcccctcgctgtgggctggcaccaatgggggcaccatctatgccttctccctgcgtgtgcctcccgccgagcggagaatggatgagcctgtgcgggcagagcaggccaaggagatccagctgatgcaccgggcgccggtggtgggcatcctggtgctcgacggacacagcgtaccccttcccgagcccctcgaagtggcccatgatctgtcgaagagccctgacatgcagggaagccaccagctgctcgtcgtatcagaggagcagttcaaggtgttcacgctgcccaaggtgagtgccaagctgaagttgaagctgacggccctggagggctcaagagtgcggcgggtcagcgtggcccacttcggcagtcgtcgagccgaggactacggggagcaccacctggcagtccttaccaacctgggcgacatccaggtggtctcgctgcccctgctcaagccccaggtgcgctacagctgcatccgccgggaggacgtcagtggcatcgcctcctgcgtcttcaccaaatatggccaaggcttctacctgatctcaccctcggagtttgagcgcttctctctctccaccaagtggctggtggagccccggtgtctggtggattcagcagaaaccaagaaccaccgccctggtaacggtgcgggccccaagaaggccccgagccgagccaggaactcagggactcagagtgatggcgaggccctgggccctgggcttccacatcctgacctcagtaaggagagagagagccaggccgaggagggcccaggcggggcgccctgacccggcctctaccttccagagaagcagcccggcctggtgatggagcgcgctctgctcagtgatgagagagcggcaactggcgttcacatcgagccgccgtggggtgcagcctcagcaatggcggagcagagtgagtggctgagcgtccaggctgcgcgatgagcacacactactactgatggcctttcgggggtccctgccccaaccggagaggccggtgcacagggccccgccaggggctgggggcatcccggcttccacaatgcagctgctctgggcctcgggagaggagagaccccagtcccctgggctgcccttcccgggcctcgtctgtctgggtcctttggtcaatgttgcacagtttttattgctcccatccctttttgtagtgggctgggttttaagttataaatgttaactgcctctgggtgaaaaagtttttaataaacacctattacctcttga

SEQ ID NO: 383089 - DNA, 3527 bp, Homo sapiens
gccgcccagcagcccgtgggcaggcgcggcggagcgagcggggccggcggcgggcgccgagggacgccgaggcctcgggcgggggctggcccggggttccaggtctccagtgggggctgcagactaagcaaaatgaggcggttcctgaggccagggcatgaccctgtgcgggagaggctcaagcgggacctgttccagtttaacaagacggtggagcatggcttcccgcaccagcccagcgccctcggctacagcccgtccctgcacatcctggccatcggcacccgttctggagccatcaagctctacggagccccaggcgtggagttcatggggctgcaccaggagaacaacgctgtgacgcagatccacctcctgcccggccagtgccagctggtcaccctgctggatgacaacagcctgcacctttggagcctgaaggtcaagggcggggcatcggagctgcaggaggatgagagcttcacactgcgtggacccccaggggctgcccccagtgccacacagatcaccgtggtcctgccacattcctcctgcgagctgctctacctgggcaccgagagtggcaacgtgtttgtggtgcagctgccagcttttcgtgcgctggaggaccggaccatcagctcggacgcggtgctgcagcggttgccagaggaggcccgccaccggcgtgtgttcgagatggtggaggcactgcaggagcaccctcgagaccccaaccagatcctgatcggctacagccgaggcctcgttgtcatctgggacctacagggcagccgcgtgctctaccacttcctcagcagccagcaactggagaacatctggtggcagcgggacggccgcctgctcgtcagctgtcactctgacggcagctactgccagtggcccgtgtccagcgaagcccagcaaccagagcccctccgcagcctcgtgccttacggtccctttccttgcaaagcgattaccagaatcctctggctgaccactaggcaggggttgcccttcaccatcttccagggtggcatgccacgggccagctacggggaccgccactgcatctcagtgatccacgatggccagcagacggccttcgacttcacctcccgtgtcatcggcttcactgtcctcacagaggcagaccctgcagccagcctttgacgacccctatgccctggtggtgctggctgaggaggagctggtggtgattgacctgcagacagcaggctggccaccggtccagctgccctacctggcttctctgcactgttccgccatcacctgctctcaccacgtctccaacatcccgctgaagctgtgggagcggatcattgccgccggcagccggcagaacgcacacttctccaccatggagtggccaattgatggtggcaccagcctgaccccagccccaccccagagggacctgctgctcacagggcacgaggacggcacggtgcggttctgggatgcctcgggtgtctgcctgcggctgctctacaaactcagcactgtgcgcgtgttcctcaccgacacggaccccaacgagaacttcagtgcccagggcgaggacgagtggcccccactccgcaaggtgggctcctttgacccctacagtgatgacccccggctgggcatccagaagatcttcctctgcaagtacagcggctacctggctgtggcaggcacggcagggcaggtgctggtactggaactgaatgacgaggcagcggagcaggctgtggagcaggtggaggccgacctgctgcaggaccaagagggctaccgctggaaggggcacgagcgcctggcagcccgctcagggcccgtgcgctttgagcctggctttcagcccttcgtgttggtgcagtgtcagcccccggctgtggtcacctccttggccctgcactctgagtggcggctcgtggccttcggcaccagccatggctttggcctctttgaccaccagcagcggcggcaggtctttgttaagtgcacactgcaccccagtgaccagctggccttggagggcccactctcccgcgtcaagtccctcaagaagtccttgcgtcagtcattccgccggatgcgtcggagccgggtgtccagccggaagcggcacccggctggccccccaggagaggcacaggaggggagtgccaaggctgagcggccaggcctccagaacatggagctggcgcctgtgcagcgcaagatcgaggctcgctcggcagaggactccttcacaggcttcgtccggaccctgtactttgctgacacctacctgaaggacagctcccggcactgcccctcgctgtgggctggcaccaatgggggcaccatctatgccttctccctgcgtgtgcctcccgccgagcggagaatggatgagcctgtgcgggcagagcaggccaaggagatccagctgatgcaccgggcgccggtggtgggcatcctggtgctcgacggacacagcgtaccccttcccgagcccctcgaagtggcccatgatctgtcgaagagccctgacatgcagggaagccaccagctgctcgtcgtatcagaggagcagttcaaggtgttcacgctgcccaaggtgagtgccaagctgaagttgaagctgacggccctggagggctcaagagtgcggcgggtcagcgtggcccacttcggcagtcgtcgagccgaggactacggggagcaccacctggcagtccttaccaacctgggcgacatccaggtggtctcgctgcccctgctcaagccccaggtgcgctacagctgcatccgccgggaggacgtcagtggcatcgcctcctgcgtcttcaccaaatatggccaaggcttctacctgatctcaccctcggagtttgagcgcttctctctctccaccaagtggctggtggagccccggtgtctggtggattcagcagaaaccaagaaccaccgccctggtaacggtgcgggccccaagaaggccccgagccgagccaggaactcagggactcagagtgatggcgaggagaagcagcccggcctggtgatggagcgcgctctgctcagtgatgagagagtcctgaaggaaatccagagcacactggagggagaccgcgggagcggcaactggcgttcacatcgagccgccgtggggtgcagcctcagcaatggcggagcagagtgagtggctgagcgtccaggctgcgcgatgagcacacactactactgatggcctttcgggggtccctgccccaaccggagaggccggtgcacagggccccgccaggggctgggggcatcccggcttccacaatgcagctgctctgggcctcgggagaggagagaccccagtcccctgggctgcccttcccgggcctcgtctgtctgggtcctttggtcaatgttgcacagtttttattgctcccatccctttttgtagtgggctgggttttaagttataaatgttaactgcctctgggtgaaaaagtttttaataaacacctattacctcttga

SEQ ID NO: 383090 - DNA, 3629 bp, Homo sapiens
gccgcccagcagcccgtgggcaggcgcggcggagcgagcggggccggcggcgggcgccgagggacgccgaggcctcgggcgggggctggcccggggttccaggtctccagtgggggctgcagactaagcaaaatgaggcggttcctgaggccagggcatgaccctgtgcgggagaggctcaagcgggacctgttccagtttaacaagacggtggagcatggcttcccgcaccagcccagcgccctcggctacagcccgtccctgcacatcctggccatcggcacccgttctggagccatcaagctctacggagccccaggcgtggagttcatggggctgcaccaggagaacaacgctgtgacgcagatccacctcctgcccggccagtgccagctggtcaccctgctggatgacaacagcctgcacctttggagcctgaaggtcaagggcggggcatcggagctgcaggaggatgagagcttcacactgcgtggacccccaggggctgcccccagtgccacacagatcaccgtggtcctgccacattcctcctgcgagctgctctacctgggcaccgagagtggcaacgtgtttgtggtgcagctgccagcttttcgtgcgctggaggaccggaccatcagctcggacgcggtgctgcagcggttgccagaggaggcccgccaccggcgtgtgttcgagatggtggaggcactgcaggagcaccctcgagaccccaaccagatcctgatcggctacagccgaggcctcgttgtcatctgggacctacagggcagccgcgtgctctaccacttcctcagcagccagcaactggagaacatctggtggcagcgggacggccgcctgctcgtcagctgtcactctgacggcagctactgccagtggcccgtgtccagcgaagcccagcaaccagagcccctccgcagcctcgtgccttacggtccctttccttgcaaagcgattaccagaatcctctggctgaccactaggcaggggttgcccttcaccatcttccagggtggcatgccacgggccagctacggggaccgccactgcatctcagtgatccacgatggccagcagacggccttcgacttcacctcccgtgtcatcggcttcactgtcctcacagaggcagaccctgcagccagcctttgacgacccctatgccctggtggtgctggctgaggaggagctggtggtgattgacctgcagacagcaggctggccaccggtccagctgccctacctggcttctctgcactgttccgccatcacctgctctcaccacgtctccaacatcccgctgaagctgtgggagcggatcattgccgccggcagccggcagaacgcacacttctccaccatggagtggccaattgatggtggcaccagcctgaccccagccccaccccagagggacctgctgctcacagggcacgaggacggcacggtgcggttctgggatgcctcgggtgtctgcctgcggctgctctacaaactcagcactgtgcgcgtgttcctcaccgacacggaccccaacgagaacttcagtgcccagggcgaggacgagtggcccccactccgcaaggtgggctcctttgacccctacagtgatgacccccggctgggcatccagaagatcttcctctgcaagtacagcggctacctggctgtggcaggcacggcagggcaggtgctggtactggaactgaatgacgaggcagcggagcaggctgtggagcaggtggaggccgacctgctgcaggaccaagagggctaccgctggaaggggcacgagcgcctggcagcccgctcagggcccgtgcgctttgagcctggctttcagcccttcgtgttggtgcagtgtcagcccccggctgtggtcacctccttggccctgcactctgagtggcggctcgtggccttcggcaccagccatggctttggcctctttgaccaccagcagcggcggcaggtctttgttaagtgcacactgcaccccagtgaccagctggccttggagggcccactctcccgcgtcaagtccctcaagaagtccttgcgtcagtcattccgccggatgcgtcggagccgggtgtccagccggaagcggcacccggctggccccccaggagaggcacaggaggggagtgccaaggctgagcggccaggcctccagaacatggagctggcgcctgtgcagcgcaagatcgaggctcgctcggcagaggactccttcacaggcttcgtccggaccctgtactttgctgacacctacctgaaggacagctcccggcactgcccctcgctgtgggctggcaccaatgggggcaccatctatgccttctccctgcgtgtgcctcccgccgagcggagaatggatgagcctgtgcgggcagagcaggccaaggagatccagctgatgcaccgggcgccggtggtgggcatcctggtgctcgacggacacagcgtaccccttcccgagcccctcgaagtggcccatgatctgtcgaagagccctgacatgcagggaagccaccagctgctcgtcgtatcagaggagcagttcaaggtgttcacgctgcccaaggtgagtgccaagctgaagttgaagctgacggccctggagggctcaagagtgcggcgggtcagcgtggcccacttcggcagtcgtcgagccgaggactacggggagcaccacctggcagtccttaccaacctgggcgacatccaggtggtctcgctgcccctgctcaagccccaggtgcgctacagctgcatccgccgggaggacgtcagtggcatcgcctcctgcgtcttcaccaaatatggccaaggcttctacctgatctcaccctcggagtttgagcgcttctctctctccaccaagtggctggtggagccccggtgtctggtggattcagcagaaaccaagaaccaccgccctggtaacggtgcgggccccaagaaggccccgagccgagccaggaactcagggactcagagtgatggcgaggccctgggccctgggcttccacatcctgacctcagtaaggagagagagagccaggccgaggagggcccaggcggggcgccctgacccggcctctaccttccagagaagcagcccggcctggtgatggagcgcgctctgctcagtgatgagagagtcctgaaggaaatccagagcacactggagggagaccgcgggagcggcaactggcgttcacatcgagccgccgtggggtgcagcctcagcaatggcggagcagagtgagtggctgagcgtccaggctgcgcgatgagcacacactactactgatggcctttcgggggtccctgccccaaccggagaggccggtgcacagggccccgccaggggctgggggcatcccggcttccacaatgcagctgctctgggcctcgggagaggagagaccccagtcccctgggctgcccttcccgggcctcgtctgtctgggtcctttggtcaatgttgcacagtttttattgctcccatccctttttgtagtgggctgggttttaagttataaatgttaactgcctctgggtgaaaaagtttttaataaacacctattacctcttga

SEQ ID NO: 383091 - DNA, 3454 bp, Homo sapiens
gccgcccagcagcccgtgggcaggcgcggcggagcgagcggggccggcggcgggcgccgagggacgccgaggcctcgggcgggggctggcccggggttccaggtctccagtgggggctgcagactaagcaaaatgaggcggttcctgaggccagggcatgaccctgtgcgggagaggctcaagcgggacctgttccagtttaacaagacggtggagcatggcttcccgcaccagcccagcgccctcggctacagcccgtccctgcacatcctggccatcggcacccgttctggagccatcaagctctacggagccccaggcgtggagttcatggggctgcaccaggagaacaacgctgtgacgcagatccacctcctgcccggccagtgccagctggtcaccctgctggatgacaacagcctgcacctttggagcctgaaggtcaagggcggggcatcggagctgcaggaggatgagagcttcacactgcgtggacccccaggggctgcccccagtgccacacagatcaccgtggtcctgccacattcctcctgcgagctgctctacctgggcaccgagagtggcaacgtgtttgtggtgcagctgccagcttttcgtgcgctggaggaccggaccatcagctcggacgcggtgctgcagcggttgccagaggaggcccgccaccggcgtgtgttcgagatggtggaggcactgcaggagcaccctcgagaccccaaccagatcctgatcggctacagccgaggcctcgttgtcatctgggacctacagggcagccgcgtgctctaccacttcctcagcagccagcaactggagaacatctggtggcagcgggacggccgcctgctcgtcagctgtcactctgacggcagctactgccagtggcccgtgtccagcgaagcccagcaaccagagcccctccgcagcctcgtgccttacggtccctttccttgcaaagcgattaccagaatcctctggctgaccactaggcaggggttgcccttcaccatcttccagggtggcatgccacgggccagctacggggaccgccactgcatctcagtgatccacgatggccagcagacggccttcgacttcacctcccgtgtcatcggcttcactgtcctcacagaggcagaccctgcagccagcctttgacgacccctatgccctggtggtgctggctgaggaggagctggtggtgattgacctgcagacagcaggctggccaccggtccagctgccctacctggcttctctgcactgttccgccatcacctgctctcaccacgtctccaacatcccgctgaagctgtgggagcggatcattgccgccggcagccggcagaacgcacacttctccaccatggagtggccaattgatggtggcaccagcctgaccccagccccaccccagagggacctgctgctcacagggcacgaggacggcacggtgcggttctgggatgcctcgggtgtctgcctgcggctgctctacaaactcagcactgtgcgcgtgttcctcaccgacacggaccccaacgagaacttcagtgcccagggcgaggacgagtggcccccactccgcaaggtgggctcctttgacccctacagtgatgacccccggctgggcatccagaagatcttcctctgcaagtacagcggctacctggctgtggcaggcacggcagggcaggtgctggtactggaactgaatgacgaggcagcggagcaggctgtggagcaggtggaggccgacctgctgcaggaccaagagggctaccgctggaaggggcacgagcgcctggcagcccgctcagggcccgtgcgctttgagcctggctttcagcccttcgtgttggtgcagtgtcagcccccggctgtggtcacctccttggccctgcactctgagtggcggctcgtggccttcggcaccagccatggctttggcctctttgaccaccagcagcggcggcaggtctttgttaagtgcacactgcaccccagtgaccagctggccttggagggcccactctcccgcgtcaagtccctcaagaagtccttgcgtcagtcattccgccggatgcgtcggagccgggtgtccagccggaagcggcacccggctggccccccaggagaggcacaggaggggagtgccaaggctgagcggccaggcctccagaacatggagctggcgcctgtgcagcgcaagatcgaggctcgctcggcagaggactccttcacaggcttcgtccggaccctgtactttgctgacacctacctgaaggacagctcccggcactgcccctcgctgtgggctggcaccaatgggggcaccatctatgccttctccctgcgtgtgcctcccgccgagcggagaatggatgagcctgtgcgggcagagcaggccaaggagatccagctgatgcaccgggcgccggtggtgggcatcctggtgctcgacggacacagcgtaccccttcccgagcccctcgaagtggcccatgatctgtcgaagagccctgacatgcagggaagccaccagctgctcgtcgtatcagaggagcagttcaaggtgttcacgctgcccaaggtgagtgccaagctgaagttgaagctgacggccctggagggctcaagagtgcggcgggtcagcgtggcccacttcggcagtcgtcgagccgaggactacggggagcaccacctggcagtccttaccaacctgggcgacatccaggtggtctcgctgcccctgctcaagccccaggcttctacctgatctcaccctcggagtttgagcgcttctctctctccaccaagtggctggtggagccccggtgtctggtggattcagcagaaaccaagaaccaccgccctggtaacggtgcgggccccaagaaggccccgagccgagccaggaactcagggactcagagtgatggcgaggagaagcagcccggcctggtgatggagcgcgctctgctcagtgatgagagagtcctgaaggaaatccagagcacactggagggagaccgcgggagcggcaactggcgttcacatcgagccgccgtggggtgcagcctcagcaatggcggagcagagtgagtggctgagcgtccaggctgcgcgatgagcacacactactactgatggcctttcgggggtccctgccccaaccggagaggccggtgcacagggccccgccaggggctgggggcatcccggcttccacaatgcagctgctctgggcctcgggagaggagagaccccagtcccctgggctgcccttcccgggcctcgtctgtctgggtcctttggtcaatgttgcacagtttttattgctcccatccctttttgtagtgggctgggttttaagttataaatgttaactgcctctgggtgaaaaagtttttaataaacacctattacctcttga

SEQ ID NO: 383092 - DNA, 1572 bp, Homo sapiens
gaacaaccaggaacctcgaccagcataccagcagcggcggcaggtctttgttgtgcacactgcaccccagtgaccagctggccttggagggcccactctcccgcgtcaagtccctcaagaagtccttgcgtcagtcattccgccggatgcgtcggagccgggtgtccagccggaagcggcacccggctggccccccaggagaggcacaggaggggagtgccaaggctgagcggccaggcctccagaacatggagctggcgcctgtgcagcgcaagatcgaggctcgctcggcagaggactccttcacaggcttcgtccggaccctgtactttgctgacacctacctgaaggacagctcccggcactgcccctcgctgtgggctggcaccaatgggggcaccatctatgccttctccctgcgtgtgcctcccgccgagcggagaatggatgagcctgtgcgggcagagcaggccaaggagatccagctgatgcaccgggcgccggtggtgggcatcctggtgctcgacggacacagcgtaccccttcccgagcccctcgaagtggcccatgatctgtcgaagagccctgacatgcagggaagccaccagctgctcgtcgtatcagaggagcagttcaaggtgttcacgctgcccaaggtgagtgccaagctgaagttgaagctgacggccctggagggctcaagagtgcggcgggtcagcgtggcccacttcggcagtcgtcgagccgaggactacggggagcaccacctggcagtccttaccaacctgggcgacatccaggtggtctcgctgcccctgctcaagccccaggtgcgctacagctgcatccgccgggaggacgtcagtggcatcgcctcctgcgtcttcaccaaatatggccaaggcttctacctgatctcaccctcggagtttgagcgcttctctctctccaccaagtggctggtggagccccggtgtctggtggattcagcagaaaccaagaaccaccgccctggtaacggtgcgggccccaagaaggccccgagccgagccaggaactcagggactcagagtgatggcgaggagaagcagcccggcctggtgatggagcgcgctctgctcagtgatgagagagtcctgaaggaaatccagagcacactggagggagaccgcgggagcggcaactggcgttcacatcgagccgccgtggggtgcagcctcagcaatggcggagcagagtgagtggctgagcgtccaggctgcgcgatgagcacacactactactgatggcctttcgggggtccctgccccaaccggagaggccggtgcacagggccccgccaggggctgggggcatcccggcttccacaatgcagctgctctgggcctcgggagaggagagaccccagtcccctgggctgcccttcccgggcctcgtctgtctgggtcctttggtcaatgttgcacagtttttattgctcccatccctttttgtagtgggctgggttttaagttataaatgttaactgcctctgggtgaaaaagtttttaataaacacctattacctcttga

SEQ ID NO: 383093 - DNA, 1403 bp, Homo sapiens
cctgctgtatcacagcaagggctgagctgacctgggattggggtcttctatgttggggcctgtgtggttgtcagagagccttccagcctctcccaggagggaaaacctgggagtaaaccctggttgcccagctccacccgactcccacgctaagggtcagacacccaaacatggcttctcggcaggctcccggcactgcccctcgctgtgggctggcaccaatgggggcaccatctatgccttctccctgcgtgtgcctcccgccgagcggagaatggatgagcctgtgcgggcagagcaggccaaggagatccagctgatgcaccgggcgccggtggtgggcatcctggtgctcgacggacacagcgtaccccttcccgagcccctcgaagtggcccatgatctgtcgaagagccctgacatgcagggaagccaccagctgctcgtcgtatcagaggagcagttcaaggtgttcacgctgcccaaggtgagtgccaagctgaagttgaagctgacggccctggagggctcaagagtgcggcgggtcagcgtggcccacttcggcagtcgtcgagccgaggactacggggagcaccacctggcagtccttaccaacctgggcgacatccaggtggtctcgctgcccctgctcaagccccaggtgcgctacagctgcatccgccgggaggacgtcagtggcatcgcctcctgcgtcttcaccaaatatggccaaggcttctacctgatctcaccctcggagtttgagcgcttctctctctccaccaagtggctggtggagccccggtgtctggtggattcagcagaaaccaagaaccaccgccctggtaacggtgcgggccccaagaaggccccgagccgagccaggaactcagggactcagagtgatggcgaggagaagcagcccggcctggtgatggagcgcgctctgctcagtgatgagagagtcctgaaggaaatccagagcacactggagggagaccgcgggagcggcaactggcgttcacatcgagccgccgtggggtgcagcctcagcaatggcggagcagagtgagtggctgagcgtccaggctgcgcgatgagcacacactactactgatggcctttcgggggtccctgccccaaccggagaggccggtgcacagggccccgccaggggctgggggcatcccggcttccacaatgcagctgctctgggcctcgggagaggagagaccccagtcccctgggctgcccttcccgggcctcgtctgtctgggtcctttggtcaatgttgcacagtttttattgctcccatccctttttgtagtgggctgggttttaagttataaatgttaactgcctctgggtgaaaaagtttttaataaacacctattacctcttga

SEQ ID NO: 383094 - DNA, 1360 bp, Homo sapiens
gccgcccagcagcccgtgggcaggcgcggcggagcgagcggggccggcggcgggcgccgagggacgccgaggcctcgggcgggggctggcccggggttccaggtctccagtgggggctgcagactaagcaaaatgaggcggttcctgaggccagggcatgaccctgtgcgggagaggctcaagcgggacctgttccagtttaacaagacggtggagcatggcttcccgcaccagcccagcgccctcggctacagcccgtccctgcacatcctggccatcggcacccgttctggagccatcaagctctacggagccccaggcgtggagttcatggggctgcaccaggagaacaacgctgtgacgcagatccacctcctgcccggccagtgccagctggtcaccctgctggatgacaacagcctgcacctttggagcctgaaggtcaagggcggggcatcggagctgcaggaggatgagagcttcacactgcgtggacccccaggggctgcccccagtgccacacagatcaccgtggtcctgccacattcctcctgcgagctgctctacctgggcaccgagagtggcaacgtgtttgtggtgcagctgccagcttttcgtgcgctggaggaccggaccatcagctcggacgcggtgctgcagcggttgccagaggaggcccgccaccggcgtgtgttcgagatggtggaggcactgcaggagcaccctcgagaccccaaccagatcctgatcggctacagccgaggcctcgttgtcatctgggacctacagggcagccgcgtgctctaccacttcctcagcagccagcaactggagaacatctggtggcagcgggacggccgcctgctcgtcagctgtcactctgacggcagctaggggaccgccactgcatctcagtgatccacgatggccagcagacggccttcgacttcacctcccgtgtcatcggcttcactgtcctcacagaggcagaccctgcagccagtaggagagcttcgggagtgggtgcccagggttaggtgtgggaggcatggggcaggaccatcagtaaagacagggccaggtgcagtggctcctgcctgtaaccccagtgctgtgggaggccaaggtggtaggatcgcttgaacccaggagttcaagtccagcctggacaacgtagggagacccttgtctctacaaaaaataaaaaaattagccaggtgttgtggcacgtacctgtagtcctagctactcaggaggctgaggtgggaggatcacttgagcctgggaggtggaggttgcagcgaaccaggatcatgctactgtactcagcctgggtgacatagccagactgtgtctcaaa

SEQ ID NO: 383095 - DNA, 418 bp, Homo sapiens
caactggagaacatctggtggcagcgggacggccgcctgctcgtcagctgtcactctgacggcagctactgccagtggcccgtgtccagcgaagcccagcaaccagagcccctccgcagcctcgtgccttacgcagtgtttcacccgccgggcagggcccacccccagtgcctcctggattcaggtgcaggttgctcaattctgaagcaaactccagggccagagagggtaaaggctttgtccaaagccacacagcagggttcgcctcacccagtttcttggggaacttctcggagcaagattcccaagcacaggtctaccatgtggatgtggcatgagctagagggatctgtgcctgtggggactgacacttgtctgagagtttgaggatccgttcaagccgattcctttcctttca

SEQ ID NO: 383096 - DNA, 577 bp, Homo sapiens
gcagaaaacttgggttgattctgtaaagggaattctccttccctccaattctcataatgttcattaaatgaaaattcctagaagtaaggatctgagtccttctgggccagggatccagagtacagacgatgtgcacatctgcccaggcccagccactccacgtcatgactctgggaactccaaccactgctcctcaacaggcagcactgtcgaggtcacctttcaaagaattgctctttctgacctggtgctcctcttaccctcacagctcggcaggaatcaggaggtaggaatgctattaccaacagggattttcatggatggataaaaaggtcatgatgcaaatcctccaaaaaactgggctcaaaacccaagcatcttgtcctctaggccagcatgagaggtctgaagtgtcactgcctctagctaaaagagggaaggtcagacaaccctgtcctcctaaggccaataatgggaactctcaccaatgcataaagagacacattaaaaacgtatctcaaaaggcagcctggattgcagtcttttgcaatcaagaacctgggagtctaatgttcta

SEQ ID NO: 383097 - DNA, 404 bp, Homo sapiens
aagtagctgggattacaggtgtgcgccaccatgcctggctcattttttcgtgtttttaatagagacagagtttcaccatgttggccaggctggtcttgaactcttgacttcaaatgatctgcccgccttggcctcccaaattgttgggattacaggcgtgagccaccgcgcctggcctggaagcatttaagtaagaaaatataacctggtctctctccctaaggaagtcccttgagctcagatggcaggatgtgtaggggataagtagataaacctgcaagtggagaggaggatggtccaggcagagtgaagctgatacaacagcctttgcgagagggaccatggctggtgtggggaactgagatatctgaggtcagtgtggctggcagcagagctttatgggt

SEQ ID NO: 383098 - DNA, 441 bp, Homo sapiens
gaagagataaggatggctctgtatttattacttgagcgtttggttaggtggtgaggccattattcaaatctgaaatagacgaaaagagcaggttgagacaggagacatgggtgtgtttggtttagaacatgttatccatgaggtgttcaggttacactccaatcctcattctatcagaatggagctgcccagggggtattcccattggagaattggaacaaaaggattttcaaaaagcaactccaaaggacattttattgggtttaattatacctggaaccttagtcgtaagaagaaagaaaaggtagatttacagatgaaattctgatgtgaagccctatttaaagagtaattttttttctagctgttaaagaatactggtttacatatgaatactgaaagcatgactattgttacttttaattactaatatttaggtaa

SEQ ID NO: 383099 - DNA, 384 bp, Homo sapiens
ttttttttttttttttctttttttgagacagagtctcactctgtcgcccaggctggaatgcagtggtgggatctcagctcactgcaacctccaactcccaggttcaagcaattctcctgcttcagcctcccaagtagctggaattacaggcgtgcaccatcagactgggctaatttttatatttttagtagagacggggtttctccgtgttggccaggctggtctcgaactcctggcctcaagcaatctgcctgccttgggctccccaagtgctgggattatagacatgagccaccgtgcctggccctaagcctctgtgtttctttgctcagtatttcttctacctagaatgcccttctttttcatctggattatttaaacaca

SEQ ID NO: 383100 - DNA, 276 bp, Homo sapiens
aagaaaccctctccaggagacttctgcttacctctcagtgatcaaaaaccttttcaccacagttacttaccacgtcctaccgatccgcattctcgcaagtgtccttcactccatttactctactgcatttttcactgtatttctcatgccaaaacttgggcttctccaccagtctgcacacgttcatgctctcaattctcacagccatctatttcattctccactaaactgttagagggatttctgtagaaattaaagaaattcctatcactccta

SEQ ID NO: 383101 - DNA, 394 bp, Homo sapiens
atctcacagcatgtgtcccagctgaatagaagataggccaaacacttcgatttttagctatcatttaatgctttaagcaatatacaaagagtaaattaaataactctgttgcatatgggattccttggctgggtgtggtggctcccgcttataatcccagcactttaggagactgaggcagggggatcactggcatggtggtgcacacctgtagtctcaattactcagaaggctgaggcaggaggatcccttgagtcaaagaggctgaggttgcagggagctttgatggtgccactgcactccaggctgagcagaagagcgagaccctgtctcaaaaaacagcagcaaaaacaacaaaacagactttgcctcggtaaaagcaataagattaaaa

SEQ ID NO: 383102 - DNA, 403 bp, Homo sapiens
cttggaggtagggtttcaccatggacccacctcatctgcctaggcatttggctgcctcctgccactgtcactggaattttagcccagagtgccctcttgagtcattccctcaggctcaatgcccttactccaaagctgcagggcttgcagctctgtgagaaagggaggtggcagttcacactgcagaagcctcatcagttgagagacataaataagcaagtggatgttccttgttcttgaataggaagactcagtgctgcaaagatgccagctctccctaatgaatgtagcagctcaaagctatctcaatcaaaatctcatcacagtttgctttgtttcattgttttgccacttgatctaattattttaaagttcctctggaagagtatattttcaataataa

SEQ ID NO: 383103 - DNA, 375 bp, Homo sapiens
cacacacttggtgttccataatgctaggaaaatgagctcgtaattaccactcccttttaaatgtcaggttttttactttagctaggttcttcggttttatttatttactcactgaaaaatagtatactgagtgctatactatgcccctaaaccctgaattaggtgctaggtatacacagtgagtgaaagagataaagtccttgcccttttggagtttatattcaagcagtagaaagtgtctggtgcaaagtgttagcttttattgtattttttttttcctgtgtgagatttctcgccattcctcaattcaacaaatatgccttttttattttttttttaaaaataaatgttctatctctatagtactttttaaaa

SEQ ID NO: 383104 - DNA, 487 bp, Homo sapiens
agagaaatgaaaacatatgtcccacaaaaaattatagataaatgttcataggaacattatttataaaaaccaaaaactgggaacaacccaaatgctcaactgatgactggataaaaattaaatgtggcatatctatacaatgaaataatgattcatgctatgacttggatgaatcttgaaaacatatgataagggaaagaagtcagctttaaagaccacacattgtgtgactccatttatatgaaatgtccagaataggcaaatctatagaaacagtagattagtagtttgctagggttaaggggttgggggaaaatagagaatttctgctaatgagtgtgagtttcttttaagggtgatgttctaaaattgattgtgtgctgatagttgtacaactctgtgaatccacttaaaattattggattgtatattttaaatgggtaaatcgtatggtatatgaattatatctcaataaaactttttaaaa

SEQ ID NO: 383105 - DNA, 342 bp, Homo sapiens
ccatagtcagttaatggggtcacagttgattcctagtccccattctctcttaggagatgactctcagacaatgtttattggaagttgaagtataattgtgctcccacacaatgggagctcccattgtgtgagctctaattctccaagtgggctagctagagaatcaatagatcattcctatcagtcattaatatttctactactatttgatcttctgcctcctaatgccaaagttgcagaacaccatgtccaaaatctcagacctaaagcagaggcttctcttgctttggaactgaggcaaaagtggtagaccagtgagcttattggtaaattggtggatgg

SEQ ID NO: 383106 - DNA, 365 bp, Homo sapiens
aaaatcatcataggtaactcctgatgactcctacctctttcagtcacatacttagcattatctgctgtacaggtttaaagaattttggtcacaggattgaagtgaatatttcatttatgtgtagccaaaatattatcatatgaagcccaaaagaagagtaaaatacatccttgtgatattattaacatgactttgtgccagacaaagcatagttactctacagatggattatgaatagagacaaagtgtgtagttgaattctttggaattatggactatattccataaatcccagatggagtcactatgattaatgttacctcaatgaatacaaaatgaataaataattatcctccacttactgt

SEQ ID NO: 383107 - DNA, 382 bp, Homo sapiens
agttcacatgccatgaaaatctcccctgtggagtgccctgtcctatggttttagcatagtcaccgagttgtattcatggggtttcatgtctaccaagaataagattgttcttgcttaaattgtgaaagctttaccggtttagctcatagaaacagtcttggcaagagttccctgagataaaacttttcctgccctgtgaactttcttgttttgaattttaatgcattctaacatgagtgtctcatgttagaagctcagtgttgtggaggtcagtatagctattaaaaaacaatcccagcactttgggaagccgaggcgggtgggtcatgaggtcaggagatcgagaccatcctggccaatatggtgaaaccccgtctctact

SEQ ID NO: 383108 - DNA, 781 bp, Homo sapiens
gatttggagtggaccctccttcctccagagcctgcttcttaaccatggagcaaggagttctacatggcatgcccctgacctcattgcagctgttcatgttcttctccgttttagcaacattgaagaaaaggaaaataaaataaacataatttttggattttttaaaatggtggttgcttttcaaaagtaccagaaccgactcctgtcttccttgtattgtctctgttaaaatcgtgtgctttgcatgtcagactttacaacctgaatcaggctacatcaccagtccacctttgcaggtcaccactgtctcttactggaggcaggccggatcactgctcataggtaattttgtgaagaagctagtttcctaagtctattttcttttttctgtgttcgttcatggtatacgtgagagtgggggagtggggaggggggaaggagataaaaagaaaaaaaaaattccccagaacatattatgtgctcatgagcacttgcctgtgattgtaaatcagaaactgtaaaattgtgaagttctttgaagtttgcccaaaacctgctctgcagacacctgttctgctgggggccggagttggatggcctgcctctgctgcgatggctcaagctgtcactgcacaagaatgttccagcttgccttggcctggctgtcatcgctggctctgtcccactcaggcggttcaccgggttctgctgggcaccaggcttccaattagagagaaatcccactgtgtggccagccccaccagcgccgctctgagcagcc

SEQ ID NO: 383109 - DNA, 434 bp, Homo sapiens
aacactgtattaccttaccagcaatgagcagcgcctgcatgtttgtcccagtacttagggaagaactgattagctcttctaagtgctctcaggttaaacagttccgttggctctaccctgtacttctggcactttgtgggagagcattgcaaatagccaggtactacctctgaggtaggcttacatcttgacttagaaattattttttccccgatgggttaatgttgcttaacctgggaaacataatcagttttcagaggagagttacaaactttgaaatgtgtgcatgttcatttacatttgcatgtataaagcatatatctgaaactttttaacatttctgaaattgagatacatttttataattagtatatttgtataattgtataattagtataattgtatattttatgtgagaattgggttttctcctg

SEQ ID NO: 383110 - DNA, 340 bp, Homo sapiens
ccaatcaaaattccttcctgatcaggtttctggttcagatttcaaaatctctcctgggctgggcatggtggctcacagctgtaatcccagcactttgggaggccgtggtgggtggatcacctggggtcaggagttcgagaccagcctggccaacatggtgaaaccccatctctactaaaaatacaaaaattagttgggcctggtgatgcatgcctgtaatcccagctactcaggaggctgaggcaggagaatcatttgaacctggtaggtggaggttgcagtaaaccgagagatggtgccactgccctccagcctgggtaacagagcaagactatgtctt

SEQ ID NO: 383111 - DNA, 930 bp, Homo sapiens
ggtgttggggctctggtcttggatttgatgtgtggcgaaggctgcaattgtttaataacccttcatgattcaacagctcttcaagaactttcctctgttcttgtgtggagctcgtgacagccagtggtggtggagctccagccctctcttcccacaggcacaagccgggttcctgagtcccagggcttctcgggaggtgtctgccctcctctttcagacaccctctgccctgtgtcccagggccctgggcctgtgctgcactgagcagagactgtaggggaccggctctcccactcctcccagatgggcagcgtcttccgtgtcgggagcatgctgtgctgcttttctcttctcagtctcttagtttttgcgggttcttacgcatgtgaggtgtggacttgcatggtggggagctcaaatggtaacatgaaggggaggagccctctgagtgctgtgatttgttccatcattaccgcttcctgatcacggtgacctgcactgctggagtggtcagtggagccaggcctccccacaacagtgttcccatcgccttcttactattgatttctattcttaaaatattgtattacttagcactcttttgaagacgttccagtatatatcaaatgatcaaaagtccataaccttgtcctacgtagaagccaaaggtgtcatgcagtttcaggtgttcgaatttccagaattcttgtgatgacatttgtaggattcttcttttagacttggaccaaattctgtaacctaatatttgtccttcagattgacagagaaccgcaggcagtgttttctctgtcacacgtgtggtgggtggcatcctggtgacataaagaattgcctttggtaacttgcccagaaggctgtagggttattttctgcttagactttcccctatttctttcttttcttttcttt

SEQ ID NO: 383112 - DNA, 436 bp, Homo sapiens
atatgttattttcactaataactcacaatcagtgcatatatctggcaatatatatctattacccttgaataaatttataataatacttaaatcatcttaaattctgtaagaatgccatgtattttaaatacgcttttctgaaaaatatcttgtaatatatattttgctggagagaaacatacaactagaaaggaaatatgaggaagattgttatgttgtcattagactactagattagaagcttattgaatatctgctctactatcatattaataatattaattttattacaaattaagatctaataataattgttagaatttatgtttttaaaattggatttaaaagtagattattttgtcaatgccttttaaaaatttcccctcacatgttaagaaaaaatatctaagaatacttaataaatgttttaaatata

SEQ ID NO: 383113 - DNA, 435 bp, Homo sapiens
gattttacctaggatgaaaggtggacatagggctgggaggcaaaaggggatgtgagattcagagctttcaacttcctcgcctatgcagattcctggcaccaccaccacctccacccccgccccgcaattcctccctccgcaatccccccaccccgccctccccaatctcttaaaccagatcacaagtgggtgtggattaagtgcatgaggggccctggaaacgcagaatgcaaaattcagggggcggagacagaaaagccacgcactgggagcctcgcctccgcttgccccgcccccgggttgcgccgcccccaaattctcggcgccaggagtctagggttgaaatgattgacacagctacttgttcaatcagaacagttctacccccttagactgagtttctttttggaaagagttacctgatctttagttaaa

SEQ ID NO: 383114 - DNA, 319 bp, Homo sapiens
caaaaagattatgttgtgccaaagaggtcagatacaaaagagtgcatgacaccatttatataacatgacaccatttatataaaattctagataattcctacagtacaatagcagatcagtgggtgcctagggtcagggaagaggggtaaggattagctggacaggggcacaaggaaaccgtctgaagtaatagaaatgttctgttaaatgtggtggtggttacactgctttgtatatttgccaaattcatagaacttaaaatgggtgcattttcttgtaggtgaattacaccttaataaagctgacttcttaggacaat

SEQ ID NO: 383115 - DNA, 2428 bp, Homo sapiens
ggcccgcgcccggcctccgcggcgccgcctcccagcccagagcccagcgctcaggaaggtgcgggcgggggagaaagcaacaccattgtttttcaggcgcctccatttgcccccgagccgagccgtggctttccggatgatcgggagacgcggtctggacgggccgggaaaggagccgggcgcctgcggagaccccgcctcagcgagtacgcccggccgggcgggctgggaggatgaggacggctgccctggacttccgccgccacaggagggttttcggccggacgccgggagggagctccaggctgtgagctccatttgtaaaggtcttaataacaagaacagtgacttcggctccggagcttcaagatagtggcctgcttggcctgcccatctcggatctctccaggaggacccagccacccaagggtcgtcttctgctgctgacccccatcaaatcccatcatgcccacagccctgtgcccccgagtcttggctccgaaggaaagtgaggagcccaggaaaatgaggagcccacctggagagaaccctagcccccagggggagcttcccagccccgagtcctctcggcgtctcttccgccgtttccgctaccaggaggcggcgggcccccgggaggccctgcagcgcctctgggacctgtgcgggggctggctgcggcctgagaggcacaccaaggagcagattctggagctgctggtgctggagcagttcctggccatcctgccccgggagatccagagctgggtgcgggcgcaggagcctgagagcggagagcaggctgtggccgcggtggaggcactggaacgggagcccgggagaccctggcagtggctcaagcactgtgaagaccctgtggtgattgatgatggggacagccctctggaccaggagcaggagcagctgccggtagagccccacagcgaccttgcaaagaaccaggatgcccagcccataaccctggcacagtgcctggggctcccaagcagaccaccaagccagctcagcggggacccagttctgcaagatgctttccttcttcaggaagagaatgtgcgggacacacagcaggtgaccaccctccagctacccccgagtcgggtttctccattcaaggacatgattttatgcttctctgaagaggattggtcccttctagatcctgcccagactggcttctatggagagttcatcattggggaggattacggggtctcaatgcctccaaacgacctagctgcccagccagatctctcccagggagaggagaatgagccacgcgttccagagttgcaggatctccagggcaaagaagtgccccaggtctcctacttggactctccaagtctccagccattccaggtagaagaaagaaggaaacgtgaggagctgcaggtgccagagttccaggcctgcccacagacggtggtgcctcaaaacacctacccagctggcggcaacccgcgatctctagagaacagcctggatgaagaagtgaccatcgagatcgttctctccagctctggggacgaggactcccagcatggcccgtactgcacagaagagctggggagccccacagagaagcagcgcagcctccccgcctcccaccggagcagcaccgaggccggaggcgaggtgcagacctccaagaagtcctacgtgtgtccgaactgtgggaaaatcttccgctggagggtcaacttcatccggcatctgcggagccgcagggagcaggagaagccgcacgagtgctcggtgtgcggggagctgttcagcgacagcgaggacctggatgggcacctagagagccacgaggcccagaagccttaccggtgtggtgcctgcgggaagagcttccgcctgaactcccacctgctctcccaccggcggatacacctgcagccggacagactccagccggtggagaagagagagcaggcggcatccgaggacgcggacaagggtcccaaagagccgctggaaaacggcaaggccaaactgagcttccagtgctgtgagtgtgggaaggccttccagcggcacgaccacctggctcggcaccgcagccactttcacctgaaggacaaagcccggcccttccagtgccggtactgcgtcaagagcttcacgcagaactatgacctcctccgccacgagcgcctgcacatgaagcgccgttccaagcaggctctgaactcctactgagcctctccgcctggggcggcctcaccctggctggtgctgccccctcaccttggtactgatcagcgcccccacccaggacataccttccccaggatagagagcacacctccctcctgtccttgctctcaggtagtgagcgttcgggtggtgccatgggagcactctccctcccccaggtaatgaaagagtggccaagtga

SEQ ID NO: 383116 - DNA, 4468 bp, Homo sapiens
ccgcggcggccaggcctgcgccgcccgccaacagggacgcgccgcggcggcgcctccatttgcccccgagccgagccgtggctttccggatgatcgggagacgcggtctggacgggccgggaaaggagccgggcgcctgcggagaccccgcctcagcgagtacgcccggccgggcgggctgggaggatgaggacggctgccctggacttccgccgccacaggagggttttcggccggacgccgggagggagctccaggctgtgagctccatttgtaaaggtcttaataacaagaacagtgacttcggctccggagcttcaagatagtggcctgcttggcctgcccatctcggatctctccaggaggacccagccacccaagccctgtgcccccgagtcttggctccgaaggaaagtgaggagcccaggaaaatgaggagcccacctggagagaaccctagcccccagggggagcttcccagccccgagtcctctcggcgtctcttccgccgtttccgctaccaggaggcggcgggcccccgggaggccctgcagcgcctctgggacctgtgcgggggctggctgcggcctgagaggcacaccaaggagcagattctggagctgctggtgctggagcagttcctggccatcctgccccgggagatccagagctgggtgcgggcgcaggagcctgagagcggagagcaggctgtggccgcggtggaggcactggaacgggagcccgggagaccctggcagtggctcaagcactgtgaagaccctgtggtgattgatgatggggacagccctctggaccaggagcaggagcagctgccggtagagccccacagcgaccttgcaaagaaccaggatgcccagcccataaccctggcacagtgcctggggctcccaagcagaccaccaagccagctcagcggggacccagttctgcaagatgctttccttcttcaggaagagaatgtgcgggacacacagcaggtgaccaccctccagctacccccgagtcgggtttctccattcaaggacatgattttatgcttctctgaagaggattggtcccttctagatcctgcccagactggcttctatggagagttcatcattggggaggattacggggtctcaatgcctccaaacgacctagctgcccagccagatctctcccagggagaggagaatgagccacgcgttccagagttgcaggatctccagggcaaagaagtgccccaggtctcctacttggactctccaagtctccagccattccaggtagaagaaagaaggaaacgtgaggagctgcaggtgccagagttccaggcctgcccacagacggtggtgcctcaaaacacctacccagctggcggcaacccgcgatctctagagaacagcctggatgaagaagtgaccatcgagatcgttctctccagctctggggacgaggactcccagcatggcccgtactgcacagaagagctggggagccccacagagaagcagcgcagcctccccgcctcccaccggagcagcaccgaggccggaggcgaggtgcagacctccaagaagtcctacgtgtgtccgaactgtgggaaaatcttccgctggagggtcaacttcatccggcatctgcggagccgcagggagcaggagaagccgcacgagtgctcggtgtgcggggagctgttcagcgacagcgaggacctggatgggcacctagagagccacgaggcccagaagccttaccggtgtggtgcctgcgggaagagcttccgcctgaactcccacctgctctcccaccggcggatacacctgcagccggacagactccagccggtggagaagagagagcaggcggcatccgaggacgcggacaagggtcccaaagagccgctggaaaacggcaaggccaaactgagcttccagtgctgtgagtgtgggaaggccttccagcggcacgaccacctggctcggcaccgcagccactttcacctgaaggacaaagcccggcccttccagtgccggtactgcgtcaagagcttcacgcagaactatgacctcctccgccacgagcgcctgcacatgaagcgccgttccaagcaggctctgaactcctactgagcctctccgcctggggcggcctcaccctggctggtgctgccccctcaccttggtactgatcagcgcccccacccaggacataccttccccaggatagagagcacacctccctcctgtccttgctctcaggtagtgagcgttcgggtggtgccatgggagcactctccctcccccaggtaatgaaagagtggccaagtgagtgttctgtttctgctgtgccaaaaaacgggggggatgtgccatcaccaggttggacatgccaggtgttctgcgtcttagagacccttggcccatgctccccaagctcggggagtaaaactgggctatcccccgtcagggcggcaccctggtcaccagccaaacctcagtatactccctcccctccttccctgtctgaacgctaggatctgctcctgaagctccaggatgcctgcacttccactgagaagctgctggcggatgttggactagaggaaagaagaaggcagggtgggactgatgggctcagtggggagcagggccaggcacactgagccagacatgtcatgtctgagccccagattcgtggccatcaggtaggcaggagcaccccgcagatccaagatgatcaggcagcccttttgggctggcctctgtggcaggggtctgcagagctccttcttgaggtttggaaacagtcgtcatacctgttgattttcctgggggccaatcactagggatctggagctcaccaaaaacaaagcttacattttaatttgtgttgcacacctaccccataatgtctttataccccaaagatccttggtaaatgcttgtgggttggaagcggagttgtcatcgtttaaaaggcacttaagtcccttcttccaatctgtcctgtctaggaatgtggagctctgcccccagtgaggggttctcctgtctgggtgagccaagctccagaacagaaccttgcctgacaacacacttgatagatacattagcttggagtgctggtgtgtccaaacactggctggcttagaacaacaggagtgtattccctgacagttctgggaggtgcacgtccaagatcagggtgtcctcagagttggtgccttccgagagctgtgagggagaagcggcttcatgcctttgctggcagttgccattccttggtgtgtggaagcgtcacccagtctctgccttcatctccacatggcactcttgctgtgtgcgtgtctgtctccaaacctccctttgtttaaggacaccagtcatatcggattagagcccatcccaccgactccagtataacctcatctgtatccgcagcaaccgtttaccaataaggtcacattctgaggtactagaggttgggacttcaacatcggaatttgaaagggacagcattcagcccatgactccagataaacgtgaggtatgctatatcattcctaatttacagatgagtcaatacaaacttgagtgagcttgctcacaattccatcaaaggcagggttcagacccaagtttcagcatttagggcaggtgtcctctgcatggaagaatcatactcaatagccgtaaacgctgacaaattccccttcctccctgccttctgatgggggctgggcaggccagctggagctgtgtctcctgctgggattccggactgagagtgacagcaggtagtgaaacctcaagcaatttaaaacatggtattgttcctggaagactggttatgttggctagggtcagcaagagagggcatcaaggctgtagtctagcagtgacttaatctgcaagtcaaaccagacgggtattttgtattattcatatgtcacatcctaccaacagacagtaagtcaggcaaggctcctggtgctccttgtcactcacgtaattttcacatcaggaaaactctgggctgggtgcagtggctcacacctgtaatcctagcactttgggaaaccaaggtgggtggattgcctagctcagtgacaccagcctgggccacatggcaaaaccccgtctgtaccaaaaatgcaaaaaattagctgggtgtggtgttgacgtttgcggtcccagctactctggaggctgaggtgggaggattgcttgagtctgggaggcagaagttgcagtaagccgagatcatgccactgcacaagctaggtgacagaatgagactctgtctcaaaaataattaaaaagcctctgccccaaactcgttaaaagattttataaccacaactgctgtttctgtgtagatgcatctgcatgcccaggagcagtaaatgcaataaaatcatttggttatactttgaacacaaaataaacggttgaggctttta

SEQ ID NO: 383117 - DNA, 4562 bp, Homo sapiens
ggcccgcgcccggcctccgcggcgccgcctcccagcccagagcccagcgctcaggaaggtgcgggcgggggagaaagcaacaccattgtttttcaggcgcctccatttgcccccgagccgagccgtggctttccggatgatcgggagacgcggtctggacgggccgggaaaggagccgggcgcctgcggagaccccgcctcagcgagtacgcccggccgggcgggctgggaggatgaggacggctgccctggacttccgccgccacaggagggttttcggccggacgccgggagggagctccaggctgtgagctccatttgtaaaggtcttaataacaagaacagtgacttcggctccggagcttcaagatagtggcctgcttggcctgcccatctcggatctctccaggaggacccagccacccaagggtcgtcttctgctgctgacccccatcaaatcccatcatgcccacagccctgtgcccccgagtcttggctccgaaggaaagtgaggagcccaggaaaatgaggagcccacctggagagaaccctagcccccagggggagcttcccagccccgagtcctctcggcgtctcttccgccgtttccgctaccaggaggcggcgggcccccgggaggccctgcagcgcctctgggacctgtgcgggggctggctgcggcctgagaggcacaccaaggagcagattctggagctgctggtgctggagcagttcctggccatcctgccccgggagatccagagctgggtgcgggcgcaggagcctgagagcggagagcaggctgtggccgcggtggaggcactggaacgggagcccgggagaccctggcagtggctcaagcactgtgaagaccctgtggtgattgatgatggggacagccctctggaccaggagcaggagcagctgccggtagagccccacagcgaccttgcaaagaaccaggatgcccagcccataaccctggcacagtgcctggggctcccaagcagaccaccaagccagctcagcggggacccagttctgcaagatgctttccttcttcaggaagagaatgtgcgggacacacagcaggtgaccaccctccagctacccccgagtcgggtttctccattcaaggacatgattttatgcttctctgaagaggattggtcccttctagatcctgcccagactggcttctatggagagttcatcattggggaggattacggggtctcaatgcctccaaacgacctagctgcccagccagatctctcccagggagaggagaatgagccacgcgttccagagttgcaggatctccagggcaaagaagtgccccaggtctcctacttggactctccaagtctccagccattccaggtagaagaaagaaggaaacgtgaggagctgcaggtgccagagttccaggcctgcccacagacggtggtgcctcaaaacacctacccagctggcggcaacccgcgatctctagagaacagcctggatgaagaagtgaccatcgagatcgttctctccagctctggggacgaggactcccagcatggcccgtactgcacagaagagctggggagccccacagagaagcagcgcagcctccccgcctcccaccggagcagcaccgaggccggaggcgaggtgcagacctccaagaagtcctacgtgtgtccgaactgtgggaaaatcttccgctggagggtcaacttcatccggcatctgcggagccgcagggagcaggagaagccgcacgagtgctcggtgtgcggggagctgttcagcgacagcgaggacctggatgggcacctagagagccacgaggcccagaagccttaccggtgtggtgcctgcgggaagagcttccgcctgaactcccacctgctctcccaccggcggatacacctgcagccggacagactccagccggtggagaagagagagcaggcggcatccgaggacgcggacaagggtcccaaagagccgctggaaaacggcaaggccaaactgagcttccagtgctgtgagtgtgggaaggccttccagcggcacgaccacctggctcggcaccgcagccactttcacctgaaggacaaagcccggcccttccagtgccggtactgcgtcaagagcttcacgcagaactatgacctcctccgccacgagcgcctgcacatgaagcgccgttccaagcaggctctgaactcctactgagcctctccgcctggggcggcctcaccctggctggtgctgccccctcaccttggtactgatcagcgcccccacccaggacataccttccccaggatagagagcacacctccctcctgtccttgctctcaggtagtgagcgttcgggtggtgccatgggagcactctccctcccccaggtaatgaaagagtggccaagtgagtgttctgtttctgctgtgccaaaaaacgggggggatgtgccatcaccaggttggacatgccaggtgttctgcgtcttagagacccttggcccatgctccccaagctcggggagtaaaactgggctatcccccgtcagggcggcaccctggtcaccagccaaacctcagtatactccctcccctccttccctgtctgaacgctaggatctgctcctgaagctccaggatgcctgcacttccactgagaagctgctggcggatgttggactagaggaaagaagaaggcagggtgggactgatgggctcagtggggagcagggccaggcacactgagccagacatgtcatgtctgagccccagattcgtggccatcaggtaggcaggagcaccccgcagatccaagatgatcaggcagcccttttgggctggcctctgtggcaggggtctgcagagctccttcttgaggtttggaaacagtcgtcatacctgttgattttcctgggggccaatcactagggatctggagctcaccaaaaacaaagcttacattttaatttgtgttgcacacctaccccataatgtctttataccccaaagatccttggtaaatgcttgtgggttggaagcggagttgtcatcgtttaaaaggcacttaagtcccttcttccaatctgtcctgtctaggaatgtggagctctgcccccagtgaggggttctcctgtctgggtgagccaagctccagaacagaaccttgcctgacaacacacttgatagatacattagcttggagtgctggtgtgtccaaacactggctggcttagaacaacaggagtgtattccctgacagttctgggaggtgcacgtccaagatcagggtgtcctcagagttggtgccttccgagagctgtgagggagaagcggcttcatgcctttgctggcagttgccattccttggtgtgtggaagcgtcacccagtctctgccttcatctccacatggcactcttgctgtgtgcgtgtctgtctccaaacctccctttgtttaaggacaccagtcatatcggattagagcccatcccaccgactccagtataacctcatctgtatccgcagcaaccgtttaccaataaggtcacattctgaggtactagaggttgggacttcaacatcggaatttgaaagggacagcattcagcccatgactccagataaacgtgaggtatgctatatcattcctaatttacagatgagtcaatacaaacttgagtgagcttgctcacaattccatcaaaggcagggttcagacccaagtttcagcatttagggcaggtgtcctctgcatggaagaatcatactcaatagccgtaaacgctgacaaattccccttcctccctgccttctgatgggggctgggcaggccagctggagctgtgtctcctgctgggattccggactgagagtgacagcaggtagtgaaacctcaagcaatttaaaacatggtattgttcctggaagactggttatgttggctagggtcagcaagagagggcatcaaggctgtagtctagcagtgacttaatctgcaagtcaaaccagacgggtattttgtattattcatatgtcacatcctaccaacagacagtaagtcaggcaaggctcctggtgctccttgtcactcacgtaattttcacatcaggaaaactctgggctgggtgcagtggctcacacctgtaatcctagcactttgggaaaccaaggtgggtggattgcctagctcagtgacaccagcctgggccacatggcaaaaccccgtctgtaccaaaaatgcaaaaaattagctgggtgtggtgttgacgtttgcggtcccagctactctggaggctgaggtgggaggattgcttgagtctgggaggcagaagttgcagtaagccgagatcatgccactgcacaagctaggtgacagaatgagactctgtctcaaaaataattaaaaagcctctgccccaaactcgttaaaagattttataaccacaactgctgtttctgtgtagatgcatctgcatgcccaggagcagtaaatgcaataaaatcatttggttatactttgaacacaaaataaacggttgaggctttta

SEQ ID NO: 383118 - DNA, 5239 bp, Homo sapiens
ccgcggcggccaggcctgcgccgcccgccaacagggacgcgccgcggcggcgcctccatttgcccccgagccgagccgtggctttccggatgatcgggagacgcggtctggacgggccgggaaaggagccgggcgcctgcggagaccccgcctcagcgagtacgcccggccgggcgggctgggaggatgaggacggctgccctggacttccgccgccacaggagggttttcggccggacgccgggagggagctccaggctgtgagctccatttgtaaaggtcttaataacaagaacagtgacttcggctccggagcttcaagatagtggcctgcttggcctgcccatctcggatctctccaggaggacccagccacccaagccctgtgcccccgagtcttggctccgaaggaaagtgaggagcccaggaaaatgaggagcccacctggagagaaccctagcccccagggggagcttcccagccccgagtcctctcggcgtctcttccgccgtttccgctaccaggaggcggcgggcccccgggaggccctgcagcgcctctgggacctgtgcgggggctggctgcggcctgagaggcacaccaaggagcagattctggagctgctggtgctggagcagttcctggccatcctgccccgggagatccagagctgggtgcgggcgcaggagcctgagagcggagagcaggctgtggccgcggtggaggcactggaacgggagcccgggagaccctggcagtggctcaagcactgtgaagaccctgtggtgattgatgatggggacagccctctggaccaggagcaggagcagctgccggtagagccccacagcgaccttgcaaagaaccaggatgcccagcccataaccctggcacagtgcctggggctcccaagcagaccaccaagccagctcagcggggacccagttctgcaagatgctttccttcttcaggaagagaatgtgcgggacacacagcaggtgaccaccctccagctacccccgagtcgggtttctccattcaaggacatgattttatgcttctctgaagaggattggtcccttctagatcctgcccagactggcttctatggagagttcatcattggggaggattacggggtctcaatgcctccaaacgacctagctgcccagccagatctctcccagggagaggagaatgagccacgcgttccagagttgcaggatctccagggcaaagaagtgccccaggtctcctacttggactctccaagtctccagccattccaggtagaagaaagaaggaaacgtgaggagctgcaggtgccagagttccaggcctgcccacagacggtggtgcctcaaaacacctacccagctggcggcaacccgcgatctctagagaacagcctggatgaagaagtgaccatcgagatcgttctctccagctctggggacgaggactcccagcatggcccgtactgcacagaagagctggggagccccacagagaagcagcgcagcctccccgcctcccaccggagcagcaccgaggccggaggcgaggtgcagacctccaagaagtcctacgtgtgtccgaactgtgggaaaatcttccgctggagggtcaacttcatccggcatctgcggagccgcagggagcaggagaagccgcacgagtgctcggtgtgcggggagctgttcagcgacagcgaggacctggatgggcacctagagagccacgaggcccagaagccttaccggtgtggtgcctgcgggaagagcttccgcctgaactcccacctgctctcccaccggcggatacacctgcagccggacagactccagccggtggagaagagagagcaggcggcatccgaggacgcggacaagggtcccaaagagccgctggaaaacggcaaggccaaactgagcttccagtgctgtgagtgtgggaaggccttccagcggcacgaccacctggctcggcaccgcagccactttcacctgaaggacaaagcccggcccttccagtgccggtactgcgtcaagagcttcacgcagaactatgacctcctccgccacgagcgcctgcacatgaagcgccgttccaagcaggctctgaactcctactgagcctctccgcctggggcggcctcaccctggctggtgctgccccctcaccttggtactgatcagcgcccccacccaggacataccttccccaggatagagagcacacctccctcctgtccttgctctcaggtagtgagcgttcgggtggtgccatgggagcactctccctcccccaggtaatgaaagagtggccaagtgagtgttctgtttctgctgtgccaaaaaacgggggggatgtgccatcaccaggttggacatgccaggtgttctgcgtcttagagacccttggcccatgctccccaagctcggggagtaaaactgggctatcccccgtcagggcggcaccctggtcaccagccaaacctcagtatactccctcccctccttccctgtctgaacgctaggatctgctcctgaagctccaggatgcctgcacttccactgagaagctgctggcggatgttggactagaggaaagaagaaggcagggtgggactgatgggctcagtggggagcagggccaggcacactgagccagacatgtcatgtctgagccccagattcgtggccatcaggtaggcaggagcaccccgcagatccaagatgatcaggcagcccttttgggctggcctctgtggcaggggtctgcagagctccttcttgaggtttggaaacagtcgtcatacctgttgattttcctgggggccaatcactagggatctggagctcaccaaaaacaaagcttacattttaatttgtgttgcacacctaccccataatgtctttataccccaaagatccttggtaaatgcttgtgggttggaagcggagttgtcatcgtttaaaaggcacttaagtcccttcttccaatctgtcctgtctaggaatgtggagctctgcccccagtgaggggttctcctgtctgggtgagccaagctccagaacagaaccttgcctgacaacacacttgatagatacattagcttggagtgctggtgtgtccaaacactggctggcttagaacaacaggagtgtattccctgacagttctgggaggtgcacgtccaagatcagggtgtcctcagagttggtgccttccgagagctgtgagggagaagcggcttcatgcctttgctggcagttgccattccttggtgtgtggaagcgtcacccagtctctgccttcatctccacatggcactcttgctgtgtgcgtgtctgtctccaaacctccctttgtttaaggacaccagtcatatcggattagagcccatcccaccgactccagtataacctcatctgtatccgcagcaaccgtttaccaataaggtcacattctgaggtactagaggttgggacttcaacatcggaatttgaaagggacagcattcagcccatgactccagataaacgtgaggtatgctatatcattcctaatttacagatgagtcaatacaaacttgagtgagcttgctcacaattccatcaaaggcagggttcagacccaagtttcagcatttagggcaggtgtcctctgcatggaagaatcatactcaatagccgtaaacgctgacaaattccccttcctccctgccttctgatgggggctgggcaggccagctggagctgtgtctcctgctgggattccggactgagagtgacagcaggtagtgaaacctcaagcaatttaaaacatggtattgttcctggaagactggttatgttggctagggtcagcaagagagggcatcaaggctgtagtctagcagtgacttaatctgcaagtcaaaccagacgggtattttgtattattcatatgtcacatcctaccaacagacagtaagtcaggcaaggctcctggtgctccttgtcactcacgtaattttcacatcaggaaaactctgggctgggtgcagtggctcacacctgtaatcctagcactttgggaaaccaaggtgggtggattgcctagctcagtgacaccagcctgggccacatggcaaaaccccgtctgtaccaaaaatgcaaaaaattagctgggtgtggtgttgacgtttgcggtcccagctactctggaggctgaggtgggaggattgcttgagtctgggaggcagaagttgcagtaagccgagatcatgccactgcacaagctaggtgacagaatgagactctgtctcaaaaataattaaaaagcctctgccccaaactcgttaaaagattttataaccacaactgctgtttctgtgtagatgcatctgcatgcccaggagcagtaaatgcaataaaatcatttggttatactttgaacacaaaataaacggttgaggcttttactttctaaatagtttgtctcttgtatcaacatagctggaaaagggagaaatccgatttttaaggccaagggaggggaaaattccaagtagaagccaggctctctgtacacgtttaccccacctacctgtgtgctcctacctgtgctgaggattctctctgtagctctaaggtcttgggaaggttattcaccttcctgcttcagacgtctgactcaagagaagaacactgttctacttaccagagtgtttttctgtgtaaaaccacatcatgaaggagaaagcgacaaagggaatgtgaggggctggaagccacagggaggctgtctcttgagtccccaccactgatccagagccaaccaaggcacctcaggaaatggaaggccacattgcctctggatttggaaatcctcctgggtaatgtaactgaaacccaggttgatgccatgcagcaggagcagcagggggaacgtgctctcaggagaggtcggccaaccctccagcccaacacccttcaccacagtggtggaggaggctgcacccaggagatctttgtctcccttttggccactgatacctttggccttatctgacaacagctacccctcgatccttccctcccaccccaggggctgggcagctggctggagctttgtgtccaccttgctctggaggttgagacccccatctgagcaacatcctctctctttgttcctctgatcccttggcatcgtcacaaacccacaggtgcataataaaaacttgctgagtcaa

SEQ ID NO: 383119 - DNA, 3586 bp, Homo sapiens
tagaggatcccccatgttggccaacgtgctcggtgtgcggggagctgttcagcgacagcgaggacctggatgggcacctagagagccacgaggcccagaagccttaccggtgtggtgcctgcgggaagagcttccgcctgaactcccacctgctctcccaccggcggatacacctgcagccggacagactccagccggtggagaagagagagcaggcggcatccgaggacgcggacaagggtcccaaagagccgctggaaaacggcaaggccaaactgagcttccagtgctgtgagtgtgggaaggccttccagcggcacgaccacctggctcggcaccgcagccactttcacctgaaggacaaagcccggcccttccagtgccggtactgcgtcaagagcttcacgcagaactatgacctcctccgccacgagcgcctgcacatgaagcgccgttccaagcaggctctgaactcctactgagcctctccgcctggggcggcctcaccctggctggtgctgccccctcaccttggtactgatcagcgcccccacccaggacataccttccccaggatagagagcacacctccctcctgtccttgctctcaggtagtgagcgttcgggtggtgccatgggagcactctccctcccccaggtaatgaaagagtggccaagtgagtgttctgtttctgctgtgccaaaaaacgggggggatgtgccatcaccaggttggacatgccaggtgttctgcgtcttagagacccttggcccatgctccccaagctcggggagtaaaactgggctatcccccgtcagggcggcaccctggtcaccagccaaacctcagtatactccctcccctccttccctgtctgaacgctaggatctgctcctgaagctccaggatgcctgcacttccactgagaagctgctggcggatgttggactagaggaaagaagaaggcagggtgggactgatgggctcagtggggagcagggccaggcacactgagccagacatgtcatgtctgagccccagattcgtggccatcaggtaggcaggagcaccccgcagatccaagatgatcaggcagcccttttgggctggcctctgtggcaggggtctgcagagctccttcttgaggtttggaaacagtcgtcatacctgttgattttcctgggggccaatcactagggatctggagctcaccaaaaacaaagcttacattttaatttgtgttgcacacctaccccataatgtctttataccccaaagatccttggtaaatgcttgtgggttggaagcggagttgtcatcgtttaaaaggcacttaagtcccttcttccaatctgtcctgtctaggaatgtggagctctgcccccagtgaggggttctcctgtctgggtgagccaagctccagaacagaaccttgcctgacaacacacttgatagatacattagcttggagtgctggtgtgtccaaacactggctggcttagaacaacaggagtgtattccctgacagttctgggaggtgcacgtccaagatcagggtgtcctcagagttggtgccttccgagagctgtgagggagaagcggcttcatgcctttgctggcagttgccattccttggtgtgtggaagcgtcacccagtctctgccttcatctccacatggcactcttgctgtgtgcgtgtctgtctccaaacctccctttgtttaaggacaccagtcatatcggattagagcccatcccaccgactccagtataacctcatctgtatccgcagcaaccgtttaccaataaggtcacattctgaggtactagaggttgggacttcaacatcggaatttgaaagggacagcattcagcccatgactccagataaacgtgaggtatgctatatcattcctaatttacagatgagtcaatacaaacttgagtgagcttgctcacaattccatcaaaggcagggttcagacccaagtttcagcatttagggcaggtgtcctctgcatggaagaatcatactcaatagccgtaaacgctgacaaattccccttcctccctgccttctgatgggggctgggcaggccagctggagctgtgtctcctgctgggattccggactgagagtgacagcaggtagtgaaacctcaagcaatttaaaacatggtattgttcctggaagactggttatgttggctagggtcagcaagagagggcatcaaggctgtagtctagcagtgacttaatctgcaagtcaaaccagacgggtattttgtattattcatatgtcacatcctaccaacagacagtaagtcaggcaaggctcctggtgctccttgtcactcacgtaattttcacatcaggaaaactctgggctgggtgcagtggctcacacctgtaatcctagcactttgggaaaccaaggtgggtggattgcctagctcagtgacaccagcctgggccacatggcaaaaccccgtctgtaccaaaaatgcaaaaaattagctgggtgtggtgttgacgtttgcggtcccagctactctggaggctgaggtgggaggattgcttgagtctgggaggcagaagttgcagtaagccgagatcatgccactgcacaagctaggtgacagaatgagactctgtctcaaaaataattaaaaagcctctgccccaaactcgttaaaagattttataaccacaactgctgtttctgtgtagatgcatctgcatgcccaggagcagtaaatgcaataaaatcatttggttatactttgaacacaaaataaacggttgaggcttttactttctaaatagtttgtctcttgtatcaacatagctggaaaagggagaaatccgatttttaaggccaagggaggggaaaattccaagtagaagccaggctctctgtacacgtttaccccacctacctgtgtgctcctacctgtgctgaggattctctctgtagctctaaggtcttgggaaggttattcaccttcctgcttcagacgtctgactcaagagaagaacactgttctacttaccagagtgtttttctgtgtaaaaccacatcatgaaggagaaagcgacaaagggaatgtgaggggctggaagccacagggaggctgtctcttgagtccccaccactgatccagagccaaccaaggcacctcaggaaatggaaggccacattgcctctggatttggaaatcctcctgggtaatgtaactgaaacccaggttgatgccatgcagcaggagcagcagggggaacgtgctctcaggagaggtcggccaaccctccagcccaacacccttcaccacagtggtggaggaggctgcacccaggagatctttgtctcccttttggccactgatacctttggccttatctgacaacagctacccctcgatccttccctcccaccccaggggctgggcagctggctggagctttgtgtccaccttgctctggaggttgagacccccatctgagcaacatcctctctctttgttcctctgatcccttggcatcgtcacaaacccacaggtgcataataaaaacttgctgagtcaa

SEQ ID NO: 383120 - DNA, 3255 bp, Homo sapiens
ccgcggcggccaggcctgcgccgcccgccaacagggacgcgccgcggcggcgcctccatttgcccccgagccgagccgtggctttccggatgatcgggagacgcggtctggacgggccgggaaaggagccgggcgcctgcggagaccccgcctcagcgagtacgcccggccgggcgggctgggaggatgaggacggctgccctggacttccgccgccacaggagggttttcggccggacgccgggagggagctccaggctgtgagctccatttgtaaaggtcttaataacaagaacagtgacttcggctccggagcttcaagatagtggcctgcttggcctgcccatctcggatctctccaggaggacccagccacccaagccctgtgcccccgagtcttggctccgaaggaaagtgaggagcccaggaaaatgaggagcccacctggagagaaccctagcccccagggggagcttcccagccccgagtcctctcggcgtctcttccgccgtttccgctaccaggaggcggcgggcccccgggaggccctgcagcgcctctgggacctgtgcgggggctggctgcggcctgagaggcacaccaaggagcagattctggagctgctggtgctggagcagttcctggccatcctgccccgggagatccagagctgggtgcgggcgcaggagcctgagagcggagagcaggctgtggccgcggtggaggcactggaacgggagcccgggagaccctggcagtggctcaagcactgtgaagaccctgtggtgattgatgatggggacagccctctggaccaggagcaggagcagctgccggtagagccccacagcgaccttgcaaagaaccaggatgcccagcccataaccctggcacagtgcctggggctcccaagcagaccaccaagccagctcagcggggacccagttctgcaagatgctttccttcttcaggaagagaatgtgcgggacacacagcaggtgaccaccctccagctacccccgagtcgggtttctccattcaaggacatgattttatgcttctctgaagaggattggtcccttctagatcctgcccagactggcttctatggagagttcatcattggggaggattacggggtctcaatgcctccaaacgacctagctgcccagccagatctctcccagggagaggagaatgagccacgcgttccagagttgcaggatctccagggcaaagaagtgccccaggtctcctacttggactctccaagtctccagccattccaggtagaagaaagaaggaaacgtgaggagctgcaggtgccagagttccaggcctgcccacagacggtggtgcctcaaaacacctacccagctggcggcaacccgcgatctctagagaacagcctggatgaagaagtgaccatcgagatcgttctctccagctctggggacgaggactcccagcatggcccgtactgcacagaagagctggggagccccacagagaagcagcgcagcctccccgcctcccaccggagcagcaccgaggccggaggcgaggtgcagacctccaagaagtcctacgtgtgtccgaactgtgggaaaatcttccgctggagggtcaacttcatccggcatctgcggagccgcagggagcaggagaagccgcacgagtgctcggtgtgcggggagctgttcagcgacagcgaggacctggatgggcacctagagagccacgaggcccagaagccttaccggtgtggtgcctgcgggaagagcttccgcctgaactcccacctgctctcccaccggcggatacacctgcagccggacagactccagccggtggagaagagagagcaggcggcatccgaggacgcggacaagggtcccaaagagccgctggaaaacggcaaggccaaactgagcttccagtgctgtgagtgtgggaaggccttccagcggcacgaccacctggctcggcaccgcagccactttcacctgaaggacaaagcccggcccttccagtgccggtactgcgtcaagagcttcacgcagaactatgacctcctccgccacgagcgcctgcacatgaagcgccgttccaagcaggctctgaactcctactgagcctctccgcctggggcggcctcaccctggctggtgctgccccctcaccttggtactgatcagcgcccccacccaggacataccttccccaggatagagagcacacctccctcctgtccttgctctcaggtagtgagcgttcgggtggtgccatgggagcactctccctcccccaggtaatgaaagagtggccaagtgagtgttctgtttctgctgtgccaaaaaacgggggggatgtgccatcaccaggttggacatgccaggtgttctgcgtcttagagacccttggcccatgctccccaagctcggggagtaaaactgggctatcccccgtcagggcggcaccctggtcaccagccaaacctcagtatactccctcccctccttccctgtctgaacgctaggatctgctcctgaagctccaggatgcctgcacttccactgagaagctgctggcggatgttggactagaggaaagaagaaggcagggtgggactgatgggctcagtggggagcagggccaggcacactgagccagacatgtcatgtctgagccccagattcgtggccatcaggtaggcaggagcaccccgcagatccaagatgatcaggcagcccttttgggctggcctctgtggcaggggtctgcagagctccttcttgaggtttggaaacagtcgtcatacctgttgattttcctgggggccaatcactagggatctggagctcaccaaaaacaaagcttacattttaatttgtgttgcacacctaccccataatgtctttataccccaaagatccttggtaaatgcttgtgggttggaagcggagttgtcatcgtttaaaaggcacttaagtcccttcttccaatctgtcctgtctaggaatgtggagctctgcccccagtgaggggttctcctgtctgggtgagccaagctccagaacagaaccttgcctgacaacacacttgatagatacattagcttggagtgctggtgtgtccaaacactggctggcttagaacaacaggagtgtattccctgacagttctgggaggtgcacgtccaagatcagggtgtcctcagagttgggtctgttcttgggggatccttctagacca

SEQ ID NO: 383121 - DNA, 1067 bp, Homo sapiens
  misc_feature (882)..(882): n is a, c, g, or t
  misc_feature (925)..(925): n is a, c, g, or t
  misc_feature (1050)..(1050): n is a, c, g, or t
ggcccgcgcccggcctccgcggcgccgcctcccagcccagagcccagcgctcaggaaggtgcgggcgggggagaaagcaacaccattgtttttcaggcgcctccatttgcccccgagccgagccgtggctttccggatgatcgggagacgcggtctggacgggccgggaaaggagccgggcgcctgcggagaccccgcctcagcgagtacgcccggccgggcgggctgggaggatgaggacggctgccctggacttccgccgccacaggagggttttcggccggacgccgggagggagctccaggctgtgagctccatttgtaaaggtcttaataacaagaacagtgacttcggctccggagcttcaagatagtggcctgcttggcctgcccatctcggatctctccaggaggacccagccacccaagggtcgtcttctgctgctgacccccatcaaatcccatcatgcccacagccctgtgcccccgagtcttggctccgaaggaaagtgaggagcccaggaaaatgaggagcccacctggagagaaccctagcccccagggggagcttcccagccccgagtcctctcggcgtctcttccgccgtttccgctaccaggaggcggcgggcccccgggaggccctgcagcgcctctgggacctgtgcgggggctggctgcggcctgagaggcacaccaaggagcagattctggagctgctggtgctggagcagttcctggccatgaattcccttcctttttaaggttgaataatactcccatgtgtgtatatatcaccttgtttatccattcatctgtcgatggacatttacattgcttccacattttggcttttgtgaataatgctgctatgaacatggtancacgtgaagttttgtttttctttttaaatgaatcttctcattnttacgtaattgtagattcacatgccattgtaagaaatacacagagagatcctgtgaactttttaaccctcatagtaaatatagagtaaaaatcttattctataatatagtacaatgtccacccanggtattgacatgataca

SEQ ID NO: 383122 - DNA, 266 bp, Homo sapiens
agatctctcccagggagaggagaatgagccacgcgttccagagttgcaggatctccagggcaaagaagtgccccaggtctcctacttgggtgagtaatgattccagaactgagtggacagagtagggggaagggttgctggcagccggaggtgagcccactctctggcttctctctgcggcccctaattgccttcttcatttccccagactctatgtgggtcttgcatgtcttgccttgtccctgacttttcatagaaagaatgga

SEQ ID NO: 383123 - DNA, 4515 bp, Homo sapiens
ccgcggcggccaggcctgcgccgcccgccaacagggacgcgccgcggcggcgcctccatttgcccccgagccgagccgtggctttccggatgatcgggagacgcggtctggacgggccgggaaaggagccgggcgcctgcggagaccccgcctcagcgagtacgcccggccgggcgggctgggaggatgaggacggctgccctggacttccgccgccacaggagggttttcggccggacgccgggagggagctccaggctgtgagctccatttgtaaaggtcttaataacaagaacagtgacttcggctccggagcttcaagatagtggcctgcttggcctgcccatctcggatctctccaggaggacccagccacccaagggtcgtcttctgctgctgacccccatcaaatcccatcatgcccacagccctgtgcccccgagtcttggctccgaaggaaagtgaggagcccaggaaaatgaggagcccacctggagagaaccctagcccccagggggagcttcccagccccgagtcctctcggcgtctcttccgccgtttccgctaccaggaggcggcgggcccccgggaggccctgcagcgcctctgggacctgtgcgggggctggctgcggcctgagaggcacaccaaggagcagattctggagctgctggtgctggagcagttcctggccatcctgccccgggagatccagagctgggtgcgggcgcaggagcctgagagcggagagcaggctgtggccgcggtggaggcactggaacgggagcccgggagaccctggcagtggctcaagcactgtgaagaccctgtggtgattgatgatggggacagccctctggaccaggagcaggagcagctgccggtagagccccacagcgaccttgcaaagaaccaggatgcccagcccataaccctggcacagtgcctggggctcccaagcagaccaccaagccagctcagcggggacccagttctgcaagatgctttccttcttcaggaagagaatgtgcgggacacacagcaggtgaccaccctccagctacccccgagtcgggtttctccattcaaggacatgattttatgcttctctgaagaggattggtcccttctagatcctgcccagactggcttctatggagagttcatcattggggaggattacggggtctcaatgcctccaaacgacctagctgcccagccagatctctcccagggagaggagaatgagccacgcgttccagagttgcaggatctccagggcaaagaagtgccccaggtctcctacttggactctccaagtctccagccattccaggtagaagaaagaaggaaacgtgaggagctgcaggtgccagagttccaggcctgcccacagacggtggtgcctcaaaacacctacccagctggcggcaacccgcgatctctagagaacagcctggatgaagaagtgaccatcgagatcgttctctccagctctggggacgaggactcccagcatggcccgtactgcacagaagagctggggagccccacagagaagcagcgcagcctccccgcctcccaccggagcagcaccgaggccggaggcgaggtgcagacctccaagaagtcctacgtgtgtccgaactgtgggaaaatcttccgctggagggtcaacttcatccggcatctgcggagccgcagggagcaggagaagccgcacgagtgctcggtgtgcggggagctgttcagcgacagcgaggacctggatgggcacctagagagccacgaggcccagaagccttaccggtgtggtgcctgcgggaagagcttccgcctgaactcccacctgctctcccaccggcggatacacctgcagccggacagactccagccggtggagaagagagagcaggcggcatccgaggacgcggacaagggtcccaaagagccgctggaaaacggcaaggccaaactgagcttccagtgctgtgagtgtgggaaggccttccagcggcacgaccacctggctcggcaccgcagccactttcacctgaaggacaaagcccggcccttccagtgccggtactgcgtcaagagcttcacgcagaactatgacctcctccgccacgagcgcctgcacatgaagcgccgttccaagcaggctctgaactcctactgagcctctccgcctggggcggcctcaccctggctggtgctgccccctcaccttggtactgatcagcgcccccacccaggacataccttccccaggatagagagcacacctccctcctgtccttgctctcaggtagtgagcgttcgggtggtgccatgggagcactctccctcccccaggtaatgaaagagtggccaagtgagtgttctgtttctgctgtgccaaaaaacgggggggatgtgccatcaccaggttggacatgccaggtgttctgcgtcttagagacccttggcccatgctccccaagctcggggagtaaaactgggctatcccccgtcagggcggcaccctggtcaccagccaaacctcagtatactccctcccctccttccctgtctgaacgctaggatctgctcctgaagctccaggatgcctgcacttccactgagaagctgctggcggatgttggactagaggaaagaagaaggcagggtgggactgatgggctcagtggggagcagggccaggcacactgagccagacatgtcatgtctgagccccagattcgtggccatcaggtaggcaggagcaccccgcagatccaagatgatcaggcagcccttttgggctggcctctgtggcaggggtctgcagagctccttcttgaggtttggaaacagtcgtcatacctgttgattttcctgggggccaatcactagggatctggagctcaccaaaaacaaagcttacattttaatttgtgttgcacacctaccccataatgtctttataccccaaagatccttggtaaatgcttgtgggttggaagcggagttgtcatcgtttaaaaggcacttaagtcccttcttccaatctgtcctgtctaggaatgtggagctctgcccccagtgaggggttctcctgtctgggtgagccaagctccagaacagaaccttgcctgacaacacacttgatagatacattagcttggagtgctggtgtgtccaaacactggctggcttagaacaacaggagtgtattccctgacagttctgggaggtgcacgtccaagatcagggtgtcctcagagttggtgccttccgagagctgtgagggagaagcggcttcatgcctttgctggcagttgccattccttggtgtgtggaagcgtcacccagtctctgccttcatctccacatggcactcttgctgtgtgcgtgtctgtctccaaacctccctttgtttaaggacaccagtcatatcggattagagcccatcccaccgactccagtataacctcatctgtatccgcagcaaccgtttaccaataaggtcacattctgaggtactagaggttgggacttcaacatcggaatttgaaagggacagcattcagcccatgactccagataaacgtgaggtatgctatatcattcctaatttacagatgagtcaatacaaacttgagtgagcttgctcacaattccatcaaaggcagggttcagacccaagtttcagcatttagggcaggtgtcctctgcatggaagaatcatactcaatagccgtaaacgctgacaaattccccttcctccctgccttctgatgggggctgggcaggccagctggagctgtgtctcctgctgggattccggactgagagtgacagcaggtagtgaaacctcaagcaatttaaaacatggtattgttcctggaagactggttatgttggctagggtcagcaagagagggcatcaaggctgtagtctagcagtgacttaatctgcaagtcaaaccagacgggtattttgtattattcatatgtcacatcctaccaacagacagtaagtcaggcaaggctcctggtgctccttgtcactcacgtaattttcacatcaggaaaactctgggctgggtgcagtggctcacacctgtaatcctagcactttgggaaaccaaggtgggtggattgcctagctcagtgacaccagcctgggccacatggcaaaaccccgtctgtaccaaaaatgcaaaaaattagctgggtgtggtgttgacgtttgcggtcccagctactctggaggctgaggtgggaggattgcttgagtctgggaggcagaagttgcagtaagccgagatcatgccactgcacaagctaggtgacagaatgagactctgtctcaaaaataattaaaaagcctctgccccaaactcgttaaaagattttataaccacaactgctgtttctgtgtagatgcatctgcatgcccaggagcagtaaatgcaataaaatcatttggttatactttgaacacaaaataaacggttgaggctttta

SEQ ID NO: 383124 - DNA, 4623 bp, Homo sapiens
ccgcggcggccaggcctgcgccgcccgccaacagggacgcgccgcggcggcgcctccatttgcccccgagccgagccgtggctttccggatgatcgggagacgcggtctggacgggccgggaaaggagccgggcgcctgcggagaccccgcctcagcgagtacgcccggccgggcgggctgggaggatgaggacggctgccctggacttccgccgccacaggagggttttcggccggacgccgggagggagctccaggctgtgagctccatttgtaaaggtcttaataacaagaacagtgacttcggctccggagcttcaagatagtggcctgcttggcctgcccatctcggatctctccaggaggacccagccacccaagggtcgtcttctgctgctgacccccatcaaatcccatcatgcccacagccctgtgcccccgagtcttggctccgaaggaaagtgaggagcccaggaaaatgaggagcccacctggagagaaccctagcccccagggggagcttcccagccccgagtcctctcggcgtctcttccgccgtttccgctaccaggaggcggcgggcccccgggaggccctgcagcgcctctgggacctgtgcgggggctggctgcggcctgagaggcacaccaaggagcagattctggagctgctggtgctggagcagttcctggccatcctgccccgggagatccagagctgggtgcgggcgcaggagcctgagagcggagagcaggctgtggccgcggtggaggcactggaacgggagcccgggagaccctggcagtggctcaagcactgtgaagaccctgtggtgattgatgatggggacagccctctggaccaggagcaggagcagctgccggtagagccccacagcgaccttgcaaagaaccaggatgcccagcccataaccctggcacagtgcctggggctcccaagcagaccaccaagccagctcagcggggacccagttctgcaagatgctttccttcttcaggaagagaatgtgcgggacacacagcaggtgaccaccctccagctacccccgagaatttttcaatttaataatcatcgcagcaatggttatattttagaaatgttaggaagtggagggaagaaagcacagataatttcagtcctgtcacagatctacgtgagtcgggtttctccattcaaggacatgattttatgcttctctgaagaggattggtcccttctagatcctgcccagactggcttctatggagagttcatcattggggaggattacggggtctcaatgcctccaaacgacctagctgcccagccagatctctcccagggagaggagaatgagccacgcgttccagagttgcaggatctccagggcaaagaagtgccccaggtctcctacttggactctccaagtctccagccattccaggtagaagaaagaaggaaacgtgaggagctgcaggtgccagagttccaggcctgcccacagacggtggtgcctcaaaacacctacccagctggcggcaacccgcgatctctagagaacagcctggatgaagaagtgaccatcgagatcgttctctccagctctggggacgaggactcccagcatggcccgtactgcacagaagagctggggagccccacagagaagcagcgcagcctccccgcctcccaccggagcagcaccgaggccggaggcgaggtgcagacctccaagaagtcctacgtgtgtccgaactgtgggaaaatcttccgctggagggtcaacttcatccggcatctgcggagccgcagggagcaggagaagccgcacgagtgctcggtgtgcggggagctgttcagcgacagcgaggacctggatgggcacctagagagccacgaggcccagaagccttaccggtgtggtgcctgcgggaagagcttccgcctgaactcccacctgctctcccaccggcggatacacctgcagccggacagactccagccggtggagaagagagagcaggcggcatccgaggacgcggacaagggtcccaaagagccgctggaaaacggcaaggccaaactgagcttccagtgctgtgagtgtgggaaggccttccagcggcacgaccacctggctcggcaccgcagccactttcacctgaaggacaaagcccggcccttccagtgccggtactgcgtcaagagcttcacgcagaactatgacctcctccgccacgagcgcctgcacatgaagcgccgttccaagcaggctctgaactcctactgagcctctccgcctggggcggcctcaccctggctggtgctgccccctcaccttggtactgatcagcgcccccacccaggacataccttccccaggatagagagcacacctccctcctgtccttgctctcaggtagtgagcgttcgggtggtgccatgggagcactctccctcccccaggtaatgaaagagtggccaagtgagtgttctgtttctgctgtgccaaaaaacgggggggatgtgccatcaccaggttggacatgccaggtgttctgcgtcttagagacccttggcccatgctccccaagctcggggagtaaaactgggctatcccccgtcagggcggcaccctggtcaccagccaaacctcagtatactccctcccctccttccctgtctgaacgctaggatctgctcctgaagctccaggatgcctgcacttccactgagaagctgctggcggatgttggactagaggaaagaagaaggcagggtgggactgatgggctcagtggggagcagggccaggcacactgagccagacatgtcatgtctgagccccagattcgtggccatcaggtaggcaggagcaccccgcagatccaagatgatcaggcagcccttttgggctggcctctgtggcaggggtctgcagagctccttcttgaggtttggaaacagtcgtcatacctgttgattttcctgggggccaatcactagggatctggagctcaccaaaaacaaagcttacattttaatttgtgttgcacacctaccccataatgtctttataccccaaagatccttggtaaatgcttgtgggttggaagcggagttgtcatcgtttaaaaggcacttaagtcccttcttccaatctgtcctgtctaggaatgtggagctctgcccccagtgaggggttctcctgtctgggtgagccaagctccagaacagaaccttgcctgacaacacacttgatagatacattagcttggagtgctggtgtgtccaaacactggctggcttagaacaacaggagtgtattccctgacagttctgggaggtgcacgtccaagatcagggtgtcctcagagttggtgccttccgagagctgtgagggagaagcggcttcatgcctttgctggcagttgccattccttggtgtgtggaagcgtcacccagtctctgccttcatctccacatggcactcttgctgtgtgcgtgtctgtctccaaacctccctttgtttaaggacaccagtcatatcggattagagcccatcccaccgactccagtataacctcatctgtatccgcagcaaccgtttaccaataaggtcacattctgaggtactagaggttgggacttcaacatcggaatttgaaagggacagcattcagcccatgactccagataaacgtgaggtatgctatatcattcctaatttacagatgagtcaatacaaacttgagtgagcttgctcacaattccatcaaaggcagggttcagacccaagtttcagcatttagggcaggtgtcctctgcatggaagaatcatactcaatagccgtaaacgctgacaaattccccttcctccctgccttctgatgggggctgggcaggccagctggagctgtgtctcctgctgggattccggactgagagtgacagcaggtagtgaaacctcaagcaatttaaaacatggtattgttcctggaagactggttatgttggctagggtcagcaagagagggcatcaaggctgtagtctagcagtgacttaatctgcaagtcaaaccagacgggtattttgtattattcatatgtcacatcctaccaacagacagtaagtcaggcaaggctcctggtgctccttgtcactcacgtaattttcacatcaggaaaactctgggctgggtgcagtggctcacacctgtaatcctagcactttgggaaaccaaggtgggtggattgcctagctcagtgacaccagcctgggccacatggcaaaaccccgtctgtaccaaaaatgcaaaaaattagctgggtgtggtgttgacgtttgcggtcccagctactctggaggctgaggtgggaggattgcttgagtctgggaggcagaagttgcagtaagccgagatcatgccactgcacaagctaggtgacagaatgagactctgtctcaaaaataattaaaaagcctctgccccaaactcgttaaaagattttataaccacaactgctgtttctgtgtagatgcatctgcatgcccaggagcagtaaatgcaataaaatcatttggttatactttgaacacaaaataaacggttgaggctttta

SEQ ID NO: 383125 - DNA, 5259 bp, Homo sapiens
ccgcggcggccaggcctgcgccgcccgccaacagggacgcgccgcggcggcgcctccatttgcccccgagccgagccgtggctttccggatgatcgggagacgcggtctggacgggccgggaaaggagccgggcgcctgcggagaccccgcctcagcgagtacgcccggccgggcgggctgggaggatgaggacggctgccctggacttccgccgccacaggagggttttcggccggacgccgggagggagctccaggctgtgagctccatttgtaaaggtcttaataacaagaacagtgacttcggctccggagcttcaagatagtggcctgcttggcctgcccatctcggatctctccaggaggacccagccacccaagccctgtgcccccgagtcttggctccgaaggaaagtgaggagcccaggaaaatgaggagcccacctggagagaaccctagcccccagggggagcttcccagccccgagtcctctcggcgtctcttccgccgtttccgctaccaggaggcggcgggcccccgggaggccctgcagcgcctctgggacctgtgcgggggctggctgcggcctgagaggcacaccaaggagcagattctggagctgctggtgctggagcagttcctggccatcctgccccgggagatccagagctgggtgcgggcgcaggagcctgagagcggagagcaggctgtggccgcggtggaggcactggaacgggagcccgggagaccctggcagtggctcaagcactgtgaagaccctgtggtgattgatgatggggacagccctctggaccaggagcaggagcagctgccggtagagccccacagcgaccttgcaaagaaccaggatgcccagcccataaccctggcacagtgcctggggctcccaagcagaccaccaagccagctcagcggggacccagttctgcaagatgctttccttcttcaggaagagaatgtgcgggacacacagcaggtgaccaccctccagctacccccgagtcgggtttctccattcaaggacatgattttatgcttctctgaagaggattggtcccttctagatcctgcccagactggcttctatggagagttcatcattggggaggattacggggtctcaatgcctccaaacgacctagctgcccagccagatctctcccagggagaggagaatgagccacgcgttccagagttgcaggatctccagggcaaagaagtgccccaggtctcctacttggactctccaagtctccagccattccaggtagaagaaagaaggaaacgtgaggagctgcaggtgccagagttccaggcctgcccacagacggtggtgcctcaaaacacctacccagctggcggcaacccgcgatctctagagaacagcctggatgaagaagtgaccatcgagatcgttctctccagctctggggacgaggactcccagcatggcccgtactgcacagaagagctggggagccccacagagaagcagcgcagcctccccgcctcccaccggagcagcaccgaggccggaggcgaggtgcagacctccaagaagtcctacgtgtgtccgaactgtgggaaaatcttccgctggagggtcaacttcatccggcatctgcggagccgcagggagcaggagaagccgcacgagtgctcggtgtgcggggagctgttcagcgacagcgaggacctggatgggcacctagagagccacgaggcccagaagccttaccggtgtggtgcctgcgggaagagcttccgcctgaactcccacctgctctcccaccggcggatacacctgcagccggacagactccagccggtggagaagagagagcaggcggcatccgaggacgcggacaagggtcccaaagagccgctggaaaacggcaaggccaaactgagcttccagtgctgtgagtgtgggaaggccttccagcggcacgaccacctggctcggcaccgcagccactttcacctgaaggacaaagcccggcccttccagtgccggtactgcgtcaagagcttcacgcagaactatgacctcctccgccacgagcgcctgcacatgaagcgccgttccaagcaggctctgaactcctactgagcctctccgcctggggcggcctcaccctggctggtgctgccccctcaccttggtactgatcagcgcccccacccaggacataccttccccaggatagagagcacacctccctcctgtccttgctctcaggtagtgagcgttcgggtggtgccatgggagcactctccctcccccaggtaatgaaagagtggccaagtgagtgttctgtttctgctgtgccaaaaaacgggggggatgtgccatcaccaggttggacatgccaggtgttctgcgtcttagagacccttggcccatgctccccaagctcggggagtaaaactgggctatcccccgtcagggcggcaccctggtcaccagccaaacctcagtatactccctcccctccttccctgtctgaacgctaggatctgctcctgaagctccaggatgcctgcacttccactgagaagctgctggcggatgttggactagaggaaagaagaaggcagggtgggactgatgggctcagtggggagcagggccaggcacactgagccagacatgtcatgtctgagccccagattcgtggccatcaggtaggcaggagcaccccgcagatccaagatgatcaggcagcccttttgggctggcctctgtggcaggggtctgcagagctccttcttgaggtttggaaacagtcgtcatacctgttgattttcctgggggccaatcactagggatctggagctcaccaaaaacaaagcttacattttaatttgtgttgcacacctaccccataatgtctttataccccaaagatccttggtaaatgcttgtgggttggaagcggagttgtcatcgtttaaaaggcacttaagtcccttcttccaatctgtcctgtctaggaatgtggagctctgcccccagtgaggggttctcctgtctgggtgagccaagctccagaacagaaccttgcctgacaacacacttgatagatacattagcttggagtgctggtgtgtccaaacactggctggcttagaacaacaggagtgtattccctgacagttctgggaggtgcacgtccaagatcagggtgtcctcagagttggtgccttccgagagctgtgagggagaagcggcttcatgcctttgctggcagttgccattccttggtgtgtggaagcgtcacccagtctctgccttcatctccacatggcactcttgctgtgtgcgtgtctgtctccaaacctccctttgtttaaggacaccagtcatatcggattagagcccatcccaccgactccagtataacctcatctgtatccgcagcaaccgtttaccaataaggtcacattctgaggtactagaggttgggacttcaacatcggaatttgaaagggacagcattcagcccatgactccagataaacgtgaggtatgctatatcattcctaatttacagatgagtcaatacaaacttgagtgagcttgctcacaattccatcaaaggcagggttcagacccaagtttcagcatttagggcaggtgtcctctgcatggaagaatcatactcaatagccgtaaacgctgacaaattccccttcctccctgccttctgatgggggctgggcaggccagctggagctgtgtctcctgctgggattccggactgagagtgacagcaggtagtgaaacctcaagcaatttaaaacatggtattgttcctggaagactggttatgttggctagggtcagcaagagagggcatcaaggctgtagtctagcagtgacttaatctgcaagtcaaaccagacgggtattttgtattattcatatgtcacatcctaccaacagacagtaagtcaggcaaggctcctggtgctccttgtcactcacgtaattttcacatcaggaaaactctgggctgggtgcagtggctcacacctgtaatcctagcactttgggaaaccaaggtgggtggattgcctagctcagtgacaccagcctgggccacatggcaaaaccccgtctgtaccaaaaatgcaaaaaattagctgggtgtggtgttgacgtttgcggtcccagctactctggaggctgaggtgggaggattgcttgagtctgggaggcagaagttgcagtaagccgagatcatgccactgcacaagctaggtgacagaatgagactctgtctcaaaaataattaaaaagcctctgccccaaactcgttaaaagattttataaccacaactgctgtttctgtgtagatgcatctgcatgcccaggagcagtaaatgcaataaaatcatttggttatactttgaacacaaaataaacggttgaggcttttactttctaaatagtttgtctcttgtatcaacatagctggaaaagggagaaatccgatttttaaggccaagggaggggaaaattccaagtagaagccaggctctctgtacacgtttaccccacctacctgtgtgctcctacctgtgctgaggattctctctgtagctctaaggtcttgggaaggttattcaccttcctgcttcagacgtctgactcaagagaagaacactgttctacttaccagagtgtttttctgtgtaaaaccacatcatgaaggagaaagcgacaaagggaatgtgaggggctggaagccacagggaggctgtctcttgagtccccaccactgatccagagccaaccaaggcacctcaggaaatggaaggccacattgcctctggatttggaaatcctcctgggtaatgtaactgaaacccaggttgatgccatgcagcaggagcagcagggggaacgtgctctcaggagaggtcggccaaccctccagcccaacacccttcaccacagtggtggaggaggctgcacccaggagatctttgtctcccttttggccactgatacctttggccttatctgacaacagctacccctcgatccttccctcccaccccaggggctgggcagctggctggagctttgtgtccaccttgctctggaggttgagacccccatctgagcaacatcctctctctttgttcctctgatcccttggcatcgtcacaaacccacaggtgcataataaaaacttgctgagtcaaaaaaaaaaacacccaaaaag

SEQ ID NO: 383126 - DNA, 5118 bp, Homo sapiens
ccgcggcggccaggcctgcgccgcccgccaacagggacgcgccgcggcggcgcctccatttgcccccgagccgagccgtggctttccggatgatcgggagacgcggtctggacgggccgggaaaggagccgggcgcctgcggagaccccgcctcagcgagtacgcccggccgggcgggctgggaggatgaggacggctgccctggacttccgccgccacaggagggttttcggccggacgccgggagggagctccaggctgtgagctccatttgtaaaggtcttaataacaagaacagtgacttcggctccggagcttcaagatagtggcctgcttggcctgcccatctcggatctctccaggaggacccagccacccaagccctgtgcccccgagtcttggctccgaaggaaagtgaggagcccaggaaaatgaggagcccacctggagagaaccctagcccccagggggagcttcccagccccgagtcctctcggcgtctcttccgccgtttccgctaccaggaggcggcgggcccccgggaggccctgcagcgcctctgggacctgtgcgggggctggctgcggcctgagaggcacaccaaggagcagattctggagctgctggtgctggagcagttcctggccatcctgccccgggagatccagagctgggtgcgggcgcaggagcctgagagcggagagcaggctgtggccgcggtggaggcactggaacgggagcccgggagaccctggcagtggctcaagcactgtgaagaccctgtggtgattgatgatggggacagccctctggaccaggagcaggagcagctgccggtagagccccacagcgaccttgcaaagaaccaggatgcccagcccataaccctggcacagtgcctggggctcccaagcagaccaccaagccagctcagcggggacccagttctgcaagatgctttccttcttcaggaagagaatgtgcgggacacacagcaggtgaccaccctccagctacccccgagtcgggtttctccattcaaggacatgattttatgcttctctgaagaggattggtcccttctagatcctgcccagactggcttctatggagagttcatcattggggaggattacggggtctcaatgcctccaaacgacctagctgcccagccagatctctcccagggagaggagaatgagccacgcgttccagagttgcaggatctccagggcaaagaagtgccccaggtctcctacttggactctccaagtctccagccattccaggtagaagaaagaaggaaacgtgaggagctgcaggtgccagagttccaggcctgcccacagacggtggtgcctcaaaacacctacccagctggcggcaacccgcgatctctagagaacagcctggatgaagaagtgaccatcgagatcgttctctccagctctggggacgaggactcccagcatggcccgtactgcacagaagagctggggagccccacagagaagcagcgcagcctccccgcctcccaccggagcagcaccgaggccggaggcgaggtgcagacctccaagaagtcctacgtgtgtccgaactgtgggaaaatcttccgctggagggtcaacttcatccggcatctgcggagccgcagggagcaggagaagccgcacgagtgctcggtgtgcggggagctgttcagcgacagcgaggacctggatgggcacctagagagccacgaggcccagaagccttaccggtgtggtgcctgcgggaagagcttccgcctgaactcccacctgctctcccaccggcggatacacctgcagccggacagactccagccggtggagaagagagagcaggcggcatccgaggacgcggacaagggtcccaaagagccgctggaaaacggcaaggccaaactgagcttccagtgctgtgagtgtgggaaggccttccagcggcacgaccacctggctcggcaccgcagccactttcacctgaaggacaaagcccggcccttccagtgccggtactgcgtcaagagcttcacgcagaactatgacctcctccgccacgagcgcctgcacatgaagcgccgttccaagcaggctctgaactcctactgagcctctccgcctggggcggcctcaccctggctggtgctgccccctcaccttggtactgatcagcgcccccacccaggacataccttccccaggatagagagcacacctccctcctgtccttgctctcaggtagtgagcgttcgggtggtgccatgggagcactctccctcccccaggtaatgaaagagtggccaagtgagtgttctgtttctgctgtgccaaaaaacgggggggatgtgccatcaccaggttggacatgccaggtgttctgcgtcttagagacccttggcccatgctccccaagctcggggagtaaaactgggctatcccccgtcagggcggcaccctggtcaccagccaaacctcagtatactccctcccctccttccctgtctgaacgctaggatctgctcctgaagctccaggatgcctgcacttccactgagaagctgctggcggatgttggactagaggaaagaagaaggcagggtgggactgatgggctcagtggggagcagggccaggcacactgagccagacatgtcatgtctgagccccagattcgtggccatcaggtaggcaggagcaccccgcagatccaagatgatcaggcagcccttttgggctggcctctgtggcaggggtctgcagagctccttcttgaggtttggaaacagtcgtcatacctgttgattttcctgggggccaatcactagggatctggagctcaccaaaaacaaagcttacattttaatttgtgttgcacacctaccccataatgtctttataccccaaagatccttggtaaatgcttgtgggttggaagcggagttgtcatcgtttaaaaggcacttaagtcccttcttccaatctgtcctgtctaggaatgtggagctctgcccccagtgaggggttctcctgtctgggtgagccaagctccagaacagaaccttgcctgacaacacacttgatagatacattagcttggagtgctggtgtgtccaaacactggctggcttagaacaacaggagtgtattccctgacagttctgggaggtgcacgtccaagatcagggtgtcctcagagttggtgccttccgagagctgtgagggagaagcggcttcatgcctttgctggcagttgccattccttggtgtgtggaagcgtcacccagtctctgccttcatctccacatggcactcttgctgtgtgcgtgtctgtctccaaacctccctttgtttaaggacaccagtcatatcggattagagcccatcccaccgactccagtataacctcatctgtatccgcagcaaccgtttaccaataaggtcacattctgaggtactagaggttgggacttcaacatcggaatttgaaagggacagcattcagcccatgactccagataaacgtgaggtatgctatatcattcctaatttacagatgagtcaatacaaacttgagtgagcttgctcacaattccatcaaaggcagggttcagacccaagtttcagcatttagggcaggtgtcctctgcatggaagaatcatactcaatagccgtaaacgctgacaaattccccttcctccctgccttctgatgggggctgggcaggccagctggagctgtgtctcctgctgggattccggactgagagtgacagcaggtagtgaaacctcaagcaatttaaaacatggtattgttcctggaagactggttatgttggctagggtcagcaagagagggcatcaaggctgtagtctagcagtgacttaatctgcaagtcaaaccagacgggtattttgtattattcatatgtcacatcctaccaacagacagtaagtcaggcaaggctcctggtgctccttgtcaacatggcaaaaccccgtctgtaccaaaaatgcaaaaaattagctgggtgtggtgttgacgtttgcggtcccagctactctggaggctgaggtgggaggattgcttgagtctgggaggcagaagttgcagtaagccgagatcatgccactgcacaagctaggtgacagaatgagactctgtctcaaaaataattaaaaagcctctgccccaaactcgttaaaagattttataaccacaactgctgtttctgtgtagatgcatctgcatgcccaggagcagtaaatgcaataaaatcatttggttatactttgaacacaaaataaacggttgaggcttttactttctaaatagtttgtctcttgtatcaacatagctggaaaagggagaaatccgatttttaaggccaagggaggggaaaattccaagtagaagccaggctctctgtacacgtttaccccacctacctgtgtgctcctacctgtgctgaggattctctctgtagctctaaggtcttgggaaggttattcaccttcctgcttcagacgtctgactcaagagaagaacactgttctacttaccagagtgtttttctgtgtaaaaccacatcatgaaggagaaagcgacaaagggaatgtgaggggctggaagccacagggaggctgtctcttgagtccccaccactgatccagagccaaccaaggcacctcaggaaatggaaggccacattgcctctggatttggaaatcctcctgggtaatgtaactgaaacccaggttgatgccatgcagcaggagcagcagggggaacgtgctctcaggagaggtcggccaaccctccagcccaacacccttcaccacagtggtggaggaggctgcacccaggagatctttgtctcccttttggccactgatacctttggccttatctgacaacagctacccctcgatccttccctcccaccccaggggctgggcagctggctggagctttgtgtccaccttgctctggaggttgagacccccatctgagcaacatcctctctctttgttcctctgatcccttggcatcgtcacaaacccacaggtgcataataaaaacttgctgagtcaa

SEQ ID NO: 383127 - DNA, 3265 bp, Homo sapiens
ccgcggcggccaggcctgcgccgcccgccaacagggacgcgccgcggcggcgcctccatttgcccccgagccgagccgtggctttccggatgatcgggagacgcggtctggacgggccgggaaaggagccgggcgcctgcggagaccccgcctcagcgagtacgcccggccgggcgggctgggaggatgaggacggctgccctggacttccgccgccacaggagggttttcggccggacgccgggagggagctccaggctgtgagctccatttgtaaaggtcttaataacaagaacagtgacttcggctccggagcttcaagatagtggcctgcttggcctgcccatctcggatctctccaggaggacccagccacccaagccctgtgcccccgagtcttggctccgaaggaaagtgaggagcccaggaaaatgaggagcccacctggagagaaccctagcccccagggggagcttcccagccccgagtcctctcggcgtctcttccgccgtttccgctaccaggaggcggcgggcccccgggaggccctgcagcgcctctgggacctgtgcgggggctggctgcggcctgagaggcacaccaaggagcagattctggagctgctggtgctggagcagttcctggccatcctgccccgggagatccagagctgggtgcgggcgcaggagcctgagagcggagagcaggctgtggccgcggtggaggcactggaacgggagcccgggagaccctggcagtggctcaagcactgtgaagaccctgtggtgattgatgatggggacagccctctggaccaggagcaggagcagctgccggtagagccccacagcgaccttgcaaagaaccaggatgcccagcccataaccctggcacagtgcctggggctcccaagcagaccaccaagccagctcagcggggacccagttctgcaagatgctttccttcttcaggaagagaatgtgcgggacacacagcaggtgaccaccctccagctacccccgagtcgggtttctccattcaaggacatgattttatgcttctctgaagaggattggtcccttctagatcctgcccagactggcttctatggagagttcatcattggggaggattacggggtctcaatgcctccaaacgacctagctgcccagccagatctctcccagggagaggagaatgagccacgcgttccagagttgcaggatctccagggcaaagaagtgccccaggtctcctacttggactctccaagtctccagccattccaggtagaagaaagaaggaaacgtgaggagctgcaggtgccagagttccaggcctgcccacagacggtggtgcctcaaaacacctacccagctggcggcaacccgcgatctctagagaacagcctggatgaagaagtgaccatcgagatcgttctctccagctctggggacgaggactcccagcatggcccgtactgcacagaagagctggggagccccacagagaagcagcgcagcctccccgcctcccaccggagcagcaccgaggccggaggcgaggtgcagacctccaagaagtcctacgtgtgtccgaactgtgggaaaatcttccgctggagggtcaacttcatccggcatctgcggagccgcagggagcaggagaagccgcacgagtgctcggtgtgcggggagctgttcagcgacagcgaggacctggatgggcacctagagagccacgaggcccagaagccttaccggtgtggtgcctgcgggaagagcttccgcctgaactcccacctgctctcccaccggcggatacacctgcagccggacagactccagccggtggagaagagagagcaggcggcatccgaggacgcggacaagggtcccaaagagccgctggaaaacggcaaggccaaactgagcttccagtgctgtgagtgtgggaaggccttccagcggcacgaccacctggctcggcaccgcagccactttcacctgaaggacaaagcccggcccttccagtgccggtactgcgtcaagagcttcacgcagaactatgacctcctccgccacgagcgcctgcacatgaagcgccgttccaagcaggctctgaactcctactgagcctctccgcctggggcggcctcaccctggctggtgctgccccctcaccttggtactgatcagcgcccccacccaggacataccttccccaggatagagagcacacctccctcctgtccttgctctcaggtagtgagcgttcgggtggtgccatgggagcactctccctcccccaggtaatgaaagagtggccaagtgagtgttctgtttctgctgtgccaaaaaacgggggggatgtgccatcaccaggttggacatgccaggtgttctgcgtcttagagacccttggcccatgctccccaagctcggggagtaaaactgggctatcccccgtcagggcggcaccctggtcaccagccaaacctcagtatactccctcccctccttccctgtctgaacgctaggatctgctcctgaagctccaggatgcctgcacttccactgagaagctgctggcggatgttggactagaggaaagaagaaggcagggtgggactgatgggctcagtggggagcagggccaggcacactgagccagacatgtcatgtctgagccccagattcgtggccatcaggtaggcaggagcaccccgcagatccaagatgatcaggcagcccttttgggctggcctctgtggcaggggtctgcagagctccttcttgaggtttggaaacagtcgtcatacctgttgattttcctgggggccaatcactagggatctggagctcaccaaaaacaaagcttacattttaatttgtgttgcacacctaccccataatgtctttataccccaaagatccttggtaaatgcttgtgggttggaagcggagttgtcatcgtttaaaaggcacttaagtcccttcttccaatctgtcctgtctaggaatgtggagctctgcccccagtgaggggttctcctgtctgggtgagccaagctccagaacagaaccttgcctgacaacacacttgatagatacattagcttggagtgctggtgtgtccaaacactggctggcttagaacaacaggagtgtattccctgacagttctgggaggtgcacgtccaagatcagggtgtcctcagagttggtattttagacgatgacaactcctgacttccattaaactg

SEQ ID NO: 383128 - DNA, 1702 bp, Homo sapiens
ccgcggcggccaggcctgcgccgcccgccaacagggacgcgccgcggcggcgcctccatttgcccccgagccgagccgtggctttccggatgatcgggagacgcggtctggacgggccgggaaaggagccgggcgcctgcggagaccccgcctcagcgagtacgcccggccgggcgggctgggaggatgaggacggctgccctggacttccgccgccacaggagggttttcggccggacgccgggagggagctccaggctgtgagctccatttgtaaaggtcttaataacaagaacagtgacttcggctccggagcttcaagatagtggcctgcttggcctgcccatctcggatctctccaggaggacccagccacccaagccctgtgcccccgagtcttggctccgaaggaaagtgaggagcccaggaaaatgaggagcccacctggagagaaccctagcccccagggggagcttcccagccccgagtcctctcggcgtctcttccgccgtttccgctaccaggaggcggcgggcccccgggaggccctgcagcgcctctgggacctgtgcgggggctggctgcggcctgagaggcacaccaaggagcagattctggagctgctggtgctggagcagttcctggccatcctgccccgggagatccagagctgggtgcgggcgcaggagcctgagagcggagagcaggctgtggccgcggtggaggcactggaacgggagcccgggagaccctggcagtggctcaagcactgtgaagaccctgtggtgattgatgatggggacagccctctggaccaggagcaggagcagctgccggtagagccccacagcgaccttgcaaagaaccaggatgcccagcccataaccctggcacagtgcctggggctcccaagcagaccaccaagccagctcagcggggacccagttctgcaagatgctttccttcttcaggaagagaatgtgcgggacacacagcaggtgaccaccctccagctacccccgagtcgggtttctccattcaaggacatgattttatgcttctctgaagaggattggtcccttctagatcctgcccagactggcttctatggagagttcatcattggggaggattacggggtctcaatgcctccaaacgacctagctgcccagccagatctctcccagggagaggagaatgagccacgcgttccagagttgcaggatctccagggcaaagaagtgccccaggtctcctacttggactctccaagtctccagccattccaggtagaagaaagaaggaaacgtgaggagctgcaggtgccagagttccaggcctgcccacagacggtggtgcctcaaaacacctacccagttccagctggcagtgtttctgctggtatataatactcagaaaccctgccctccatgcagtccacagggttgcaggccgtcagacgagggtgtcctccatagaccttcctggataacctcatctctgttcctggcttctgttgagatggttgattggatccgtgaatcatacccagaatctctttaacaaatgatgagccagccacactcttggtgtctctccagtgcacgctttcttattttttgccgtatggatagacagaattttccaaatcttgaagtcatggttcctttttgctacaacaattccttcttcagtttatctc

SEQ ID NO: 383129 - DNA, 485 bp, Homo sapiens
cctctcctactacaaaagtttttcactctcacagtagttttatttttcttttcacagtatttcaagtattttgatcagagccaattacttttaaatgtagttttttttgaatgatgttttctttgtaacttatcttatttctttcttgactgtctaatatccgaggctttgttgtgctccattcttttctcatgcttgccatttgtctcgattttcttcaatgattttttcagcctatttttcttactcaagataaagaaagacatagacacatccattttatatttcagcaatatttatcttaaataaacctacaaagcggttaaagtaagatgtcccactgaatgtcatagatattaggaatggcttatctttctcttttaactctctttattaaaagagagaaactgctaaagagtaaatatttgtttttttgaatgcatctctttagcttttgacccccacctgatctctcaaaaaagaaa

SEQ ID NO: 383130 - DNA, 833 bp, Homo sapiens
  misc_feature (48)..(49): n is a, c, g, or t
  misc_feature (52)..(52): n is a, c, g, or t
  misc_feature (58)..(58): n is a, c, g, or t
  misc_feature (64)..(64): n is a, c, g, or t
  misc_feature (85)..(85): n is a, c, g, or t
  misc_feature (88)..(88): n is a, c, g, or t
gccggggagggccccgcccgcgcccggaacagataaggtttttggccnnggnggtgcngaggtntgagatcttatttatacattnatnacctgtatcttttagcaattacttgaagaaataccataatactatatgtggaagacatcccattggggtgttattaaatgctatcacagagctccagaagaatggaatgaatatgagtttttcgtttttgaattatgcccagtcgagccagtgtagaaactggcaagacagttcagtgagttatgcagctggagcactcacggtccactgaagctctgaatcctcagggatgccacctgcacattctcatactctgtccggggtcccagcctagcctttaccacgatactggtcctggtttggggggattctgaaacctcaaactaatagaactttcttctctttttttctagtaggtgtagtccttccttaatttcaactcattaaaaaatgctttatagtttagggcagtggaaggaaggctggcatcaaaatattttgatcaaaaaagatgacaatgtaaaggctcagttgtggcagacagttttttgaaagtaacttgtaaagcatttaccatatcctaaatttgcactctttgcagacttgtgcacatatattccgctttcagaatagttttgcaaattgtacacaaacaaacaaaaaggtggaagctttttaataaagaaattgcatttataaatgatctgtattagaatataataaatctccagttatagtcaattactacccatgttgtacaacagataccttctattttagttgctaataaagggctacacaactc

SEQ ID NO: 383131 - DNA, 1591 bp, Homo sapiens
aggaggagcggggcggggccggcggcgggcggccgggctggagggccctgccgggggtggggctgggcccgcggtgtctcgtcccctcgcggagccgctcctgccgccgccgccgccgcctcctcattcatcctcgtgcaccataggcggcacaggcaccaagatgtccaaccgagtggtctgccgagaagccagtcacgccgggagctggtacacagcctcaggaccgcagctgaatgcacagctagaaggttggctttcacaagtacagtctacaaaaagacctgctagagccattattgccccccatgcaggatatacgtactgtgggtcttgtgctgcccatgcttataaacaagtggatccgtctattacccggagaattttcatccttgggccttctcatcatgtgcccctctctcgatgtgcactttccagtgtggatatatataggacacctctgtatgaccttcgtattgaccaaaagatttacggagaactgtggaagacaggaatgtttgaacgcatgtctctgcagacagatgaagatgaacacagtattgaaatgcatttgccttatacagctaaagccatggaaagccataaggatgagtttaccattattcctgtactggttggagctctgagtgagtcaaaagaacaggaattcggaaaactcttcagtaaatatctagcggatcctagtaatctctttgtggtttcttctgatttctgccattggggtcaaaggttccgttacagttactatgatgaatcccagggggagatttatagatccattgaacatctagataaaatgggtatgagtattatagaacaattagaccctgtatcttttagcaattacttgaagaaataccataatactatatgtggaagacatcccattggggtgttattaaatgctatcacagagctccagaagaatggaatgaatatgagtttttcgtttttgaattatgcccagtcgagccagtgtagaaactggcaagacagttcagtgagttatgcagctggagcactcacggtccactgaagctctgaatcctcagggatgccacctgcacattctcatactctgtccggggtcccagcctagcctttaccacgatactggtcctggtttggggggattctgaaacctcaaactaatagaactttcttctctttttttctagtaggtgtagtccttccttaatttcaactcattaaaaaatgctttatagtttagggcagtggaaggaaggctggcatcaaaatattttgatcaaaaaagatgacaatgtaaaggctcagttgtggcagacagttttttgaaagtaacttgtaaagcatttaccatatcctaaatttgcactctttgcagacttgtgcacatatattccgctttcagaatagttttgcaaattgtacacaaacaaacaaaaaggtggaagctttttaataaagaaattgcatttataaatgatctgtattagaatataataaatctccagttatagtcaattactacccatgttgtacaacagataccttctattttagttgctaataaagggctacacaactc

SEQ ID NO: 383132 - DNA, 2448 bp, Homo sapiens
tggggtcactcgcggtggctcggggaggccagctgggaggggagggggccgtgggggcggctcggcggaaccagccccggctgggcagcagcggggacgccgggggccggggccagggctttccgggcttcggtgaggccgccgtgggccccatcttccggcggtcgccggagtttgtggtgattgttgctgccgccgccaccgccccggctgccatctcctcctcctgggccgccgcctcctcctcttcctcctcctcctgggccgggctgatcccctccccgctgccgcctcctcctgggctgggcccgcggtgtctcgtcccctcgcggagccgctcctgccgccgccgccgccgcctcctcattcatcctcgtgcaccataggcggcacaggcaccaagatgtccaaccgagtggtctgccgagaagccagtcacgccgggagctggtacacagcctcaggaccgcagctgaatgcacagctagaaggttggctttcacaagtacagtctacaaaaagacctgctagagccattattgccccccatgcaggatatacgtactgtgggtcttgtgctgcccatgcttataaacaagtggatccgtctattacccggagaattttcatccttgggccttctcatcatgtgcccctctctcgatgtgcactttccagtgtggatatatataggacacctctgtatgaccttcgtattgaccaaaagatttacggagaactgtggaagacaggaatgtttgaacgcatgtctctgcagacagatgaagatgaacacagtattgaaatgcatttgccttatacagctaaagccatggaaagccataaggatgagtttaccattattcctgtactggttggagctctgagtgagtcaaaagaacaggaattcggaaaactcttcagtaaatatctagcggatcctagtaatctctttgtggtttcttctgatttctgccattggggtcaaaggttccgttacagttactatgatgaatcccagggggagatttatagatccattgaacatctagataaaatgggtatgagtattatagaacaattagaccctgtatcttttagcaattacttgaagaaataccataatactatatgtggaagacatcccattggggtgttattaaatgctatcacagagctccagaagaatggaatgaatatgagtttttcgtttttgaattatgcccagtcgagccagtgtagaaactggcaagacagttcagtgagttatgcagctggagcactcacggtccactgaagctctgaatcctcagggatgccacctgcacattctcatactctgtccggggtcccagcctagcctttaccacgatactggtcctggtttggggggattctgaaacctcaaactaatagaactttcttctctttttttctagtaggtgtagtccttccttaatttcaactcattaaaaaatgctttatagtttagggcagtggaaggaaggctggcatcaaaatattttgatcaaaaaagatgacaatgtaaaggctcagttgtggcagacagttttttgaaagtaacttgtaaagcatttaccatatcctaaatttgcactctttgcagacttgtgcacatatattccgctttcagaatagttttgcaaattgtacacaaacaaacaaaaaggtggaagctttttaataaagaaattgcatttataaatgatctgtattagaatataataaatctccagttatagtcaattactacccatgttgtacaacagataccttctattttagttgctaataaagggctacacaactcaaaatagtctgatttaaacttattgctctgtggtatatatgaaaattgttttttattaattccatctcagaatttttgttaaaaatggtaaacctcagctcttatgtaaaaatatattaggatgtattttatattttatatatttgtatgatttttttaaatcagaaattagaatcatatgatcttaaagttaactttttaaattacatgcagtttgcctttttgtctgtgacatccctttgtgtcattactatattgtaacagaatatatattcaagattggtaaaagaacgtagatgtaatccttgacttcaaagatcatgtttgatagtctgcaaatgaggaaacattgaagagtgttcttagtgtttttcaaatcattgcagaccttacactgctgtgcttttttaatgctttaagcagtttgactcttttacttgaatttttagccagagatcattaacatcatcaacaacaacaagccactggattttcttatggttacacaattttttttgtcatgatttttggtgcggctcttccaactaaaataatggtatgatgttgtatttctttctttctttagcatagaccaattctagtcactttcgccaaaa

SEQ ID NO: 383133 - DNA, 2226 bp, Homo sapiens
  misc_feature (1833)..(1833): n is a, c, g, or t
  misc_feature (1837)..(1837): n is a, c, g, or t
tggggtcactcgcggtggctcggggaggccagctgggaggggagggggccgtgggggcggctcggcggaaccagccccggctgggcagcagcggggacgccgggggccggggccagggctttccgggcttcggtgaggccgccgtgggccccatcttccggcggtcgccggagtttgtggtgattgttgctgccgccgccaccgccccggctgccatctcctcctcctgggccgccgcctcctcctcttcctcctcctcctgggccgggctgatcccctccccgctgccgcctcctcctgggctgggcccgcggtgtctcgtcccctcgcggagccgctcctgccgccgccgccgccgcctcctcattcatcctcgtgcaccataggcggcacaggcaccaagatgtccaaccgagtggtctgccgagaagccagtcacgccgggagctggtacacagcctcaggaccgcagctgaatgcacagctagaaggttggctttcacaagtacagtctacaaaaagacctgctagagccattattgccccccatgcaggatatacgtactgtgggtcttgtgctgcccatgcttataaacaagtggatccgtctattacccggagaattttcatccttgggccttctcatcatgtgcccctctctcgatgtgcactttccagtgtggatatatataggacacctctgtatgaccttcgtattgaccaaaagatttacggagaactgtggaagacaggaatgtttgaacgcatgtctctgcagacagatgaagatgaacacagtattgaaatgcatttgccttatacagctaaagccatggaaagccataaggatgagtttaccattattcctgtactggttggagctctgagtgagtcaaaagaacaggaattcggaaaactcttcagtaaatatctagcggatcctagtaatctctttgtggtttcttctgatttctgccattggggtcaaaggttccgttacagttactatgatgaatcccagggggagatttatagatccattgaacatctagataaaatgggtatgagtattatagaacaattagaccctgtatcttttagcaattacttgaagaaataccataatactatatgtggaagacatcccattggggtgttattaaatgctatcacagagctccagaagaatggaatgaatatgagtttttcgtttttgaattatgcccagtcgagccagtgtagaaactggcaagacagttcagtgagttatgcagctggagcactcacggtccactgaagctctgaatcctcagggatgccacctgcacattctcatactctgtccggggtcccagcctagcctttaccacgatactggtcctggtttggggggattctgaaacctcaaactaatagaactttcttctctttttttctagtaggtgtagtccttccttaatttcaactcattaaaaaatgctttatagtttagggcagtggaaggaaggctggcatcaaaatattttgatcaaaaaagatgacaatgtaaaggctcagttgtggcagacagttttttgaaagtaacttgtaaagcatttaccatatcctaaatttgcactctttgcagacttgtgcacatatattccgctttcagaatagttttgcaaattgtacacaaacaaacaaaaaggtggaagctttttaataaagaaattgcatttataaatgatctgtattagaatataataaatctccagttatagtcaattactacccatgttgtacaacagataccttctattttagttgctaataaagggctacacaactcanaaanaaataaataaataatttaaaaaataaataaaaataaactgaatgaaattgaaaacatatcaatgtgagatgccactaaagtcatactaaaagggaatttacaccacttactgcctacattagaaaagaagtctcaaatcaatgcaaatcaatgacttctgcctttacagtaagaaaccagaaaaagagcaaataaaatccagtaagcagaagaaaggaaacaaagatcagaacagaaattaatataatcaggaaaagagagagagagagaatcattgtaaccagaagtttgaggaaaatcaaatcaattggtaaacctctagccagacagatcagaaaaaaacacgaaagacacaaaccagtctcagaaatgacaggtagcatcattac

SEQ ID NO: 383134 - DNA, 1521 bp, Homo sapiens
gtgcacgttgagattcctcggcgggtaggcagcggtgctgggcatgctcagtgggcaggacccgttagagtggcgagcggcacaggcaccaagatgtccaaccgagtggtctgccgagaagccagtcacgccgggagctggtacacagcctcaggaccgcagctgaatgcacagctagaaggttggctttcacaagtacagtctacaaaaagacctgctagagccattattgccccccatgcaggatatacgtactgtgggtcttgtgctgcccatgcttataaacaagtggatccgtctattacccggagaattttcatccttgggccttctcatcatgtgcccctctctcgatgtgcactttccagtgtggatatatataggacacctctgtatgaccttcgtattgaccaaaagatttacggagaactgtggaagacaggaatgtttgaacgcatgtctctgcagacagatgaagatgaacacagtattgaaatgcatttgccttatacagctaaagccatggaaagccataaggatgagtttaccattattcctgtactggttggagctctgagtgagtcaaaagaacaggaattcggaaaactcttcagtaaatatctagcggatcctagtaatctctttgtggtttcttctgatttctgccattggggtcaaaggttccgttacagttactatgatgaatcccagggggagatttatagatccattgaacatctagataaaatgggtatgagtattatagaacaattagaccctgtatcttttagcaattacttgaagaaataccataatactatatgtggaagacatcccattggggtgttattaaatgctatcacagagctccagaagaatggaatgaatatgagtttttcgtttttgaattatgcccagtcgagccagtgtagaaactggcaagacagttcagtgagttatgcagctggagcactcacggtccactgaagctctgaatcctcagggatgccacctgcacattctcatactctgtccggggtcccagcctagcctttaccacgatactggtcctggtttggggggattctgaaacctcaaactaatagaactttcttctctttttttctagtaggtgtagtccttccttaatttcaactcattaaaaaatgctttatagtttagggcagtggaaggaaggctggcatcaaaatattttgatcaaaaaagatgacaatgtaaaggctcagttgtggcagacagttttttgaaagtaacttgtaaagcatttaccatatcctaaatttgcactctttgcagacttgtgcacatatattccgctttcagaatagttttgcaaattgtacacaaacaaacaaaaaggtggaagctttttaataaagaaattgcatttataaatgatctgtattagaatataataaatctccagttatagtcaattactacccatgttgtacaacagataccttctattttagttgctaataaagggctacacaactc

SEQ ID NO: 383135 - DNA, 2425 bp, Homo sapiens
tggggtcactcgcggtggctcggggaggccagctgggaggggagggggccgtgggggcggctcggcggaaccagccccggctgggcagcagcggggacgccgggggccggggccagggctttccgggcttcggtgaggccgccgtgggccccatcttccggcggtcgccggagtttgtggtgattgttgctgccgccgccaccgccccggctgccatctcctcctcctgggccgccgcctcctcctcttcctcctcctcctgggccgggctgatcccctccccgctgccgcctcctcctgggctgggcccgcggtgtctcgtcccctcgcggagccgctcctgccgccgccgccgccgcctcctcattcatcctcgtgcaccataggcggcacaggcaccaagatgtccaaccgagtggtctgccgagaagccagtcacgccgggagctggtacacagcctcaggaccgcagctgaatgcacagctagaaggttggctttcacaagtacagtctacaaaaagacctgctagagccattattgccccccatgcaggatatacgtactgtgggtcttgtgctgcccatgcttataaacaagtggatccgtctattacccggagaattttcatccttgggccttctcatcatgtgcccctctctcgatgtgcactttccagtgtggatatatataggacacctctgtatgaccttcgtattgaccaaaagatttacggagaactgtggaagacaggaatgtttgaacgcatgtctctgcagacagatgaagatgaacacagtattgaaatgcatttgccttatacagctaaagccatggaaagccataaggatgagtttaccattattcctgtactggttggagctctgagtgagtcaaaagaacaggaattcggaaaactcttcagtaaatatctagcggatcctagtaatctctttgtggtttcttctgatttctgccattggggtcaaaggttccgttacagttactatgatgaatcccagggggagatttatagatccattgaacatctagataaaatgggtatgagtattatagaacaattagaccctgtatcttttagcaattacttgaagaaataccataatactatatgtggaagacatcccattggggtgttattaaatgctatcacagagctccagaagaatggaatgaatatgagtttttcgtttttgaattatgcccagtcgagccagtgtagaaactggcaagacagttcagtgagttatgcagctggagcactcacggtccactgaagctctgaatcctcatactctgtccggggtcccagcctagcctttaccacgatactggtcctggtttggggggattctgaaacctcaaactaatagaactttcttctctttttttctagtaggtgtagtccttccttaatttcaactcattaaaaaatgctttatagtttagggcagtggaaggaaggctggcatcaaaatattttgatcaaaaaagatgacaatgtaaaggctcagttgtggcagacagttttttgaaagtaacttgtaaagcatttaccatatcctaaatttgcactctttgcagacttgtgcacatatattccgctttcagaatagttttgcaaattgtacacaaacaaacaaaaaggtggaagctttttaataaagaaattgcatttataaatgatctgtattagaatataataaatctccagttatagtcaattactacccatgttgtacaacagataccttctattttagttgctaataaagggctacacaactcaaaatagtctgatttaaacttattgctctgtggtatatatgaaaattgttttttattaattccatctcagaatttttgttaaaaatggtaaacctcagctcttatgtaaaaatatattaggatgtattttatattttatatatttgtatgatttttttaaatcagaaattagaatcatatgatcttaaagttaactttttaaattacatgcagtttgcctttttgtctgtgacatccctttgtgtcattactatattgtaacagaatatatattcaagattggtaaaagaacgtagatgtaatccttgacttcaaagatcatgtttgatagtctgcaaatgaggaaacattgaagagtgttcttagtgtttttcaaatcattgcagaccttacactgctgtgcttttttaatgctttaagcagtttgactcttttacttgaatttttagccagagatcattaacatcatcaacaacaacaagccactggattttcttatggttacacaattttttttgtcatgatttttggtgcggctcttccaactaaaataatggtatgatgttgtatttctttctttctttagcatagaccaattctagtcactttcgccaaaa

SEQ ID NO: 383136 - DNA, 1565 bp, Homo sapiens
gtgcacgttgagattcctcggcgggtaggcagcggtgctgggcatgctcagtgggcaggacccgttagagtggcgaatggagtctcactgtgtcacccaggctggagtacagtgtcgttatctcagctcactgcaacctccgcttcccaggttcaagcgattctcgtgcctcagcctcccaaatctgggattacaggtgaccgcagctgaatgcacagctagaaggttggctttcacaagtacagtctacaaaaagacctgctagagccattattgccccccatgcaggatatacgtactgtgggtcttgtgctgcccatgcttataaacaagtggatccgtctattacccggagaattttcatccttgggccttctcatcatgtgcccctctctcgatgtgcactttccagtgtggatatatataggacacctctgtatgaccttcgtattgaccaaaagatttacggagaactgtggaagacaggaatgtttgaacgcatgtctctgcagacagatgaagatgaacacagtattgaaatgcatttgccttatacagctaaagccatggaaagccataaggatgagtttaccattattcctgtactggttggagctctgagtgagtcaaaagaacaggaattcggaaaactcttcagtaaatatctagcggatcctagtaatctctttgtggtttcttctgatttctgccattggggtcaaaggttccgttacagttactatgatgaatcccagggggagatttatagatccattgaacatctagataaaatgggtatgagtattatagaacaattagaccctgtatcttttagcaattacttgaagaaataccataatactatatgtggaagacatcccattggggtgttattaaatgctatcacagagctccagaagaatggaatgaatatgagtttttcgtttttgaattatgcccagtcgagccagtgtagaaactggcaagacagttcagtgagttatgcagctggagcactcacggtccactgaagctctgaatcctcagggatgccacctgcacattctcatactctgtccggggtcccagcctagcctttaccacgatactggtcctggtttggggggattctgaaacctcaaactaatagaactttcttctctttttttctagtaggtgtagtccttccttaatttcaactcattaaaaaatgctttatagtttagggcagtggaaggaaggctggcatcaaaatattttgatcaaaaaagatgacaatgtaaaggctcagttgtggcagacagttttttgaaagtaacttgtaaagcatttaccatatcctaaatttgcactctttgcagacttgtgcacatatattccgctttcagaatagttttgcaaattgtacacaaacaaacaaaaaggtggaagctttttaataaagaaattgcatttataaatgatctgtattagaatataataaatctccagttatagtcaattactacccatgttgtacaacagataccttctattttagttgctaataaagggctacacaactc

SEQ ID NO: 383137 - DNA, 1439 bp, Homo sapiens
atgcagattctgcccaagaagcccctgcattgcagagggactggagatctgtatgatctgtttatttcgcaattgacaggccataaggatgagtttaccattattcctgtactggttggagctctgagtgagtcaaaagaacaggaattcggaaaactcttcagtaaatatctagcggatcctagtaatctctttgtggtttcttctgatttctgccattgggccggagaattttcatccttgggccttctcatcatgtgcccctctctcgatgtgcactttccagtgtggatatatataggacacctctgtatgaccttcgtattgaccaaaagatttacggagaactgtggaagacaggaatgtttgaacgcatgtctctgcagacagatgaagatgaacacagtattgaaatgcatttgccttatacagctaaagccatggaaagccataaggatgagtttaccattattcctgtactggttggagctctgagtgagtcaaaagaacaggaattcggaaaactcttcagtaaatatctagcggatcctagtaatctctttgtggtttcttctgatttctgccattggggtcaaaggttccgttacagttactatgatgaatcccagggggagatttatagatccattgaacatctagataaaatgggtatgagtattatagaacaattagaccctgtatcttttagcaattacttgaagaaataccataatactatatgtggaagacatcccattggggtgttattaaatgctatcacagagctccagaagaatggaatgaatatgagtttttcgtttttgaattatgcccagtcgagccagtgtagaaactggcaagacagttcagtgagttatgcagctggagcactcacggtccactgaagctctgaatcctcagggatgccacctgcacattctcatactctgtccggggtcccagcctagcctttaccacgatactggtcctggtttggggggattctgaaacctcaaactaatagaactttcttctctttttttctagtaggtgtagtccttccttaatttcaactcattaaaaaatgctttatagtttagggcagtggaaggaaggctggcatcaaaatattttgatcaaaaaagatgacaatgtaaaggctcagttgtggcagacagttttttgaaagtaacttgtaaagcatttaccatatcctaaatttgcactctttgcagacttgtgcacatatattccgctttcagaatagttttgcaaattgtacacaaacaaacaaaaaggtggaagctttttaataaagaaattgcatttataaatgatctgtattagaatataataaatctccagttatagtcaattactacccatgttgtacaacagataccttctattttagttgctaataaagggctacacaactc

SEQ ID NO: 383138 - DNA, 1300 bp, Homo sapiens
gtgcacgttgagattcctcggcgggtaggcagcggtgctgggcatgctcagtgggcaggacccgttagagtggcgagaccgcagctgaatgcacagctagaaggttggctttcacaagtacagtctacaaaaagacctgctagagccattattgccccccatgcaggatatacgtactgtgggtcttgtgctgcccatgcttataaacaagtggatccgtctattacccggagaattttcatccttgggccttctcatcatgtgcccctctctcgatgtgcactttccagtgtggatatatataggacacctctgtatgaccttcgtattgaccaaaagatttacggagaactgtggaagacaggaatgtttgaacgcatgtctctgcagacagatgaagatgaacacagtattgaaatgcatttgccttatacagctaaagccatggaaaggtcaaaggttccgttacagttactatgatgaatcccagggggagatttatagatccattgaacatctagataaaatgggtatgagtattatagaacaattagaccctgtatcttttagcaattacttgaagaaataccataatactatatgtggaagacatcccattggggtgttattaaatgctatcacagagctccagaagaatggaatgaatatgagtttttcgtttttgaattatgcccagtcgagccagtgtagaaactggcaagacagttcagtgagttatgcagctggagcactcacggtccactgaagctctgaatcctcagggatgccacctgcacattctcatactctgtccggggtcccagcctagcctttaccacgatactggtcctggtttggggggattctgaaacctcaaactaatagaactttcttctctttttttctagtaggtgtagtccttccttaatttcaactcattaaaaaatgctttatagtttagggcagtggaaggaaggctggcatcaaaatattttgatcaaaaaagatgacaatgtaaaggctcagttgtggcagacagttttttgaaagtaacttgtaaagcatttaccatatcctaaatttgcactctttgcagacttgtgcacatatattccgctttcagaatagttttgcaaattgtacacaaacaaacaaaaaggtggaagctttttaataaagaaattgcatttataaatgatctgtattagaatataataaatctccagttatagtcaattactacccatgttgtacaacagataccttctattttagttgctaataaagggctacacaactc

SEQ ID NO: 383139 - DNA, 997 bp, Homo sapiens
tatgtacaagggctcttgggaatgattctctcagaggcttaagctgtgctttgcctttcatgagaactgaaattatttggtaagcgcttgctttctttttagcttctaatttttccctattttattttgtacatgatatttgtttcaaggtcaaaggttccgttacagttactatgatgaatcccagggggagatttatagatccattgaacatctagataaaatgggtatgagtattatagaacaattagaccctgtatcttttagcaattacttgaagaaataccataatactatatgtggaagacatcccattggggtgttattaaatgctatcacagagctccagaagaatggaatgaatatgagtttttcgtttttgaattatgcccagtcgagccagtgtagaaactggcaagacagttcagtgagttatgcagctggagcactcacggtccactgaagctctgaatcctcagggatgccacctgcacattctcatactctgtccggggtcccagcctagcctttaccacgatactggtcctggtttggggggattctgaaacctcaaactaatagaactttcttctctttttttctagtaggtgtagtccttccttaatttcaactcattaaaaaatgctttatagtttagggcagtggaaggaaggctggcatcaaaatattttgatcaaaaaagatgacaatgtaaaggctcagttgtggcagacagttttttgaaagtaacttgtaaagcatttaccatatcctaaatttgcactctttgcagacttgtgcacatatattccgctttcagaatagttttgcaaattgtacacaaacaaacaaaaaggtggaagctttttaataaagaaattgcatttataaatgatctgtattagaatataataaatctccagttatagtcaattactacccatgttgtacaacagataccttctattttagttgctaataaagggctacacaactc

SEQ ID NO: 383140 - DNA, 1443 bp, Homo sapiens
ctatatttatttattcacatatattttgaaaagagtgatgcgccttaggtgtacaggtatgagtattatagaacaattagaccctgtatcttttagcaattacttgaagaaataccataatactatatgtggaagacatcccattggggtgttattaaatgctatcacagagctccagaagaatggaatgaatatgagtttttcgtttttgaattatgcccagtcgagccagtgtagaaactggcaagacagttcagtgagttatgcagctggagcactcacggtccactgaagctctgaatcctcagggatgccacctgcacattctcatactctgtccggggtcccagcctagcctttaccacgatactggtcctggtttggggggattctgaaacctcaaactaatagaactttcttctctttttttctagtaggtgtagtccttccttaatttcaactcattaaaaaatgctttatagtttagggcagtggaaggaaggctggcatcaaaatattttgatcaaaaaagatgacaatgtaaaggctcagttgtggcagacagttttttgaaagtaacttgtaaagcatttaccatatcctaaatttgcactctttgcagacttgtgcacatatattccgctttcagaatagttttgcaaattgtacacaaacaaacaaaaaggtggaagctttttaataaagaaattgcatttataaatgatctgtattagaatataataaatctccagttatagtcaattactacccatgttgtacaacagataccttctattttagttgctaataaagggctacacaactcaaaatagtctgatttaaacttattgctctgtggtatatatgaaaattgttttttattaattccatctcagaatttttgttaaaaatggtaaacctcagctcttatgtaaaaatatattaggatgtattttatattttatatatttgtatgatttttttaaatcagaaattagaatcatatgatcttaaagttaactttttaaattacatgcagtttgcctttttgtctgtgacatccctttgtgtcattactatattgtaacagaatatatattcaagattggtaaaagaacgtagatgtaatccttgacttcaaagatcatgtttgatagtctgcaaatgaggaaacattgaagagtgttcttagtgtttttcaaatcattgcagaccttacactgctgtgcttttttaatgctttaagcagtttgactcttttacttgaatttttagccagagatcattaacatcatcaacaacaacaagccactggattttcttatggttacacaattttttttgtcatgatttttggtgcggctcttccaactaaaataatggtatgatgttgtatttctttctttctttagcatagaccaattctagtcactttcgccaaaa

SEQ ID NO: 383141 - DNA, 1723 bp, Homo sapiens
  misc_feature (1723)..(1723): n is a, c, g, or t
tggggtcactcgcggtggctcggggaggccagctgggaggggagggggccgtgggggcggctcggcggaaccagccccggctgggcagcagcggggacgccgggggccggggccagggctttccgggcttcggtgaggccgccgtgggccccatcttccggcggtcgccggagtttgtggtgattgttgctgccgccgccaccgccccggctgccatctcctcctcctgggccgccgcctcctcctcttcctcctcctcctgggccgggctgatcccctccccgctgccgcctcctcctgggctgggcccgcggtgtctcgtcccctcgcggagccgctcctgccgccgccgccgccgcctcctcattcatcctcgtgcaccataggcggcacaggcaccaagatgtccaaccgagtggtctgccgagaagccagtcacgccgggagctggtacacagcctcaggaccgcagctgaatgcacagctagaaggttggctttcacaagtacagtctacaaaaagacctgctagagccattattgccccccatgcaggatatacgtactgtgggtcttgtgctgcccatgcttataaacaagtggatccgtctattacccggagaattttcatccttgggccttctcatcatgtgcccctctctcgatgtgcactttccagtgtggatatatataggacacctctgtatgaccttcgtattgaccaaaagatttacggagaactgtggaagacaggaatgtttgaacgcatgtctctgcagacagatgaagatgaacacagtattgaaatgcatttgccttatacagctaaagccatggaaagggtatgagtattatagaacaattagaccctgtatcttttagcaattacttgaagaaataccataatactatatgtggaagacatcccattggggtgttattaaatgctatcacagagctccagaagaatggaatgaatatgagtttttcgtttttgaattatgcccagtcgagccagtgtagaaactggcaagacagttcagtgagttatgcagctggagcactcacggtccactgaagctctgaatcctcagggatgccacctgcacattctcatactctgtccggggtcccagcctagcctttaccacgatactggtcctggtttggggggattctgaaacctcaaactaatagaactttcttctctttttttctagtaggtgtagtccttccttaatttcaactcattaaaaaatgctttatagtttagggcagtggaaggaaggctggcatcaaaatattttgatcaaaaaagatgacaatgtaaaggctcagttgtggcagacagttttttgaaagtaacttgtaaagcatttaccatatcctaaatttgcactctttgcagacttgtgcacatatattccgctttcagaatagttttgcaaattgtacacaaacaaacaaaaaggtggaagctttttaataaagaaattgcatttataaatgatctgtattagaatataataaatctccagttatagtcaattactacccatgttgtacaacagataccttctattttagttgctaataaagggctacacaactcggctcttttggctcagcggtggaacttctggggcgtttgcttttagggaggggaattgatgatcctcgctcatgaactggtggccttggtcgatcggtgcgggaggagttan

SEQ ID NO: 383142 - DNA, 861 bp, Homo sapiens
gtgcacgttgagattcctcggcgggtaggcagcggtgctgggcatgctcagtgggcaggacccgttagagtggcgagtaaggaagcgttggctcttctccgggtctgccttccccggttcaggccccggccctgggcttttgtgtgcgcgtagctgcagccgccactgcctcctcattcatcctcgtgcaccataggcggcacaggcaccaagatgtccaaccgagtggtctgccgagaagccagtcacgccgggagctggtacacagcctcaggaccgcagctgaatgcacagctagaaggttggctttcacaagtacagtctacaaaaagacctgctagagccattattgcccctagagacgggagttttaccagcctgggcaacatgccatgcaggatatacgtactgtgggtcttgtgctgcccatgcttataaacaagtggatccgtctattacgtaagtaatgtagttttgttttaagtcggagaagcttgagaatttattgctttgttatagaagtaatttgctttttatacttattgttattatgtactcaatttcatgagggatttgacttttgatgaattttactatactttgtataggttactgaaaacttcaatacttcttttttgttgttgttggagcatttgatttttaccttccctttggcatgtaaaatgtttagttatgaaggttaaatattttgttttttgatatttctttgaaaacccagagatgagcattcttaagaaaaatgcaaagccctctgatctgttttaatcatttcgtaatttaagattctttattgtacttgttaaaattgtggttactgaaaggataatttctcgttgacag

SEQ ID NO: 383143 - DNA, 2041 bp, Homo sapiens
agccaatttttctcagcattgtttctggacctttctgagggtgggatctgggcatcttcaatggcttaacaagtatcacagatgaggaaacagacttggagaggttaagtgacatgctcaagacaacactgctggaccgcagctgaatgcacagctagaaggttggctttcacaagtacagtctacaaaaagacctgctagagccattattgccccccatgcaggatatacgtactgtgggtcttgtgctgcccatgcttataaacaagtggatccgtctattacccggagaattttcatccttgggccttctcatcatgtgcccctctctcgatgtgcactttccagtgtggatatatataggacacctctgtatgaccttcgtattgaccaaaagatttacggagaactgtggaagacaggaatgtttgaacgcatgtctctgcagacagatgaagatgaacacagtattgaaatgcatttgccttatacagctaaagccatggaaagccataaggatgagtttaccattattcctgtactggttggagctctgagtgagtcaaaagaacaggaattcggaaaactcttcagtaaatatctagcggatcctagtaatctctttgtggtttcttctgatttctgccattgggggtatgagtattatagaacaattagaccctgtatcttttagcaattacttgaagaaataccataatactatatgtggaagacatcccattggggtgttattaaatgctatcacagagctccagaagaatggaatgaatatgagtttttcgtttttgaattatgcccagtcgagccagtgtagaaactggcaagacagttcagtgagttatgcagctggagcactcacggtccactgaagctctgaatcctcagggatgccacctgcacattctcatactctgtccggggtcccagcctagcctttaccacgatactggtcctggtttggggggattctgaaacctcaaactaatagaactttcttctctttttttctagtaggtgtagtccttccttaatttcaactcattaaaaaatgctttatagtttagggcagtggaaggaaggctggcatcaaaatattttgatcaaaaaagatgacaatgtaaaggctcagttgtggcagacagttttttgaaagtaacttgtaaagcatttaccatatcctaaatttgcactctttgcagacttgtgcacatatattccgctttcagaatagttttgcaaattgtacacaaacaaacaaaaaggtggaagctttttaataaagaaattgcatttataaatgatctgtattagaatataataaatctccagttatagtcaattactacccatgttgtacaacagataccttctattttagttgctaataaagggctacacaactcaaaatagtctgatttaaacttattgctctgtggtatatatgaaaattgttttttattaattccatctcagaatttttgttaaaaatggtaaacctcagctcttatgtaaaaatatattaggatgtattttatattttatatatttgtatgatttttttaaatcagaaattagaatcatatgatcttaaagttaactttttaaattacatgcagtttgcctttttgtctgtgacatccctttgtgtcattactatattgtaacagaatatatattcaagattggtaaaagaacgtagatgtaatccttgacttcaaagatcatgtttgatagtctgcaaatgaggaaacattgaagagtgttcttagtgtttttcaaatcattgcagaccttacactgctgtgcttttttaatgctttaagcagtttgactcttttacttgaatttttagccagagatcattaacatcatcaacaacaacaagccactggattttcttatggttacacaattttttttgtcatgatttttggtgcggctcttccaactaaaataatggtatgatgttgtatttctttctttctttagcatagaccaattctagtcactttcgccaaaa

SEQ ID NO: 383144 - DNA, 1831 bp, Homo sapiens
tggggtcactcgcggtggctcggggaggccagctgggaggggagggggccgtgggggcggctcggcggaaccagccccggctgggcagcagcggggacgccgggggccggggccagggctttccgggcttcggtgaggccgccgtgggccccatcttccggcggtcgccggagtttgtggtgattgttgctgccgccgccaccgccccggctgccatctcctcctcctgggccgccgcctcctcctcttcctcctcctcctgggccgggctgatcccctccccgctgccgcctcctcctgggctgggcccgcggtgtctcgtcccctcgcggagccgctcctgccgccgccgccgccgcctcctcattcatcctcgtgcaccataggcggcacaggcaccaagatgtccaaccgagtggtctgccgagaagccagtcacgccgggagctggtacacagcctcaggaccgcagctgaatgcacagctagaaggttggctttcacaagtacagtctacaaaaagacctgctagagccattattgccccccatgcaggatatacgtactgtgggtcttgtgctgcccatgcttataaacaagtggatccgtctattacccggagaattttcatccttgggccttctcatcatgtgcccctctctcgatgtgcactttccagtgtggatatatataggacacctctgtatgaccttcgtattgaccaaaagatttacggagaactgtggaagacaggaatgtttgaacgcatgtctctgcagacagatgaagatgaacacagtattgaaatgcatttgccttatacagctaaagccatggaaagccataaggatgagtttaccattattcctgtactggttggagctctgagtgagtcaaaagaacaggaattcggaaaactcttcagtaaatatctagcggatcctagtaatctctttgtggtttcttctgatttctgccattggggtcaaaggttccgttacagttactatgatgaatcccagggggagatttatagatccattgaacatctagataaaatgggtatgagtattatagaacaattagaccctgtatcttttagcaattacttgaagaaataccataatactatatgtggaagacatcccattggggtgttattaaatgctatcacagagctccagaagaatggaatgaatatgagtttttcgtttttgaattatgcccagtcgagccagtgtagaaactggcaagacagttcagtgagttatgcagctggagcactcacggtccactgaagctctgaatcctcagggatgccacctgcacattctcatactctgtccggggtcccagcctagcctttaccacgatactggtcctggtttggggggattctgaaacctcaaactaatagaactttcttctctttttttctagtaggtgtagtccttccttaatttcaactcattaaaaaatgctttatagtttagggcagtggaaggaaggctggcatcaaaatattttgatcaaaaaagatgacaatgtaaaggctcagttgtggcagacagttttttgaaagtaacttgtaaagcatttaccatatcctaaatttgcactctttgcagacttgtgcacatatattccgctttcagaatagttttgcaaattgtacacaaacaaacaaaaaggtggaagctttttaataaagaaattgcatttataaatgatctgtattagaatataataaatctccagttatagtcaattactacccatgttgtacaacagataccttctattttagttgctaataaagggctacacaactc

SEQ ID NO: 383145 - DNA, 1801 bp, Homo sapiens
tggggtcactcgcggtggctcggggaggccagctgggaggggagggggccgtgggggcggctcggcggaaccagccccggctgggcagcagcggggacgccgggggccggggccagggctttccgggcttcggtgaggccgccgtgggccccatcttccggcggtcgccggagtttgtggtgattgttgctgccgccgccaccgccccggctgccatctcctcctcctgggccgccgcctcctcctcttcctcctcctcctgggccgggctgatcccctccccgctgccgcctcctcctgggctgggcccgcggtgtctcgtcccctcgcggagccgctcctgccgccgccgccgccgcctcctcattcatcctcgtgcaccataggcggcacaggcaccaagatgtccaaccgagtggtctgccgagaagccagtcacgccgggagctggtacacagcctcaggaccgcagctgaatgcacagctagaaggttggctttcacaagtacagtctacaaaaagacctgctagagccattattgccccccatgcaggatatacgtactgtgggtcttgtgctgcccatgcttataaacaagtggatccgtctattacccggagaattttcatccttgggccttctcatcatgtgcccctctctcgatgtgcactttccagtgtggatatatataggacacctctgtatgaccttcgtattgaccaaaagatttacggagaactgtggaagacaggaatgtttgaacgcatgtctctgcagacagatgaagatgaacacagtattgaaatgcatttgccttatacagctaaagccatggaaagccataaggatgagtttaccattattcctgtactggttggagctctgagtgagtcaaaagaacaggaattcggaaaactcttcagtaaatatctagcggatcctagtaatctctttgtggtttcttctgatttctgccattggggtcaaaggttccgttacagttactatgatgaatcccagggggagatttatagatccattgaacatctagataaaatgggtatgagtattatagaacaattagaccctgtatcttttagcaattacttgaagaaataccataatactatatgtggaagacatcccattggggtgttattaaatgctatcacagagctccagaagaatggaatgaatatgagtttttcgtttttgaattatgcccagtcgagccagtgtagaaactggcaagacagttcagtgagttatgcagctggagcactcacggtccactgaagctctgaatcctcagggatgccacctgcacattctcatactctgtccggggtcccagcctagcctttaccacgatactggtcctggtttggggggattctgaaacctcaaactaatagaactttcttctctttttttctagtaggtgtagtccttccttaatttcaactcattaaaaaatgctttatagtttagggcagtggaaggaaggctggcatcaaaatattttgatcaaaaaagatgacaatgtaaaggctcagttgtggcagacagttttttgaaagtaacttgtaaagcatttaccatatcctaaatttgcactctttgcagacttgtgcacatatattccgctttcagaatagttttgcaaattgtacacaaacaaacaaaaaggtggaagctttttaataaagaaattgcatttataaatgatctgtattagaatataataatttgttatgcggcaagttttttgccttggtttttaatatatacgaaacaata

SEQ ID NO: 383146 - DNA, 1754 bp, Homo sapiens
tggggtcactcgcggtggctcggggaggccagctgggaggggagggggccgtgggggcggctcggcggaaccagccccggctgggcagcagcggggacgccgggggccggggccagggctttccgggcttcggtgaggccgccgtgggccccatcttccggcggtcgccggagtttgtggtgattgttgctgccgccgccaccgccccggctgccatctcctcctcctgggccgccgcctcctcctcttcctcctcctcctgggccgggctgatcccctccccgctgccgcctcctcctgggctgggcccgcggtgtctcgtcccctcgcggagccgctcctgccgccgccgccgccgcctcctcattcatcctcgtgcaccataggcggcacaggcaccaagatgtccaaccgagtggtctgccgagaagccagtcacgccgggagctggtacacagcctcaggaccgcagctgaatgcacagctagaaggttggctttcacaagtacagtctacaaaaagacctgctagagccattattgccccccatgcaggatatacgtactgtgggtcttgtgctgcccatgcttataaacaagtggatccgtctattacccggagaattttcatccttgggccttctcatcatgtgcccctctctcgatgtgcactttccagtgtggatatatataggacacctctgtatgaccttcgtattgaccaaaagatttacggagaactgtggaagacaggaatgtttgaacgcatgtctctgcagacagatgaagatgaacacagtattgaaatgcatttgccttatacagctaaagccatggaaagccataaggatgagtttaccattattcctgtactggttggagctctgagtgagtcaaaagaacaggaattcggaaaactcttcagtaaatatctagcggatcctagtaatctctttgtggtttcttctgatttctgccattgggggtatgagtattatagaacaattagaccctgtatcttttagcaattacttgaagaaataccataatactatatgtggaagacatcccattggggtgttattaaatgctatcacagagctccagaagaatggaatgaatatgagtttttcgtttttgaattatgcccagtcgagccagtgtagaaactggcaagacagttcagtgagttatgcagctggagcactcacggtccactgaagctctgaatcctcagggatgccacctgcacattctcatactctgtccggggtcccagcctagcctttaccacgatactggtcctggtttggggggattctgaaacctcaaactaatagaactttcttctctttttttctagtaggtgtagtccttccttaatttcaactcattaaaaaatgctttatagtttagggcagtggaaggaaggctggcatcaaaatattttgatcaaaaaagatgacaatgtaaaggctcagttgtggcagacagttttttgaaagtaacttgtaaagcatttaccatatcctaaatttgcactctttgcagacttgtgcacatatattccgctttcagaatagttttgcaaattgtacacaaacaaacaaaaaggtggaagctttttaataaagaaattgcatttataaatgatctgtattagaatataataaatctccagttatagtcaattactacccatgttgtacaacagataccttctattttagttgctaataaagggctacacaactc

SEQ ID NO: 383147 - DNA, 1611 bp, Homo sapiens
tggggtcactcgcggtggctcggggaggccagctgggaggggagggggccgtgggggcggctcggcggaaccagccccggctgggcagcagcggggacgccgggggccggggccagggctttccgggcttcggtgaggccgccgtgggccccatcttccggcggtcgccggagtttgtggtgattgttgctgccgccgccaccgccccggctgccatctcctcctcctgggccgccgcctcctcctcttcctcctcctcctgggccgggctgatcccctccccgctgccgcctcctcctgggctgggcccgcggtgtctcgtcccctcgcggagccgctcctgccgccgccgccgccgcctcctcattcatcctcgtgcaccataggcggcacaggcaccaagatgtccaaccgagtggtctgccgagaagccagtcacgccgggagctggtacacagcctcaggaccgcagctgaatgcacagctagaaggttggctttcacaagtacagtctacaaaaagacctgctagagccattattgccccccatgcaggatatacgtactgtgggtcttgtgctgcccatgcttataaacaagtggatccgtctattacccggagaattttcatccttgggccttctcatcatgtgcccctctctcgatgtgcactttccagtgtggatatatataggacacctctgtatgaccttcgtattgaccaaaagatttacggagaactgtggaagacaggaatgtttgaacgcatgtctctgcagacagatgaagatgaacacagtattgaaatgcatttgccttatacagctaaagccatggaaagggtatgagtattatagaacaattagaccctgtatcttttagcaattacttgaagaaataccataatactatatgtggaagacatcccattggggtgttattaaatgctatcacagagctccagaagaatggaatgaatatgagtttttcgtttttgaattatgcccagtcgagccagtgtagaaactggcaagacagttcagtgagttatgcagctggagcactcacggtccactgaagctctgaatcctcagggatgccacctgcacattctcatactctgtccggggtcccagcctagcctttaccacgatactggtcctggtttggggggattctgaaacctcaaactaatagaactttcttctctttttttctagtaggtgtagtccttccttaatttcaactcattaaaaaatgctttatagtttagggcagtggaaggaaggctggcatcaaaatattttgatcaaaaaagatgacaatgtaaaggctcagttgtggcagacagttttttgaaagtaacttgtaaagcatttaccatatcctaaatttgcactctttgcagacttgtgcacatatattccgctttcagaatagttttgcaaattgtacacaaacaaacaaaaaggtggaagctttttaataaagaaattgcatttataaatgatctgtattagaatataataaatctccagttatagtcaattactacccatgttgtacaacagataccttctattttagttgctaataaagggctacacaactc

SEQ ID NO: 383148 - DNA, 1347 bp, Homo sapiens
  misc_feature (349)..(349): n is a, c, g, or t
cgctgtttttctgctcgatctgtgtgatggagttcgtcattcgttctgtgcgttggtttgggtcggtgatgtgtggtcgctggtgttattgtccgcgtgcgcagtctgtatgtgtctggttgccgtcttctgcgctagttccgtctttgttccactggccgcgttctgttagccgtgggtcttgttcctgtcgtgttttgttccttgctgtgttgtttttgtggctctttgtgtttctctttttcttttttttttttttttgttttcgtttgtttctcttttttgtttttttttttttgttttgtgtttttcttttttttttcttttttgttttttttttacccagccnttgaaaccaataagcatttattatatcactgtttcagaatccccccaaaccaggaccagtatcgtggtaaaggctaggctgggaccccggacaatgtaaaggctcagttgtggcagacagttttttgaaagtaacttgtaaagcatttaccatatcctaaatttgcactctttgcagacttgtgcacatatattccgctttcagaatagttttgcaaattgtacacaaacaaacaaaaaggtggaagctttttaataaagaaattgcatttataaatgatctgtattagaatataataaatctccagttatagtcaattactacccatgttgtacaacagataccttctattttagttgctaataaagggctacacaactcaaaatagtctgatttaaacttattgctctgtggtatatatgaaaattgttttttattaattccatctcagaatttttgttaaaaatggtaaacctcagctcttatgtaaaaatatattaggatgtattttatattttatatatttgtatgatttttttaaatcagaaattagaatcatatgatcttaaagttaactttttaaattacatgcagtttgcctttttgtctgtgacatccctttgtgtcattactatattgtaacagaatatatattcaagattggtaaaagaacgtagatgtaatccttgacttcaaagatcatgtttgatagtctgcaaatgaggaaacattgaagagtgttcttagtgtttttcaaatcattgcagaccttacactgctgtgcttttttaatgctttaagcagtttgactcttttacttgaatttttagccagagatcattaacatcatcaacaacaacaagccactggattttcttatggttacacaattttttttgtcatgatttttggtgcggctcttccaactaaaataatggtatgatgttgtatttctttctttctttagcatagaccaattctagtcactttcgccaaaa

SEQ ID NO: 383149 - DNA, 1865 bp, Homo sapiens
cgggcgcccgggatgatgccgccgccgccgccgccgccgccgccgccgccgccaggggaagggttcgggtccgggtcgggctcggcgggcgcggggtgcgggacggcccagggcacggcggctgcagcgggagcacactgagcgcccgcccgccatgtccaggaagaagacccccaagagcaaaggggccagcacccccgctgcctccacgctgcccaccgccaacggggcccgaccggcgcgctccgggactgcgctttccggccccgacgcgccgcccaacgggcccttgcagcccggccggccctcgcttggcggcggtgtcgacttctacgacgtcgccttcaaggtcatgctggtgggggactcgggtgtggggaagacctgtctgctggtgcgattcaaggatggtgctttcctggcggggaccttcatctccaccgtaggcattgacttccggaacaaagttctggacgtggatggtgtgaaggtgaagctgcagatgtgggacacagctggtcaggagcggttccgcagtgttacccatgcctactaccgggatgctcatgctctgctgctgctctacgatgtcaccaacaaggcctcctttgacaacatccaggcctggctgaccgagatccacgagtacgcccagcacgacgtggcgctcatgctgctggggaacaaggtggactctgcccatgagcgtgtggtgaagagggaggacggggagaagctggccaaggtgagtcagggcaggggggtggtgagggggtgcccctggaggctgcgagcctaggctgtccccgccaggccaccacctggctggcagcagctgtttacaggagtatggactgcccttcatggagaccagcgccaagacgggcctcaacgtggacttggccttcacagccatagcaaagtaagtcctgccagtcaccaggactcccccagcccagggcctgaatcctcattagagtccaggccatcgtgtccccttgtcacccccactccgcagggagttgaagcagcgctccatgaaggctcccagcgagccgcgcttccggctgcatgattacgttaagagggagggtcgaggggcctcctgctgccgcccttgaacctggctgagctcagtcctctggaggaagccgcccagtccctagaaggctggacagagggtctccaggcccttctgactttgttgcccagtggccaacgcccgagtgtctgttttcaggagccccaggtcaagccttgtcccttcctcctcccagcaacagtcccaacaagcaggcttctgagagcccgtggccgcacactggccgccacggaaaagcagtcttctgcacgggacggggagcggcaagtggacagactttgccacggtgctctgctgccccctcctgggcacgtccaggtgagggagggctggggctggcaccacgcacagtgcctaaccctagaaaagccatgtcttcagccgcacatgctcaggcagctaagggaggacgcctgcccacgcctgggacagaaggcttcactgctaatcacatcgtgcatctgtgtgtcctgggagctgcctgctcccggcccaccctctaggaggctctggctcaaacagcaatagggtcttcctcactgaccttggaggatgcctgtggccttgtgataaaatgtgggaaatcacagaaaacaccagaaacaacaactgccagcccggcctggccacaggtgaggtctgtgatttccgagcacgctccaccttgcactcaacttggccttttgattgcacaagcctttgttttcagtcctagtgaataaagttgtgttttctggagcgtctgtctcatctgttgaaaaaa

SEQ ID NO: 383150 - DNA, 1769 bp, Homo sapiens
cgggcgcccgggatgatgccgccgccgccgccgccgccgccgccgccgccgccaggggaagggttcgggtccgggtcgggctcggcgggcgcggggtgcgggacggcccagggcacggcggctgcagcgggagcacactgagcgcccgcccgccatgtccaggaagaagacccccaagagcaaaggggccagcacccccgctgcctccacgctgcccaccgccaacggggcccgaccggcgcgctccgggactgcgctttccggccccgacgcgccgcccaacgggcccttgcagcccggccggccctcgcttggcggcggtgtcgacttctacgacgtcgccttcaaggtcatgctggtgggggactcgggtgtggggaagacctgtctgctggtgcgattcaaggatggtgctttcctggcggggaccttcatctccaccgtaggcattgacttccggaacaaagttctggacgtggatggtgtgaaggtgaagctgcagatgtgggacacagctggtcaggagcggttccgcagtgttacccatgcctactaccgggatgctcatgctctgctgctgctctacgatgtcaccaacaaggcctcctttgacaacatccaggcctggctgaccgagatccacgagtacgcccagcacgacgtggcgctcatgctgctggggaacaaggtggactctgcccatgagcgtgtggtgaagagggaggacggggagaagctggccaaggtgagtcagggcaggggggtggtgagggggtgcccctggaggctgcgagcctaggctgtccccgccaggccaccacctggctggcagcagctgtttacaggagtatggactgcccttcatggagaccagcgccaagacgggcctcaacgtggacttggccttcacagccatagcaaaggagttgaagcagcgctccatgaaggctcccagcgagccgcgcttccggctgcatgattacgttaagagggagggtcgaggggcctcctgctgccgcccttgaacctggctgagctcagtcctctggaggaagccgcccagtccctagaaggctggacagagggtctccaggcccttctgactttgttgcccagtggccaacgcccgagtgtctgttttcaggagccccaggtcaagccttgtcccttcctcctcccagcaacagtcccaacaagcaggcttctgagagcccgtggccgcacactggccgccacggaaaagcagtcttctgcacgggacggggagcggcaagtggacagactttgccacggtgctctgctgccccctcctgggcacgtccaggtgagggagggctggggctggcaccacgcacagtgcctaaccctagaaaagccatgtcttcagccgcacatgctcaggcagctaagggaggacgcctgcccacgcctgggacagaaggcttcactgctaatcacatcgtgcatctgtgtgtcctgggagctgcctgctcccggcccaccctctaggaggctctggctcaaacagcaatagggtcttcctcactgaccttggaggatgcctgtggccttgtgataaaatgtgggaaatcacagaaaacaccagaaacaacaactgccagcccggcctggccacaggtgaggtctgtgatttccgagcacgctccaccttgcactcaacttggccttttgattgcacaagcctttgttttcagtcctagtgaataaagttgtgttttctggagcgtctgtctcatctgttgaaaaaa

SEQ ID NO: 383151 - DNA, 799 bp, Homo sapiens
cgggcgcccgggatgatgccgccgccgccgccgccgccgccgccgccgccgccaggggaagggttcgggtccgggtcgggctcggcgggcgcggggtgcgggacggcccagggcacggcggctgcagcgggagcacactgagcgcccgcccgccatgtccaggaagaagacccccaagagcaaaggggccagcacccccgctgcctccacgctgcccaccgccaacggggcccgaccggcgcgctccgggactgcgctttccggccccgacgcgccgcccaacgggcccttgcagcccggccggccctcgcttggcggcggtgtcgacttctacgacgtcgccttcaaggtcatgctggtgggggactcgggtgtggggaagacctgtctgctggtgcgattcaaggatggtgctttcctggcggggaccttcatctccaccgtaggcattgacttccggaacaaagttctggacgtggatggtgtgaaggtgaagctgcagatgtgggacacagctggtcaggagcggttccgcagtgttacccatgcctactaccgggatgctcatgctctgctgctgctctacgatgtcaccaacaaggcctcctttgacaacatccaggcctggctgaccgagatccacgagtacgcccagcacgacgtggcgctcatgctgctggggaacaaggtggactctgcccatgagcgtgtggtgaagagggaggacggggagaagctggccaaggtgcataaggcatttaggtttttcaggggcagtcatcatttttgatatttttcg

SEQ ID NO: 383152 - DNA, 1669 bp, Homo sapiens
cgggcgcccgggatgatgccgccgccgccgccgccgccgccgccgccgccgccaggggaagggttcgggtccgggtcgggctcggcgggcgcggggtgcgggacggcccagggcacggcggctgcagcgggagcacactgagcgcccgcccgccatgtccaggaagaagacccccaagagcaaaggggccagcacccccgctgcctccacgctgcccaccgccaacggggcccgaccggcgcgctccgggactgcgctttccggccccgacgcgccgcccaacgggcccttgcagcccggccggccctcgcttggcggcggtgtcgacttctacgacgtcgccttcaaggtcatgctggtgggggactcgggtgtggggaagacctgtctgctggtgcgattcaaggatggtgctttcctggcggggaccttcatctccaccgtaggcattgacttccggaacaaagttctggacgtggatggtgtgaaggtgaagctgcagatgtgggacacagctggtcaggagcggttccgcagtgttacccatgcctactaccgggatgctcatgctctgctgctgctctacgatgtcaccaacaaggcctcctttgacaacatccaggcctggctgaccgagatccacgagtacgcccagcacgacgtggcgctcatgctgctggggaacaaggtggactctgcccatgagcgtgtggtgaagagggaggacggggagaagctggccaaggagtatggactgcccttcatggagaccagcgccaagacgggcctcaacgtggacttggccttcacagccatagcaaaggagttgaagcagcgctccatgaaggctcccagcgagccgcgcttccggctgcatgattacgttaagagggagggtcgaggggcctcctgctgccgcccttgaacctggctgagctcagtcctctggaggaagccgcccagtccctagaaggctggacagagggtctccaggcccttctgactttgttgcccagtggccaacgcccgagtgtctgttttcaggagccccaggtcaagccttgtcccttcctcctcccagcaacagtcccaacaagcaggcttctgagagcccgtggccgcacactggccgccacggaaaagcagtcttctgcacgggacggggagcggcaagtggacagactttgccacggtgctctgctgccccctcctgggcacgtccaggtgagggagggctggggctggcaccacgcacagtgcctaaccctagaaaagccatgtcttcagccgcacatgctcaggcagctaagggaggacgcctgcccacgcctgggacagaaggcttcactgctaatcacatcgtgcatctgtgtgtcctgggagctgcctgctcccggcccaccctctaggaggctctggctcaaacagcaatagggtcttcctcactgaccttggaggatgcctgtggccttgtgataaaatgtgggaaatcacagaaaacaccagaaacaacaactgccagcccggcctggccacaggtgaggtctgtgatttccgagcacgctccaccttgcactcaacttggccttttgattgcacaagcctttgttttcagtcctagtgaataaagttgtgttttctggagcgtctgtctcatctgttgaaaaaa

SEQ ID NO: 383153 - DNA, 1566 bp, Homo sapiens
cgggcgcccgggatgatgccgccgccgccgccgccgccgccgccgccgccgccaggggaagggttcgggtccgggtcgggctcggcgggcgcggggtgcgggacggcccagggcacggcggctgcagcgggagcacactgagcgcccgcccgccatgtccaggaagaagacccccaagagcaaaggggccagcacccccgctgcctccacgctgcccaccgccaacggggcccgaccggcgcgctccgggactgcgctttccggccccgacgcgccgcccaacgggcccttgcagcccggccggccctcgcttggcggcggtgtcgacttctacgacgtcgccttcaaggtcatgctggtgggggactcgggtgtggggaagacctgtctgctggtgcgattcaaggatggtgctttcctggcggggaccttcatctccaccgtaggcattgacttccggaacaaagttctggacgtggatggtgtgaaggtgaagctgcagatgtgggacacagctggtcaggagcggttccgcagtgttacccatgcctactaccgggatgctcatgctctgctgctgctctacgatgtcaccaacaaggcctcctttgacaacatccaggcctggctgaccgagatccacgagtacgcccagcacgacgtggcgctcatgctgctggggaacaaggtggactctgcccatgagcgtgtggtgaagagggaggacggggagaagctggccaaggtgagtcagggcaggggggtggtgagggggtgcccctggaggctgcgagcctaggctgtccccgccaggccaccacctggctggcagcagctgtttacaggagtatggactgcccttcatggagaccagcgccaagacgggcctcaacgtggacttggccttcacagccatagcaaagtaagtcctgccagtcaccaggactcccccagcccagggcctgaatcctcattagagtccaggccatcgtgtccccttgtcacccccactccgcagggagttgaagcagcgctccatgaaggctcccagcgagccgcgcttccggctgcatgattacgttaagagggagggtcgaggggcctcctgctgccgcccttgaacctggctgagctcagtcctctggaggaagccgcccagtcccctagaaaagccatgtcttcagccgcacatgctcaggcagctaagggaggacgcctgcccacgcctgggacagaaggcttcactgctaatcacatcgtgcatctgtgtgtcctgggagctgcctgctcccggcccaccctctaggaggctctggctcaaacagcaatagggtcttcctcactgaccttggaggatgcctgtggccttgtgataaaatgtgggaaatcacagaaaacaccagaaacaacaactgccagcccggcctggccacaggtgaggtctgtgatttccgagcacgctccaccttgcactcaacttggccttttgattgcacaagcctttgttttcagtcctagtgaataaagttgtgttttctggagcgtctgtctcatctgttgaaaaaa

SEQ ID NO: 383154 - DNA, 800 bp, Homo sapiens
cgggcgcccgggatgatgccgccgccgccgccgccgccgccgccgccgccgccaggggaagggttcgggtccgggtcgggctcggcgggcgcggggtgcgggacggcccagggcacggcggctgcagcgggagcacactgagcgcccgcccgccatgtccaggaagaagacccccaagagcaaaggggccagcacccccgctgcctccacgctgcccaccgccaacggggcccgaccggcgcgctccgggactgcgctttccggccccgacgcgccgcccaacgggcccttgcagcccggccggccctcgcttggcggcggtgtcgacttctacgacgtcgccttcaaggtcatgctggtgggggactcgggtgtggggaagacctgtctgctggtgcgattcaaggatggtgctttcctggcggggaccttcatctccaccgtaggcattgacttccggaacaaagttctggacgtggatggtgtgaaggtgaagctgcagatgtgggacacagctggtcaggagcggttccgcagtgttacccatgcctactaccgggatgctcatgctctgctgctgctctacgatgtcaccaacaaggcctcctttgacaacatccaggcctggctgaccgagatccacgagtacgcccagcacgacgtggcgctcatgctgctggggaacaaggtggactctggccatgaacttatgggggaatagggtaggccgtgataagcttggcaaaggtgaatagagccatggtggtttcgtgtttcctctttgagcgtatcttgcttgc

SEQ ID NO: 383155 - DNA, 525 bp, Homo sapiens
aggccagacacagcagcaactgggacccaggaggatggagcagctgtgtgttagtctggccccagggagtggggtacagcagcaactcagcttaaaaatggtgtatcactgtgcaacccaggctctgggggtattgggtgcagtggcagcaagtcccaggaatgaagggcacagtgtcttctaaggtccccgaagtagagcacagagcagcagtggctccagttctaagatgtcatagcaccataacagctcaggccatggagacagggtgcagctgcagctccctctttgggaaaagcaccaggaacatctagtcattcatctttctgacatatctccatccagataggattcttggttgacagggttttttttttttccttcagcattttgaacatatcaactcactgccttctggcctccaaaatttctgctgatgatcttattggcataccttgtgatatggtttagatgtttgtctcttctaaatctcatgttgtaaaaagaataataagcaaaaaaaaa

SEQ ID NO: 383156 - DNA, 784 bp, Homo sapiens
aaatatctctgtccccatctttcagtttcctacccaagactcctgtgtggttgacatcactgctgtgtgcagtgttcatgtccatataagtcagaagtggcttgcagcagtggtttggggctttggggcctctgctcgctccttatcaattcttagggttacatcctctgggaagatgccaggcctggtcaagtgtggcctctgacctagagttatgcaaggcctctcttcctcctgtggccagtgtgaaatttctcatctgtgctctcctgcctctagcaggaaggttggcctacatttggggcacatctctgtcactgtctcaggccaggggttcaaatataagacctgaatcatactgcacctcagaacccaaacccttttacttaattttttttaaaaaatttcattcagatggtaaaggttcaaacaatacatagagatataaaacagaaagaaaaaaaaatacacgcctctctctagtacctattccccagtagtcaacactgctaccttttttttgcaggggaggtaaattcctccagaaaaaaacttaaacatctacaatttcatatatcctctcccctcttccctaaaaaacaaaacaataacaacaaaactatagaaatgggattatgctatatattctgttcagtacttttttgtttttgaaaatttaaaaaatatgcaaaagaagaaaatgtcatccatattactaccacttataattaaccactaattaacttttaggtgtgtttgcttcttgtctttatgaatatacttt

SEQ ID NO: 383157 - DNA, 2557 bp, Homo sapiens
tgggattggtcgaaaaggaggggcgtggggcgggcgtgggggcagttccccagcccaggtcctcctctcacccgggccagttttcaaggcgggctgtaactggtggcatttgtcccgggaccaggtccacagttttatgtgtgagcaagatggaggctgacctgtctggctttaacatcgatgccccccgttgggaccagcgcaccttcctggggagagtgaagcacttcctaaacatcacggacccccgcactgtctttgtatctgagcgggagctggactgggccaaggtgatggtggagaagagcaggatgggggttgtgcccccaggcacccaagtggagcagctgctgtatgccaagaagctgtatgactcggccttccaccccgacactggggagaagatgaatgtcatcgggcgcatgtctttccagcttcctggcggcatgatcatcacgggcttcatgctccagttctacaggacgatgccggcggtgatcttctggcagtgggtgaaccagtccttcaatgccttagtcaactacaccaacaggaatgcggcttcccccacatcagtcaggcagatggccctttcctacttcacagccacaaccactgctgtggccacggctgtgggcatgaacatgttgacaaagaaagcgccgcccttggtgggccgctgggtgccctttgccgctgtggctgcggctaactgtgtcaatatccccatgatgcgacagcaggagctcataaagggaatctgcgtgaaggacaggaatgaaaatgagattggtcattcccggagagctgcggccataggcatcacccaagtagttatttctcggatcaccatgtcagctcctgggatgatcttgctgccagtcatcatggaaaggcttgagaaattgcacttcatgcagaaagtcaaggtcctgcacgccccattgcaggtcatgctgagcgggtgcttcctcatcttcatggtgccagtggcgtgtgggcttttcccacagaaatgtgaattgccagtttcctatctggaaccgaagctccaagacactatcaaggccaagtatggagaacttgagccttatgtctacttcaataagggtctctaaatgccccacttcagcaaggaccagtctattcccatattcaccagctcctccttagctacgtgcacacttgtgtcctccttcccctttgccaacaaggcctgaaggccagggtagattggggggtgggacaatgaatgcctcatacttacaccctggtactggttgattggacctcaggggaaaaaagtgaaaaagggtagcaaaggccaatgtcttctagctgcttcctcaacccctgtcccctggagaccagaagctgaggccctctcagggaggagacatccaagcaaatcatttggaaaagttaggaaacctttaggattctggttccagccagggttgaggaaaagaccttggatcaaaaggaagcttctatacctctttcttcttcgcttcctcctctcccaagcaatggaaacttttacccatgtaattctagctgaactcaggaaaaagaagggggaaaggactctgtccccttggggctcatcacccttccacatcctcctcctcgttgccccctggtcaggcagcttcttttttttttttttcaagatggagtcttgctctgtcgcccaggctggaatgcagtggcgcgatctcggctcactgcaaactctgcctcctggattcaagcgattctcctgcctcagcctctcaagtagctgggattacagggcacctgccaccacgcctggctaatttttgtattttagtggagacggggtttcaccatgctggccagactggtctcgaactcctgacctcaggtgatccgcccgcctcagcctctgaaattgctgggattacaggcatgagccaccacacccagcccggacagcttctttgggagtgctgctaaccttgaaattatcagacacttaggagttattagtgctaaaaaggggaccgtgcaaggcagcagagttacatggttcttcaaatcatgtctgaacctattcttggaatcttctctataataagggaagttctcttaccccactgccacatacctctgttttaaaagataagtccactaactgtgagtaaaaatgatatatataggcattaaccacacactttaatgggtataatttcctggctgcctcccttcctcagcccattaggttaaacaccaaagaaagactggtgtgtactgaataggaaagggaagttttatttggaaccttctaagaggaaatcaaccaggaccaaagagccttaaaggacacacagcaatgcacagccacttcccttccccagcttggctgccctaggtgatttctcaagctccttgggggactgttgtttctcatctggaatcaatgtgtgtatgagttttgtctggtaggattgctgactctgtccaacagatatcactgtgaattgaataaatttgttgaaagagcacacaggcacacatacacacaaactgtaaa

SEQ ID NO: 383158 - DNA, 2555 bp, Homo sapiens
tggagtttcactcttagggaccaggctggagtgcaacggtgcgatctcggctcatcacaacctccacctctcgggttcaaacgattctcctgccttagcctcccaagtagctgggattacaggtccacagttttatgtgtgagcaagatggaggctgacctgtctggctttaacatcgatgccccccgttgggaccagcgcaccttcctggggagagtgaagcacttcctaaacatcacggacccccgcactgtctttgtatctgagcgggagctggactgggccaaggtgatggtggagaagagcaggatgggggttgtgcccccaggcacccaagtggagcagctgctgtatgccaagaagctgtatgactcggccttccaccccgacactggggagaagatgaatgtcatcgggcgcatgtctttccagcttcctggcggcatgatcatcacgggcttcatgctccagttctacaggacgatgccggcggtgatcttctggcagtgggtgaaccagtccttcaatgccttagtcaactacaccaacaggaatgcggcttcccccacatcagtcaggcagatggccctttcctacttcacagccacaaccactgctgtggccacggctgtgggcatgaacatgttgacaaagaaagcgccgcccttggtgggccgctgggtgccctttgccgctgtggctgcggctaactgtgtcaatatccccatgatgcgacagcaggagctcataaagggaatctgcgtgaaggacaggaatgaaaatgagattggtcattcccggagagctgcggccataggcatcacccaagtagttatttctcggatcaccatgtcagctcctgggatgatcttgctgccagtcatcatggaaaggcttgagaaattgcacttcatgcagaaagtcaaggtcctgcacgccccattgcaggtcatgctgagcgggtgcttcctcatcttcatggtgccagtggcgtgtgggcttttcccacagaaatgtgaattgccagtttcctatctggaaccgaagctccaagacactatcaaggccaagtatggagaacttgagccttatgtctacttcaataagggtctctaaatgccccacttcagcaaggaccagtctattcccatattcaccagctcctccttagctacgtgcacacttgtgtcctccttcccctttgccaacaaggcctgaaggccagggtagattggggggtgggacaatgaatgcctcatacttacaccctggtactggttgattggacctcaggggaaaaaagtgaaaaagggtagcaaaggccaatgtcttctagctgcttcctcaacccctgtcccctggagaccagaagctgaggccctctcagggaggagacatccaagcaaatcatttggaaaagttaggaaacctttaggattctggttccagccagggttgaggaaaagaccttggatcaaaaggaagcttctatacctctttcttcttcgcttcctcctctcccaagcaatggaaacttttacccatgtaattctagctgaactcaggaaaaagaagggggaaaggactctgtccccttggggctcatcacccttccacatcctcctcctcgttgccccctggtcaggcagcttcttttttttttttttcaagatggagtcttgctctgtcgcccaggctggaatgcagtggcgcgatctcggctcactgcaaactctgcctcctggattcaagcgattctcctgcctcagcctctcaagtagctgggattacagggcacctgccaccacgcctggctaatttttgtattttagtggagacggggtttcaccatgctggccagactggtctcgaactcctgacctcaggtgatccgcccgcctcagcctctgaaattgctgggattacaggcatgagccaccacacccagcccggacagcttctttgggagtgctgctaaccttgaaattatcagacacttaggagttattagtgctaaaaaggggaccgtgcaaggcagcagagttacatggttcttcaaatcatgtctgaacctattcttggaatcttctctataataagggaagttctcttaccccactgccacatacctctgttttaaaagataagtccactaactgtgagtaaaaatgatatatataggcattaaccacacactttaatgggtataatttcctggctgcctcccttcctcagcccattaggttaaacaccaaagaaagactggtgtgtactgaataggaaagggaagttttatttggaaccttctaagaggaaatcaaccaggaccaaagagccttaaaggacacacagcaatgcacagccacttcccttccccagcttggctgccctaggtgatttctcaagctccttgggggactgttgtttctcatctggaatcaatgtgtgtatgagttttgtctggtaggattgctgactctgtccaacagatatcactgtgaattgaataaatttgttgaaagagcacacaggcacacatacacacaaactgtaaa

SEQ ID NO: 383159 - DNA, 2490 bp, Homo sapiens
aagcaaatcatttggaaaagttaggaaacctttaggattctggttccagccagggttgaggaaaagaccttggatcaaaaggaagcttctatacctctttcttcttcgcttcctcctctcccaagcaatggaaacttttacccatgtaattctagctgaactcaggaaaaagaagggggaaaggactctgtccccttggggctcatcacccttccacatcctcctcctcgttgccccctgggtgacagagtgagactccatcacaaaaaaaaaaccaaaaaacaaaaacaaaaattagccgggcatggtggcgcatgcctgtaattctagtacttgggaagctgaagcaggagaattgcttgaacctgggaagtggaggttgcggtgagccgagattgcaccactgcactccagcctgggcaacaagagtgaaactccctctcaataaataagtaaataaataaataaataaataaagggacaggcagagggctgacaaccgaaacccctctatttcctttgtgtgtccaagaaggaggaagcagggagaagggatgatggaaaagggaagggatacatcagactagggggtggagggtgactgaccccaggagacaagtgtagcttgaatatatacccagacaattccagtctccccttcctcagtactctagttcaatactacttccatggtcatctgctagacatctcttgtgtcccaagcactgtgtttgtaatcttgtggagaagatggaagttgaaacgaagaaccatagcccaaggagaatgaagtcaggcctgcgtaatggtaaagcaacattgtggtatacagaggccaataataatcctagatggaaaaatcaggagggcttcttggaggtgatattcatctgagggtaacttactgcttgttcctggtggcatgctcataatccacttctctcttttcagtgaattgccagtttcctatctggaaccgaagctccaagacactatcaaggccaagtatggagaacttgagccttatgtctacttcaataagggtctctaaatgccccacttcagcaaggaccagtctattcccatattcaccagctcctccttagctacgtgcacacttgtgtcctccttcccctttgccaacaaggcctgaaggccagggtagattggggggtgggacaatgaatgcctcatacttacaccctggtactggttgattggacctcaggggaaaaaagtgaaaaagggtagcaaaggccaatgtcttctagctgcttcctcaacccctgtcccctggagaccagaagctgaggccctctcagggaggagacatccaagcaaatcatttggaaaagttaggaaacctttaggattctggttccagccagggttgaggaaaagaccttggatcaaaaggaagcttctatacctctttcttcttcgcttcctcctctcccaagcaatggaaacttttacccatgtaattctagctgaactcaggaaaaagaagggggaaaggactctgtccccttggggctcatcacccttccacatcctcctcctcgttgccccctggtcaggcagcttcttttttttttttttcaagatggagtcttgctctgtcgcccaggctggaatgcagtggcgcgatctcggctcactgcaaactctgcctcctggattcaagcgattctcctgcctcagcctctcaagtagctgggattacagggcacctgccaccacgcctggctaatttttgtattttagtggagacggggtttcaccatgctggccagactggtctcgaactcctgacctcaggtgatccgcccgcctcagcctctgaaattgctgggattacaggcatgagccaccacacccagcccggacagcttctttgggagtgctgctaaccttgaaattatcagacacttaggagttattagtgctaaaaaggggaccgtgcaaggcagcagagttacatggttcttcaaatcatgtctgaacctattcttggaatcttctctataataagggaagttctcttaccccactgccacatacctctgttttaaaagataagtccactaactgtgagtaaaaatgatatatataggcattaaccacacactttaatgggtataatttcctggctgcctcccttcctcagcccattaggttaaacaccaaagaaagactggtgtgtactgaataggaaagggaagttttatttggaaccttctaagaggaaatcaaccaggaccaaagagccttaaaggacacacagcaatgcacagccacttcccttccccagcttggctgccctaggtgatttctcaagctccttgggggactgttgtttctcatctggaatcaatgtgtgtatgagttttgtctggtaggattgctgactctgtccaacagatatcactgtgaattgaataaatttgttgaaagagcacacaggcacacatacacacaaactgtaaa

SEQ ID NO: 383160 - DNA, 2182 bp, Homo sapiens
gctcggtacccccctccccgggtacttgggaagctgaagcaggagaattgcttgaacctgggaagtggaggttgcggtgagccgagattgcaccactgcactccagcctgggcaacaagagtgaaactccctctcaataaataagtaaataaataaataaataaataaagggacaggcagagggctgacaaccgaaacccctctatttcctttgtgtgtccaagaaggaggaagcagggagaagggatgatggaaaagggaagggatacatcagactagggggtggagggtgactgaccccaggagacaagtgtagcttgaatatatacccagacaattccagtctccccttcctcagtactctagttcaatactacttccatggtcatctgctagacatctcttgtgtcccaagcactgtgtttgtaatcttgtggagaagatggaagttgaaacgaagaaccatagcccaaggagaatgaagtcaggcctgcgtaatggtaaagcaacattgtggtatacagaggccaataataatcctagatggaaaaatcaggagggcttcttggaggtgatattcatctgagggtaacttactgcttgttcctggtggcatgctcataatccacttctctcttttcagtgaattgccagtttcctatctggaaccgaagctccaagacactatcaaggccaagtatggagaacttgagccttatgtctacttcaataagggtctctaaatgccccacttcagcaaggaccagtctattcccatattcaccagctcctccttagctacgtgcacacttgtgtcctccttcccctttgccaacaaggcctgaaggccagggtagattggggggtgggacaatgaatgcctcatacttacaccctggtactggttgattggacctcaggggaaaaaagtgaaaaagggtagcaaaggccaatgtcttctagctgcttcctcaacccctgtcccctggagaccagaagctgaggccctctcagggaggagacatccaagcaaatcatttggaaaagttaggaaacctttaggattctggttccagccagggttgaggaaaagaccttggatcaaaaggaagcttctatacctctttcttcttcgcttcctcctctcccaagcaatggaaacttttacccatgtaattctagctgaactcaggaaaaagaagggggaaaggactctgtccccttggggctcatcacccttccacatcctcctcctcgttgccccctggtcaggcagcttcttttttttttttttcaagatggagtcttgctctgtcgcccaggctggaatgcagtggcgcgatctcggctcactgcaaactctgcctcctggattcaagcgattctcctgcctcagcctctcaagtagctgggattacagggcacctgccaccacgcctggctaatttttgtattttagtggagacggggtttcaccatgctggccagactggtctcgaactcctgacctcaggtgatccgcccgcctcagcctctgaaattgctgggattacaggcatgagccaccacacccagcccggacagcttctttgggagtgctgctaaccttgaaattatcagacacttaggagttattagtgctaaaaaggggaccgtgcaaggcagcagagttacatggttcttcaaatcatgtctgaacctattcttggaatcttctctataataagggaagttctcttaccccactgccacatacctctgttttaaaagataagtccactaactgtgagtaaaaatgatatatataggcattaaccacacactttaatgggtataatttcctggctgcctcccttcctcagcccattaggttaaacaccaaagaaagactggtgtgtactgaataggaaagggaagttttatttggaaccttctaagaggaaatcaaccaggaccaaagagccttaaaggacacacagcaatgcacagccacttcccttccccagcttggctgccctaggtgatttctcaagctccttgggggactgttgtttctcatctggaatcaatgtgtgtatgagttttgtctggtaggattgctgactctgtccaacagatatcactgtgaattgaataaatttgttgaaagagcacacaggcacacatacacacaaactgtaaa

SEQ ID NO: 383161 - DNA, 1838 bp, Homo sapiens
cctacttgctcttctgttctgcctagtggtaagtattttctggagcttctgctgaaggagagggaaccacttggttcctggtctgacttcagaaggagtcctggggagagcctcccagccctcccctcagcttctccctggtctcttccagtcttgctgccagtcatcatggaaaggcttgagaaattgcacttcatgcagaaagtcaaggtcctgcacgccccattgcaggtcatgctgagcgggtgcttcctcatcttcatggtgccagtggcgtgtgggcttttcccacagaaatgtgaattgccagtttcctatctggaaccgaagctccaagacactatcaaggccaagtatggagaacttgagccttatgtctacttcaataagggtctctaaatgccccacttcagcaaggaccagtctattcccatattcaccagctcctccttagctacgtgcacacttgtgtcctccttcccctttgccaacaaggcctgaaggccagggtagattggggggtgggacaatgaatgcctcatacttacaccctggtactggttgattggacctcaggggaaaaaagtgaaaaagggtagcaaaggccaatgtcttctagctgcttcctcaacccctgtcccctggagaccagaagctgaggccctctcagggaggagacatccaagcaaatcatttggaaaagttaggaaacctttaggattctggttccagccagggttgaggaaaagaccttggatcaaaaggaagcttctatacctctttcttcttcgcttcctcctctcccaagcaatggaaacttttacccatgtaattctagctgaactcaggaaaaagaagggggaaaggactctgtccccttggggctcatcacccttccacatcctcctcctcgttgccccctggtcaggcagcttcttttttttttttttcaagatggagtcttgctctgtcgcccaggctggaatgcagtggcgcgatctcggctcactgcaaactctgcctcctggattcaagcgattctcctgcctcagcctctcaagtagctgggattacagggcacctgccaccacgcctggctaatttttgtattttagtggagacggggtttcaccatgctggccagactggtctcgaactcctgacctcaggtgatccgcccgcctcagcctctgaaattgctgggattacaggcatgagccaccacacccagcccggacagcttctttgggagtgctgctaaccttgaaattatcagacacttaggagttattagtgctaaaaaggggaccgtgcaaggcagcagagttacatggttcttcaaatcatgtctgaacctattcttggaatcttctctataataagggaagttctcttaccccactgccacatacctctgttttaaaagataagtccactaactgtgagtaaaaatgatatatataggcattaaccacacactttaatgggtataatttcctggctgcctcccttcctcagcccattaggttaaacaccaaagaaagactggtgtgtactgaataggaaagggaagttttatttggaaccttctaagaggaaatcaaccaggaccaaagagccttaaaggacacacagcaatgcacagccacttcccttccccagcttggctgccctaggtgatttctcaagctccttgggggactgttgtttctcatctggaatcaatgtgtgtatgagttttgtctggtaggattgctgactctgtccaacagatatcactgtgaattgaataaatttgttgaaagagcacacaggcacacatacacacaaactgtaaa

SEQ ID NO: 383162 - DNA, 1892 bp, Homo sapiens
tgggattggtcgaaaaggaggggcgtggggcgggcgtgggggcagttccccagcccaggtcctcctctcacccgggccagttttcaaggcgggctgtaactggtggcatttgtcccgggaccaggtccacagttttatgtgtgagcaagatggaggctgacctgtctggctttaacatcgatgccccccgttgggaccagcgcaccttcctggggagagtgaagcacttcctaaacatcacggacccccgcactgtctttgtatctgagcgggagctggactgggccaaggtgatggtggagaagagcaggatgggggttgtgcccccaggcacccaagtggagcagctgctgtatgccaagaagctgtatgactcggccttccaccccgacactggggagaagatgaatgtcatcgggcgcatgtctttccagcttcctggcggcatgatcatcacgggcttcatgctccagttctacaggacgatgccggcggtgatcttctggcagtgggtgaaccagtccttcaatgccttagtcaactacaccaacaggaatgcggcttcccccacatcagtcaggcagatggccctttcctacttcacagccacaaccactgctgtggccacggctgtgggcatgaacatgttgacaaagaaagcgccgcccttggtgggccgctgggtgccctttgccgctgtggctgcggctaactgtgtcaatatccccatgatgcgacagcaggagctcataaagggaatctgcgtgaaggacaggaatgaaaatgagattggtcattcccggagagctgcggccataggcatcacccaagtagttatttctcggatcaccatgtcagctcctgggatgatcttgctgccagtcatcatggaaaggcttgagaaattgcacttcatgcagaaagtcaaggtcctgcacgccccattgcaggtcatgctgagcgggtgcttcctcatcttcatggtgccagtggcgtgtgggcttttcccacagaaatgtgaattgccagtttcctatctggaaccgaagctccaagacactatcaaggccaagtatggagaacttgagccttatgtctacttcaataagggtctctaaatgccccacttcagcaaggaccagtctattcccatattcaccagctcctccttagctacgtgcacacttgtgtcctccttcccctttgccaacaaggcctgaaggccagggtagattggggggtgggacaatgaatgcctcatacttacaccctggtactggttgattggacctcaggggaaaaaagtgaaaaagggtagcaaaggccaatgtcttctagctgcttcctcaacccctgtcccctggagaccagaagctgaggccctctcagggaggagacatccaagcaaatcatttggaaaagttaggaaacctttaggattctggttccagccagggttgaggaaaagaccttggatcaaaaggaagcttctatacctctttcttcttcgcttcctcctctcccaagcaatggaaacttttacccatgtaattctagctgaactcaggaaaaagaagggggaaaggactctgtccccttggggctcatcacccttccacatcctcctcctcgttgccccctggtcaggcagcttcttttttttttttttcaagatggagtcttgctctgtcgcccaggctggaatgcagtggcgcgatctcggctcactgcaaactctgcctcctggattcaagcgattctcctgcctcagctactcggggggctgagactggagaatcacttgaacctgggaggtggaggttgtggtgagccaagattgcgccactgcactccaacctgggcgactccgtctcaaaaaaaaaaaagaaaac

SEQ ID NO: 383163 - DNA, 2027 bp, Homo sapiens
ctgggtgtctggatgtgtggcggtagcaaggcctagttttcttttttgtattctagtcgttcagccccctcccctcccatcttccagcgcttctgaacaactcctactgttctcttcccccaacagaaagcgccgcccttggtgggccgctgggtgccctttgccgctgtggctgcggctaactgtgtcaatatccccatgatgcgacagcaggagctcataaagggaatctgcgtgaaggacaggaatgaaaatgagattggtcattcccggagagctgcggccataggcatcacccaagtagttatttctcggatcaccatgtcagctcctgggatgatcttgctgccagtcatcatggaaaggcttgagaaattgcacttcatgcagaaagtcaaggtcctgcacgccccattgcaggtcatgctgagcgggtgcttcctcatcttcatggtgccagtggcgtgtgggcttttcccacagaaatgtgaattgccagtttcctatctggaaccgaagctccaagacactatcaaggccaagtatggagaacttgagccttatgtctacttcaataagggtctctaaatgccccacttcagcaaggaccagtctattcccatattcaccagctcctccttagctacgtgcacacttgtgtcctccttcccctttgccaacaaggcctgaaggccagggtagattggggggtgggacaatgaatgcctcatacttacaccctggtactggttgattggacctcaggggaaaaaagtgaaaaagggtagcaaaggccaatgtcttctagctgcttcctcaacccctgtcccctggagaccagaagctgaggccctctcagggaggagacatccaagcaaatcatttggaaaagttaggaaacctttaggattctggttccagccagggttgaggaaaagaccttggatcaaaaggaagcttctatacctctttcttcttcgcttcctcctctcccaagcaatggaaacttttacccatgtaattctagctgaactcaggaaaaagaagggggaaaggactctgtccccttggggctcatcacccttccacatcctcctcctcgttgccccctggtcaggcagcttcttttttttttttttcaagatggagtcttgctctgtcgcccaggctggaatgcagtggcgcgatctcggctcactgcaaactctgcctcctggattcaagcgattctcctgcctcagcctctcaagtagctgggattacagggcacctgccaccacgcctggctaatttttgtattttagtggagacggggtttcaccatgctggccagactggtctcgaactcctgacctcaggtgatccgcccgcctcagcctctgaaattgctgggattacaggcatgagccaccacacccagcccggacagcttctttgggagtgctgctaaccttgaaattatcagacacttaggagttattagtgctaaaaaggggaccgtgcaaggcagcagagttacatggttcttcaaatcatgtctgaacctattcttggaatcttctctataataagggaagttctcttaccccactgccacatacctctgttttaaaagataagtccactaactgtgagtaaaaatgatatatataggcattaaccacacactttaatgggtataatttcctggctgcctcccttcctcagcccattaggttaaacaccaaagaaagactggtgtgtactgaataggaaagggaagttttatttggaaccttctaagaggaaatcaaccaggaccaaagagccttaaaggacacacagcaatgcacagccacttcccttccccagcttggctgccctaggtgatttctcaagctccttgggggactgttgtttctcatctggaatcaatgtgtgtatgagttttgtctggtaggattgctgactctgtccaacagatatcactgtgaattgaataaatttgttgaaagagcacacaggcacacatacacacaaactgtaaa

SEQ ID NO: 383164 - DNA, 2265 bp, Homo sapiens
tggagtttcactcttagggaccaggctggagtgcaacggtgcgatctcggctcatcacaacctccacctctcgggttcaaacgattctcctgccttagcctcccaagtagctgggattacaggtccacagttttatgtgtgagcaagatggaggctgacctgtctggctttaacatcgatgccccccgttgggaccagcgcaccttcctggggagagtgaagcacttcctaaacatcacggacccccgcactgtctttgtatctgagcgggagctggactgggccaaggtgatggtggagaagagcaggatgggggttgtgcccccaggcacccaagtggagcagctgctgtatgccaagaagctgtatgactcggccttccaccccgacactggggagaagatgaatgtcatcgggcgcatgtctttccagcttcctggcggcatgatcatcacgggcttcatgctccagttctacaggacgatgccggcggtgatcttctggcagtgggtgaaccagtccttcaatgccttagtcaactacaccaacaggaatgcggcttcccccacatcagtcagtcttgctgccagtcatcatggaaaggcttgagaaattgcacttcatgcagaaagtcaaggtcctgcacgccccattgcaggtcatgctgagcgggtgcttcctcatcttcatggtgccagtggcgtgtgggcttttcccacagaaatgtgaattgccagtttcctatctggaaccgaagctccaagacactatcaaggccaagtatggagaacttgagccttatgtctacttcaataagggtctctaaatgccccacttcagcaaggaccagtctattcccatattcaccagctcctccttagctacgtgcacacttgtgtcctccttcccctttgccaacaaggcctgaaggccagggtagattggggggtgggacaatgaatgcctcatacttacaccctggtactggttgattggacctcaggggaaaaaagtgaaaaagggtagcaaaggccaatgtcttctagctgcttcctcaacccctgtcccctggagaccagaagctgaggccctctcagggaggagacatccaagcaaatcatttggaaaagttaggaaacctttaggattctggttccagccagggttgaggaaaagaccttggatcaaaaggaagcttctatacctctttcttcttcgcttcctcctctcccaagcaatggaaacttttacccatgtaattctagctgaactcaggaaaaagaagggggaaaggactctgtccccttggggctcatcacccttccacatcctcctcctcgttgccccctggtcaggcagcttcttttttttttttttcaagatggagtcttgctctgtcgcccaggctggaatgcagtggcgcgatctcggctcactgcaaactctgcctcctggattcaagcgattctcctgcctcagcctctcaagtagctgggattacagggcacctgccaccacgcctggctaatttttgtattttagtggagacggggtttcaccatgctggccagactggtctcgaactcctgacctcaggtgatccgcccgcctcagcctctgaaattgctgggattacaggcatgagccaccacacccagcccggacagcttctttgggagtgctgctaaccttgaaattatcagacacttaggagttattagtgctaaaaaggggaccgtgcaaggcagcagagttacatggttcttcaaatcatgtctgaacctattcttggaatcttctctataataagggaagttctcttaccccactgccacatacctctgttttaaaagataagtccactaactgtgagtaaaaatgatatatataggcattaaccacacactttaatgggtataatttcctggctgcctcccttcctcagcccattaggttaaacaccaaagaaagactggtgtgtactgaataggaaagggaagttttatttggaaccttctaagaggaaatcaaccaggaccaaagagccttaaaggacacacagcaatgcacagccacttcccttccccagcttggctgccctaggtgatttctcaagctccttgggggactgttgtttctcatctggaatcaatgtgtgtatgagttttgtctggtaggattgctgactctgtccaacagatatcactgtgaattgaataaatttgttgaaagagcacacaggcacacatacacacaaactgtaaa

SEQ ID NO: 383165 - DNA, 1158 bp, Homo sapiens
  misc_feature (732)..(732): n is a, c, g, or t
  misc_feature (736)..(736): n is a, c, g, or t
  misc_feature (776)..(776): n is a, c, g, or t
tgggattggtcgaaaaggaggggcgtggggcgggcgtgggggcagttccccagcccaggtcctcctctcacccgggccagttttcaaggcgggctgtaactggtggcatttgtcccgggaccaggtccacagttttatgtgtgagcaagatggaggctgacctgtctggctttaacatcgatgccccccgttgggaccagcgcaccttcctggggagagtgaagcacttcctaaacatcacggacccccgcactgtctttgtatctgagcgggagctggactgggccaaggtgatggtggagaagagcaggatgggggttgtgcccccaggcacccaagtggagcagctgctgtatgccaagaagctgtatgactcggccttccaccccgacactggggagaagatgaatgtcatcgggcgcatgtctttccagcttcctggcggcatgatcatcacgggcttcatgctccagttctacaggacgatgccggcggtgatcttctggcagtgggtgaaccagtccttcaatgccttagtcaactacaccaacaggaatgcggcttcccccacatcagtcaggcagatggccctttcctacttcacagccacaaccactgctgtggccacggctgtgggcatgaacatgttgacaaagaaagcgccgcccttggtgggccgctgggtgccctttgccgctgtggctgcggctaactgtgtctttatcgaccaanaatnttacagcaggagctcataaaggatcgtgcagtgaagacangaattgcaacatgaggatggtgcattcccggagagctgcggggcatagggcatccaccccaagtagttatctcctcggattcaccaaagtcagctccctgggatgatcttggctggcaggtcatcattggaaaggcttgagaaattggccttcatgcagaagagtcgaggtcctggcacgcccattggaggtcatggtgaaggggggcttctcatcctcatggtgccagggggtgtggctttcccacaaaatggtaattgccattctatcggaacgagtcccaaacatataggcagttggaatgtgctatgtcgaaggtcaggccctcgaggggtacagtacacctcaggggaggtcctccggagggagcgaggtggggcca

SEQ ID NO: 383166 - DNA, 439 bp, Homo sapiens
atatttgggatagggaagggaagcttgggattttagctacgtagagacacttgaaaattggagggaggaaaggagtgggtggctttggagatgttctggaatatgtgaatgaggggagtggaggggtcctggaggctctggggaaggccaagcccgttttcctgtctttcaacctcttccaggaaaattacgggcagaaggaggctgagaaagtggcccgggtgaaggcgctatatgaggagctggatctgccagcagtgttcttgcaatatgaggaagacagttacagccacattatggctctcattgaacagtacgcagcacccctgcccccagccgtctttctggggcttgcgcgcaaaatctacaagcggagaaagtgacctagagattgcaagggcggggagaggaggctctcaataaataatcgtgtaacctt

SEQ ID NO: 383167 - DNA, 330 bp, Homo sapiens
  misc_feature (30)..(30): n is a, c, g, or t
  misc_feature (137)..(137): n is a, c, g, or t
gatctggctgcgctatgactccgggagcgncacccacaacatgtaccgggaataccgggacctgaccaccgcagcgctgtcacccagtgctaccgagacatgggtgcccggcacgcgcccgagcccactccattcanatctgccagcagtgttcttgcaatatgaggaagacagttacagccacattatggctctcattgaacagtacgcagcacccctgcccccagccgtctttctggggcttgcgcgcaaaatctacaagcggagaaagtgacctagagattgcaagggcggggagaggaggctctcaataaataatcgtgtaacctt

SEQ ID NO: 383168 - DNA, 1055 bp, Homo sapiens
  misc_feature (825)..(825): n is a, c, g, or t
aatacggctaggtacgaggctgggtgttaatcggccgaggtgcttttaggagtacccgccaacaagcgggaccgagcaggaatccgtatctgggaacagagccctttgctcctccctcagaatgaacggagaccagaattcagatgtttatgcccaagaaaagcaggatttcgttcagcacttctcccagatcgttagggtgctgactgaggatgagatggggcacccagagataggagatgctattgcccggctcaaggaggtcctggagtacaatgccattggaggcaagtataaccggggtttgacggtggtagtagcattccgggagctggtggagccaaggaaacaggatgctgatagtctccagcgggcctggactgtgggctggtgtgtggaactgctgcaagctttcttcctggtggcagatgacatcatggattcatcccttacccgccggggacagatctgctggtatcagaagccgggcgtgggtttggatgccatcaatgatgctaacctcctggaagcatgtatctaccgcctgctgaagctctattgccgggagcagccctattacctgaacctgatcgagctcttcctgcagagttcctatcagactgagattgggcagaccctggacctcctcacagccccccagggcaatgtggatcttgtcagattcactgaaaagaggtacaaatctattgtcaagtacaagacagctttctactccttctaccttcctatagctgcagccatgtacatggcaggaattgatggcgagaaggagcacgcaatgcagaaacctgtggaaagggggantcttcagatcaggatgatacctgtacttttggggcccagtgtgccggcattgcgctgctcagaacaaatgcgtgctggggtcaatgtggagggctcaaggacatctgtgaatcggcagagcgcgaaggcgggagccatagggtcgcccgtctcgagagggtcctgttctatgccgcccttggcataacacaggggggtaaaaaagggaggcgcgtatacttatcgtagac

SEQ ID NO: 383169 - DNA, 765 bp, Homo sapiens
cacttcctgtgtgctggaacagcattcatgcctcatggacaccatctccttttatcattgtgacaacctagaaagaagtgtaggatcaacaggctgttttacagatgagggaactgggccgtagcaaggtgtgttccttttccactctgctgtggggccaggaggctgacggctttgcacagtggcgtctgtagggtttggagagtggcacccataggagatgagatggagagggtgaggttgagcatttacctccccagttgccattctagggaccattctctccctatcccttggaccttacaggggtaacaaagcccactgttattagatctggggtaatgcactatccgttgtggtttaccaacaccctgcccattcctttgtataatcctgttatgaaacaccttcaaattatcccatttaagagaatgaattctttatttcctgaagaaaccctaccgaatacacttgtctgatgcaaaaagtcttgtcaggagtggagctgggattcaggcccagatagtggagctccagagcccgagctgtaaccactaagctccatgcctgccccttgggactgtttcagtgggtgggaaagggagaagtctctgactctggagttggaaaagaaagagagagatagtagagaggacttccggagggaaatgagcatggggcctcatctttctgtatatagaagacacaacaaataaagagagacaaaatttgtacccacagagaatgtggcagacttcagggact

SEQ ID NO: 383170 - DNA, 1289 bp, Homo sapiens
aatacggctaggtacgaggctgggtgttaatcggccgaggggggagagcgggaactactcgacccacagagccgatcgcggagcggattctgcttttaggagtacccgccaacaagcgggaccgagcaggaatccgtatctgggaacagagccctttgctcctccctcagaatgaacggagaccagaattcagatgtttatgcccaagaaaagcaggatttcgttcagcacttctcccagatcgttagggtgctgactgaggatgagatggggcacccagagataggagatgctattgcccggctcaaggaggtcctggagtacaatgccattggaggcaagtataaccggggtttgacggtggtagtagcattccgggagctggtggagccaaggaaacaggatgctgatagtctccagcgggcctggactgtgggctggtgtgtggaactgctgcaagctttcttcctggtggcagatgacatcatggattcatcccttacccgccggggacagatctgctggtatcagaagccgggcgtgggtttggatgccatcaatgatgctaacctcctggaagcatgtatctaccgcctgctgaagctctattgccgggagcagccctattacctgaacctgatcgagctcttcctgcagagttcctatcagactgagattgggcagaccctggacctcctcacagccccccagggcaatgtggatcttgtcagattcactgaaaagaggtacaaatctattgtcaagtacaagacagctttctactccttctaccttcctatagctgcagccatgtacatggcaggaattgatggcgagaaggagcacgccaatgccaagaagatcctgctggagatgggggagttctttcagattcaggatgattaccttgacctctttggggaccccagtgtgaccggcaaaattggcactgacatccaggacaacaaatgcagctggctggtggttcagtgtctgcaacgggccactccagaacagtaccagatcctgaaggaaaattacgggcagaaggaggctgagaaagtggcccgggtgaaggcgctatatgaggagctggatctgccagcagtgttcttgcaatatgaggaagacagttacagccacattatggctctcattgaacagtacgcagcacccctgcccccagccgtctttctggggcttgcgcgcaaaatctacaagcggagaaagtgacctagagattgcaagggcggggagaggaggctctcaataaataatcgtgtaacctt

SEQ ID NO: 383171 - DNA, 1392 bp, Homo sapiens
aatacggctaggtacgaggctgggtgttaatcggccgaggggggagagcgggaactactcgacccacagagccgatcgcggagcggattctgcttttaggagtacccgccaacaagcgggaccgagcaggaatccgtatctgggaacagagccctttgctcctccctcagaatgaacggagaccagaattcagatgtttatgcccaagaaaagcaggatttcgttcagcacttctcccagatcgttagggtgctgactgaggatgagatggggcacccagagataggagatgctattgcccggctcaaggaggtcctggagtacaatgccattggaggcaagtataaccggggtttgacggtggtagtagcattccgggagctggtggagccaaggaaacaggatgctgatagtctccagcgggcctggactgtgggctggtgtgtggaactgctgcaagctttcttcctggtggcagatgacatcatggattcatcccttacccgccggggacagatctgctggtatcagaagccgggcgtgggtttggatgccatcaatgatgctaacctcctggaagcatgtatctaccgcctgctgaagctctattgccgggagcagccctattacctgaacctgatcgagctcttcctgcagagttcctatcagactgagattgggcagaccctggacctcctcacagccccccagggcaatgtggatcttgtcagattcactgaaaagaggtacaaatctattgtcaagtacaagacagctttctactccttctaccttcctatagctgcagccatgtacatggcaggaattgatggcgagaaggagcacgccaatgccaagaagatcctgctggagatgggggagttctttcagattcaggatgattaccttgacctctttggggaccccagtgtgaccggcaaaattggcactgacatccaggacaacaaatgcagctggctggtggttcagtgtctgcaacgggccactccagaacagtaccagatcctgaaggaaaattacgggcagaaggaggctgagaaagtggcccgggtgaaggcgctatatgaggagctggatctgccagcagtgttcttgcaatatgaggaagacagttacagccacattatggctctcattgaacagtacgcagcacccctgcccccagccgtctttctggggcttgcgcgcaaaatctacaagcggagaaagtgacctagagattgcaagggcggggagaggaggctctcaataaataatcgtgtaaccttaaaaaaaaaaaatcgggattctttgggggggaaaaagttgaaggcacggctactgttctgcccttttgacaggggaatcgcccaagagctatcgaccgactag

SEQ ID NO: 383172 - DNA, 1663 bp, Homo sapiens
  misc_feature (1301)..(1301): n is a, c, g, or t
  misc_feature (1304)..(1304): n is a, c, g, or t
  misc_feature (1312)..(1313): n is a, c, g, or t
  misc_feature (1316)..(1316): n is a, c, g, or t
  misc_feature (1319)..(1319): n is a, c, g, or t
  misc_feature (1322)..(1322): n is a, c, g, or t
aatacggctaggtacgaggctgggtgttaatcggccgaggggggagagcgggaactactcgacccacagagccgatcgcggagcggattctgcttttaggagtacccgccaacaagcgggaccgagcaggaatccgtatctgggaacagagccctttgctcctccctcagaatgaacggagaccagaattcagatgtttatgcccaagaaaagcaggatttcgttcagcacttctcccagatcgttagggtgctgactgaggatgagatggggcacccagagataggagatgctattgcccggctcaaggaggtcctggagtacaatgccattggaggcaagtataaccggggtttgacggtggtagtagcattccgggagctggtggagccaaggaaacaggatgctgatagtctccagcgggcctggactgtgggctggtgtgtggaactgctgcaagctttcttcctggtggcagatgacatcatggattcatcccttacccgccggggacagatctgctggtatcagaagccgggcgtgggtttggatgccatcaatgatgctaacctcctggaagcatgtatctaccgcctgctgaagctctattgccgggagcagccctattacctgaacctgatcgagctcttcctgcagagttcctatcagactgagattgggcagaccctggacctcctcacagccccccagggcaatgtggatcttgtcagattcactgaaaagaggtacaaatctattgtcaagtacaagacagctttctactccttctaccttcctatagctgcagccatgtacatggcaggaattgatggcgagaaggagcacgccaatgccaagaagatcctgctggagatgggggagttctttcagattcaggatgattaccttgacctctttggggaccccagtgtgaccggcaaaattggcactgacatccaggacaacaaatgcagctggctggtggttcagtgtctgcaacgggccactccagaacagtaccagatcctgaaggaaaattacgggcagaaggaggctgagaaagtggcccgggtgaaggcgctatatgaggagctggatctgccagcagtgttcttgcaatatgaggaagacagttacagccacattatggctctcattgaacagtacgcagcacccctgcccccagccgtctttctggggcttgcgcgcaaaatctacaagcggagaaagtgacctagagattgcaagggcggggagaggaggctctcaataaataatcgtgtaaccttaaaaaaaaaaanaanaaaaaaannaanaanaanaaggataaaacaagaaggaaacaaaactacaggcgcagcccgtgctccatttctttcaaacgggagccgaattacatgacaaatgaaaatctttggggggggccgcggccccaattccccctatagggggcaggttaaaattattgcccgggttttaacaacggaggatctgggaaaacctggaggtcccaacttaacgcctttgaagaaaatccccttttgccaaggtgggtataaccaaagaggccccaacccgttggcttttccaacagttggccatcttaaagtgcaatgggattttttccgcggtaaatttgtaaaaaatcccgtgaaattttggt

SEQ ID NO: 383173 - DNA, 1294 bp, Homo sapiens
aatacggctaggtacgaggctgggtgttaatcggccgaggggggagagcgggaactactcgacccacagagccgatcgcggagcggattctgcttttaggagtacccgccaacaagcgggaccgagcaggaatccgtatctgggaacagagccctttgctcctccctcagaatgaacggagaccagaattcagatgtttatgcccaagaaaagcaggatttcgttcagcacttctcccagatcgttagggtgctgactgaggatgagatggggcacccagagataggagatgctattgcccggctcaaggaggtcctggagtacaatgccattggaggcaagtataaccggggtttgacggtggtagtagcattccgggagctggtggagccaaggaaacaggatgctgatagtctccagcgggcctggactgtgggctggtgtgtggaactgctgcaagctttcttcctggtggcagatgacatcatggattcatcccttacccgccggggacagatctgctggtatcagaagccgggcgtgggtttggatgccatcaatgatgctaacctcctggaagcatgtatctaccgcctgctgaagctctattgccgggagcagccctattacctgaacctgatcgagctcttcctgcagagttcctatcagactgagattgggcagaccctggacctcctcacagccccccagggcaatgtggatcttgtcagattcactgaaaagaggtacaaatctattgtcaagtacaagacagctttctactccttctaccttcctatagctgcagccatgtacatggcaggaattgatggcgagaaggagcacgccaatgccaagaagatcctgctggagatgggggagttctttcagattcaggatgattaccttgacctctttggggaccccagtgtgaccggcaaaattggcactgacatccaggacaacaaatgcagctggctggtggttcagtgtctgcaacgggccactccagaacagtaccagatcctgaaggaaaattacgggcagaaggaggctgagaaagtggcccgggtgaaggcgctatatgaggagctggatctgccagcagtgttcttgcaatatgaggaagacagttacagccacattatggctctcattgaacagtacgcagcacccctgcccccagccgtctttctggggcttgcgcgcaaaatctacaagcggagaaagtgacctagagattgcaagggcaggctcgtagcttgccatgggatcctctagatcaccccgcaca

SEQ ID NO: 383174 - DNA, 1246 bp, Homo sapiens
  misc_feature (1229)..(1229): n is a, c, g, or t
aatacggctaggtacgaggctgggtgttaatcggccgaggggggagagcgggaactactcgacccacagagccgatcgcggagcggattctgcttttaggagtacccgccaacaagcgggaccgagcaggaatccgtatctgggaacagagccctttgctcctccctcagaatgaacggagaccagaattcagatgtttatgcccaagaaaagcaggatttcgttcagcacttctcccagatcgttagggtgctgactgaggatgagatggggcacccagagataggagatgctattgcccggctcaaggaggtcctggagtacaatgccattggaggcaagtataaccggggtttgacggtggtagtagcattccgggagctggtggagccaaggaaacaggatgctgatagtctccagcgggcctggactgtgggctggtgtgtggaactgctgcaagctttcttcctggtggcagatgacatcatggattcatcccttacccgccggggacagatctgctggtatcagaagccgggcgtgggtttggatgccatcaatgatgctaacctcctggaagcatgtatctaccgcctgctgaagctctattgccgggagcagccctattacctgaacctgatcgagctcttcctgcagagttcctatcagactgagattgggcagaccctggacctcctcacagccccccagggcaatgtggatcttgtcagattcactgaaaagaggtacaaatctattgtcaagtacaagacagctttctactccttctaccttcctatagctgcagccatgtacatggcaggaattgatggcgagaaggagcacgccaatgccaagaagatcctgctggagatgggggagttctttcagattcaggatgattaccttgacctctttggggaccccagtgtgaccggcaaaattggcactgacatccaggacaacaaatgcagctggctggtggttcagtgtctgcaacgggccactccagaacagtaccagatcctgaaggaaaattacgggcagaaggaggctgagaaagtggcccgggtgaaggcgctatatgaggagctggatctgccagcagtgttcttgcaatatgaggaagacagttacagccacattatggctctcattgaacagtacgcagcacccctgcccccagccgtctttctggggcttgcgcgcaaaatctacaaccgaaaatnacccaaaatttcccggg

SEQ ID NO: 383175 - DNA, 1242 bp, Homo sapiens
aatacggctaggtacgaggctgggtgttaatcggccgaggggggagagcgggaactactcgacccacagagccgatcgcggagcggattctgcttttaggagtacccgccaacaagcgggaccgagcaggaatccgtatctgggaacagagccctttgctcctccctcagaatgaacggagaccagaattcagatgtttatgcccaagaaaagcaggatttcgttcagcacttctcccagatcgttagggtgctgactgaggatgagatggggcacccagagataggagatgctattgcccggctcaaggaggtcctggagtacaatgccattggaggcaagtataaccggggtttgacggtggtagtagcattccgggagctggtggagccaaggaaacaggatgctgatagtctccagcgggcctggactgtgggctggtgtgtggaactgctgcaagctttcttcctggtggcagatgacatcatggattcatcccttacccgccggggacagatctgctggtatcagaagccgggcgtgggtttggatgccatcaatgatgctaacctcctggaagcatgtatctaccgcctgctgaagctctattgccgggagcagccctattacctgaacctgatcgagctcttcctgcagagttcctatcagactgagattgggcagaccctggacctcctcacagccccccagggcaatgtggatcttgtcagattcactgaaaagaggtacaaatctattgtcaagtacaagacagctttctactccttctaccttcctatagctgcagccatgtacatggcaggaattgatggcgagaaggagcacgccaatgccaagaagatcctgctggagatgggggagttctttcagattcaggatgattaccttgacctctttggggaccccagtgtgaccggcaaaattggcactgacatccaggacaacaaatgcagctggctggtggttcagtgtctgcaacgggccactccagaacagtaccagatcctgaaggaaaattacgggcagaaggaggctgagaaagtggcccgggtgaaggcgctatatgaggagctggatctgccagcagtgttcttgcaatatgaggaagacagttacagccgtctttctggggcttgcgcgcaaaatctacaagcggagaaagtgacctagagattgcaagggcggggagaggaggctctcaataaataatcgtgtaacctt

SEQ ID NO: 383176 - DNA, 1940 bp, Homo sapiens
aatacggctaggtacgaggctgggtgttaatcggccgaggggggagagcgggaactactcgacccacagagccgatcgcggagcggattctgcttttaggagtacccgccaacaagcgggaccgagcaggaatccgtatctgggaacagagccctttgctcctccctcagaatgaacggagaccagaattcagatgtttatgcccaagaaaagcaggatttcgttcagcacttctcccagatcgttagggtgctgactgaggatgagatggggcacccagagataggagatgctattgcccggctcaaggaggtcctggagtacaatgccattggaggcaagtataaccggggtttgacggtggtagtagcattccgggagctggtggagccaaggaaacaggatgctgatagtctccagcgggcctggactgtgggctggtgtgtggaactgctgcaagctttcttcctggtggcagatgacatcatggattcatcccttacccgccggggacagatctgctggtatcagaagccgggcgtgggtttggatgccatcaatgatgctaacctcctggaagcatgtatctaccgcctgctgaagctctattgccgggagcagccctattacctgaacctgatcgagctcttcctgcagagttcctatcagactgagattgggcagaccctggacctcctcacagccccccagggcaatgtggatcttgtcagattcactgaaaagaggtacaaatctattgtcaagtacaagacagctttctactccttctaccttcctatagctgcagccatgtacatggcaggaattgatggcgagaaggagcacgccaatgccaagaagatcctgctggagatgggggagttctttcagattcaggatgattaccttgacctctttggggaccccagtgtgaccggcaaaattggcactgacatccaggacaacaaatgcagctggctggtggttcagtgtctgcaacgggccactccagaacagtaccagatcctgacctcggtgtccttccccgcagctcttgtcctcactggccgggcttcaccacctctgtcttctaggtctgggtctgcacctgtggttgccaggtaggtggatgtgagagaccctacccttctggttctctagaagccatcccatcgccgctagcatcatgctgtcccctcagagagctttactctgcaacctcaaccacatccacctccagcacgtctccctgggcctgcacttgtcccgccgtcctgagctacaggaggggcctttgagcacaccccctcctccaggagacactgggggcaaggagagcaggggcccctgcagtggcaccctggtggacgccaattccaacagcccagctgtgccctgccggtgctgccaggagcacggtccgggcctagaaaaccggcaggacccgtcacaggaggaagagggggctgcctctccctcagacccaggctgctcctcctcactcagctcctgctcagatcttagccccgatgagtcccctgtctcagtctacttgcgggacctccctggtgatgaggatgcccaccctcagcccagtatcatccccctggagcagggctccccactggcttcagcaggccctggcacctgctcaccggacagcttctgctgctctcctgattcctgctccggagcttcttcttcacccgatcctggcctggactcgaactgcaacgccctgaccacctgccaggacgtcccttccccaggcttggaggaagaggacgagagggcggagcaggatctccctacctctgagctcttagaggcggatgatgggaaaatcgacgctgggaaaacggagcccagttggaagattaacccaatttggaaaattgacacagagaaaactaaagctgaatggaaaaccactgaaaaca

SEQ ID NO: 383177 - DNA, 1110 bp, Homo sapiens
  misc_feature (1046)..(1046): n is a, c, g, or t
  misc_feature (1051)..(1051): n is a, c, g, or t
  misc_feature (1054)..(1054): n is a, c, g, or t
aatacggctaggtacgaggctgggtgttaatcggccgaggggggagagcgggaactactcgacccacagagccgatcgcggagcggattctgcttttaggagtacccgccaacaagcgggaccgagcaggaatccgtatctgggaacagagccctttgctcctccctcagaatgaacggagaccagaattcagatgtttatgcccaagaaaagcaggatttcgttcagcacttctcccagatcgttagggtgctgactgaggatgagatggggcacccagagataggagatgctattgcccggctcaaggaggtcctggagtacaatgccattggaggcaagtataaccggggtttgacggtggtagtagcattccgggagctggtggagccaaggaaacaggatgctgatagtctccagcgggcctggactgtgggctggtgtgtggaactgctgcaagctttcttcctggtggcagatgacatcatggattcatcccttacccgccggggacagatctgctggtatcagaagccgggcgtgggtttggatgccatcaatgatgctaacctcctggaagcatgtatctaccgcctgctgaagctctattgccgggagcagccctattacctgaacctgatcgagctcttcctgcagagttcctatcagactgagattgggcagaccctggacctcctcacagccccccagggcaatgtggatcttgtcagattcactgaaaagaggtacaaatctattgtcaagtacaagacagctttctactccttctaccttcctatagctgcagccatgtacatggcaggaattgatggcgagaaggagcacgccaatgccaagaagatcctgctggagatgggggagttctttcagattcaggatgattaccttgacctctttggggaccccagtgtgaccggcaaaattggcactgacatccaggacaacaatgcagtggctggtggtcagtgtctgcaaggggcactccgacagtccgatctgaggaaatcggggaaggggtgaaatgnggganggnatagggggttgcggggttatgggagtagttggttagggcgccggttgggggaaaaa

SEQ ID NO: 383178 - DNA, 1150 bp, Homo sapiens
aatacggctaggtacgaggctgggtgttaatcggccgaggggggagagcgggaactactcgacccacagagccgatcgcggagcggattctgcttttaggagtacccgccaacaagcgggaccgagcaggaatccgtatctgggaacagagccctttgctcctccctcagaatgaacggagaccagaattcagatgtttatgcccaagaaaagcaggatttcgttcagcacttctcccagatcgttagggtgctgactgaggatgagatggggcacccagagataggagatgctattgcccggctcaaggaggtcctggagtacaatgccattggaggcaagtataaccggggtttgacggtggtagtagcattccgggagctggtggagccaaggaaacaggatgctgatagtctccagcgggcctggactgtgggctggtgtgtggaactgctgcaagctttcttcctggtggcagatgacatcatggattcatcccttacccgccggggacagatctgctggtatcagaagccgggcgtgggtttggatgccatcaatgatgctaacctcctggaagcatgtatctaccgcctgctgaagctctattgccgggagcagccctattacctgaacctgatcgagctcttcctgcagagttcctatcagactgagattgggcagaccctggacctcctcacagccccccagggcaatgtggatcttgtcagattcactgaaaagaggtacaaatctattgtcaagtacaagacagctttctactccttctaccttcctatagctgcagccatgtacatggcaggaattgatggcgagaaggagcacgccaatgccaagaagatcctgctggagatgggggagttctttcagattcaggatgattaccttgacctctttggggaccccagtgtgaccggcaaaattggcactgacatccaacacaatgcgtggggggggcaggctggaagggccccaaaaatccatcgggagaaaatcgccgagggggggaaaggccgggaggcaaagaggctgcgccggctcgtaatgagaaaccttggctaaagacccccccctgggggacagagaaaggggggggaataaacaacacggggaggccgcgctcacatgc

SEQ ID NO: 383179 - DNA, 1331 bp, Homo sapiens
aatacggctaggtacgaggctgggtgttaatcggccgaggggggagagcgggaactactcgacccacagagccgatcgcggagcggattctgcttttaggagtacccgccaacaagcgggaccgagcaggaatccgtatctgggaacagagccctttgctcctccctcagaatgaacggagaccagaattcagatgtttatgcccaagaaaagcaggatttcgttcagcacttctcccagatcgttagggtgctgactgaggatgagatggggcacccagagataggagatgctattgcccggctcaaggaggtcctggagtacaatgccattggaggcaagtataaccggggtttgacggtggtagtagcattccgggagctggtggagccaaggaaacaggatgctgatagtctccagcgggcctggactgtgggctggtgtgtggaactgctgcaagctttcttcctggtggcagatgacatcatggattcatcccttacccgccggggacagatctgctggtatcagaagccgggcgtgggtttggatgccatcaatgatgctaacctcctggaagcatgtatctaccgcctgctgaagctctattgccgggagcagccctattacctgaacctgatcgagctcttcctgcagagttcctatcagactgagattgggcagaccctggacctcctcacagccccccagggcaatgtggatcttgtcagattcactgaaaagaggtacaaatctattgtcaagtacaagacagctttctactccttctaccttcctatagctgcagccatgtacatggcaggaattgatggcgagaaggagcacgccaatgccaagaagatcctgctggagatgggggagttctttcagattcaggatgattaccttgacctctttggggaccccagtgtgaccggcgattattggcactgacatccaggacaacaaatgcagctggctggtggttcagtgtctgcaacgggccactccagaacagtaccagatcctgaaggaaaattacgggcagaaggaggctgagaaagtggcccgggtgaaggcgctatatgaggagctggatctgccagcagtgttcttgcaatatgaggaagacagttacagccacattatggctctcattgaacagtacgcagcacccctgcccccagccgtctttctggggcttgcgcgcaaaatctacaagcggagaaagtgacctagagattgcaagggcggggagaggaggctctcaataaataatcgtgtaaccttccggtcacgagatggtaccgagctcgattcactgcctgtca

SEQ ID NO: 383180 - DNA, 1488 bp, Homo sapiens
aatacggctaggtacgaggctgggtgttaatcggccgaggggggagagcgggaactactcgacccacagagccgatcgcggagcggattctgcttttaggagtacccgccaacaagcgggaccgagcaggaatccgtatctgggaacagagccctttgctcctccctcagaatgaacggagaccagaattcagatgtttatgcccaagaaaagcaggatttcgttcagcacttctcccagatcgttagggtgctgactgaggatgagatggggcacccagagataggagatgctattgcccggctcaaggaggtcctggagtacaatgccattggaggcaagtataaccggggtttgacggtggtagtagcattccgggagctggtggagccaaggaaacaggatgctgatagtctccagcgggcctggactgtgggctggtgtgtggaactgctgcaagctttcttcctggtggcagatgacatcatggattcatcccttacccgccggggacagatctgctggtatcagaagccgggcgtgggtttggatgccatcaatgatgctaacctcctggaagcatgtatctaccgcctgctgaagctctattgccgggagcagccctattacctgaacctgatcgagctcttcctgcagagttcctatcagactgagattgggcagaccctggacctcctcacagccccccagggcaatgtggatcttgtcagattcactgaaaagaggtacaaatctattgtcaagtacaagacagctttctactccttctaccttcctatagctgcagccatgtacatggcaggaattgatggcgagaaggagcacgccaatgccaagaagatcctgctggagatgggggcaggtaagaaggcaggaggcagtagcagagaacaggcaccagcttcactcctcctctgcccaggaacctcatccttcctcttttgctgccctccccagttctttcagattcaggatgattaccttgacctctttggggaccccagtgtgaccggcaaaattggcactgacatccaggacaacaaatgcagctggctggtggttcagtgtctgcaacgggccactccagaacagtaccagatcctgaaggaaaattacgggcagaaggaggctgagaaagtggcccgggtgaaggcgctatatgaggagctggatctgccagcagtgttcttgcaatatgaggaagacagttacagccacattatggctctcattgaacagtacgcagcacccctgcccccagccgtctttctggggcttgcgcgcaaaatctacaagcggagaaagtgacctagagattgcaagggcggggagaggaggctctcaataaataatcgtgtaaccttaaaaaaaaaaaatcgggattctttgggggggaaaaagttgaaggcacggctactgttctgcccttttgacaggggaatcgcccaagagctatcgaccgactag

SEQ ID NO: 383181 - DNA, 1212 bp, Homo sapiens
aatacggctaggtacgaggctgggtgttaatcggccgaggggggagagcgggaactactcgacccacagagccgatcgcggagcggattctgcttttaggagtacccgccaacaagcgggaccgagcaggaatccgtatctgggaacagagccctttgctcctccctcagaatgaacggagaccagaattcagatgtttatgcccaagaaaagcaggatttcgttcagcacttctcccagatcgttagggtgctgactgaggatgagatggggcacccagagataggagatgctattgcccggctcaaggaggtcctggagtacaatgccattggaggcaagtataaccggggtttgacggtggtagtagcattccgggagctggtggagccaaggaaacaggatgctgatagtctccagcgggcctggactgtgggctggtgtgtggaactgctgcaagctttcttcctggtggcagatgacatcatggattcatcccttacccgccggggacagatctgctggtatcagaagccgggcgtgggtttggatgccatcaatgatgctaacctcctggaagcatgtatctaccgcctgctgaagctctattgccgggagcagccctattacctgaacctgatcgagctcttcctgcagagttcctatcagactgagattgggcagaccctggacctcctcacagccccccagggcaatgtggatcttgtcagattcactgaaaagaggtacaaatctattgtcaagtacaagacagctttctactccttctaccttcctatagctgcagccatgtacatggcaggaattgatggcgagaaggagcacgccaatgccaagaagatcctgctggagatgggggcaggacaacaaatgcagctggctggtggttcagtgtctgcaacgggccactccagaacagtaccagatcctgaaggaaaattacgggcagaaggaggctgagaaagtggcccgggtgaaggcgctatatgaggagctggatctgccagcagtgttcttgcaatatgaggaagacagttacagccacattatggctctcattgaacagtacgcagcacccctgcccccagccgtctttctggggcttgcgcgcaaaatctacaagcggagaaagtgacctagagattgcaagggcggggagaggaggctctcaataaataatcgtgtaacctt

SEQ ID NO: 383182 - DNA, 2074 bp, Homo sapiens
aatacggctaggtacgaggctgggtgttaatcggccgaggggggagagcgggaactactcgacccacagagccgatcgcggagcggattctgcttttaggagtacccgccaacaagcgggaccgagcaggaatccgtatctgggaacagagccctttgctcctccctcagaatgaacggagaccagaattcagatgtttatgcccaagaaaagcaggatttcgttcagcacttctcccagatcgttagggtgctgactgaggatgagatggggcacccagagataggagatgctattgcccggctcaaggaggtcctggagtacaatgccattggaggcaagtataaccggggtttgacggtggtagtagcattccgggagctggtggagccaaggaaacaggatgctgatagtctccagcgggcctggactgtgggctggtgtgtggaactgctgcaagctttcttcctggtggcagatgacatcatggattcatcccttacccgccggggacagatctgctggtatcagaagccgggcgtgggtttggatgccatcaatgatgctaacctcctggaagcatgtatctaccgcctgctgaagctctattgccgggagcagccctattacctgaacctgatcgagctcttcctgcagagttcctatcagactgagattgggcagaccctggacctcctcacagccccccagggcaatgtggatcttgtcagattcactgaaaagaggtacaaatctattgtcaagtacaagacagctttctactccttctaccttcctatagctgcagccatgtacatggtgagtgagcctcctcacccctctctgctctgctgatgggggcttttggacagcaaggcatagagcagaaaacgtgaacactgctacccctggtgaaaaactgtgtgaccttgagcaagtcggtctcgctcagtctctttcctcagctggggataaaattcctacttcacaggactgtaaagattaagcaaggcaagggatatgaaagtgcttagcacataataggggaacaatatatcctgtatctgagtatggataggagtgtggagatcatccaggttgagagggagaagagtggattaaagacagtcagtgggattaagtgtctaccctgaccttgcttctctacatttccttttcatcttgaaagaagttggaggtggcaaaaatattaggaaggtggatcagaatgacttggggactgacatttgtgagggaagagacaggctgtgcacctctagaatggattcatctcttttatgactcccaggaaggcctagccaaaaataagtgggattgaggttggaccatcagtcaggactgtctaggtcagggaagccaagatgtctgaagagagaggaaagatttggggctgcagtagggcaagaccccatgggaggaagcagccaggaagatgccggcacccctggggtttggcttattaacccccctttccctgcaggcaggaattgatggcgagaaggagcacgccaatgccaagaagatcctgctggagatgggggagttctttcagattcaggatgattaccttgacctctttggggaccccagtgtgaccggcaaaattggcactgacatccaggacaacaaatgcagctggctggtggttcagtgtctgcaacgggccactccagaacagtaccagatcctgaaggaaaattacgggcagaaggaggctgagaaagtggcccgggtgaaggcgctatatgaggagctggatctgccagcagtgttcttgcaatatgaggaagacagttacagccacattatggctctcattgaacagtacgcagcacccctgcccccagccgtctttctggggcttgcgcgcaaaatctacaagcggagaaagtgacctagagattgcaagggcggggagaggaggctctcaataaataatcgtgtaaccttaaaaaaaaaaaatcgggattctttgggggggaaaaagttgaaggcacggctactgttctgcccttttgacaggggaatcgcccaagagctatcgaccgactag

SEQ ID NO: 383183 - DNA, 1343 bp, Homo sapiens
aatacggctaggtacgaggctgggtgttaatcggccgaggggggagagcgggaactactcgacccacagagccgatcgcggagcggattctgcttttaggagtacccgccaacaagcgggaccgagcaggaatccgtatctgggaacagagccctttgctcctccctcagaatgaacggagaccagaattcagatgtttatgcccaagaaaagcaggatttcgttcagcacttctcccagatcgttagggtgctgactgaggatgagatggggcacccagagataggagatgctattgcccggctcaaggaggtcctggagtacaatgccattggaggcaagtataaccggggtttgacggtggtagtagcattccgggagctggtggagccaaggaaacaggatgctgatagtctccagcgggcctggactgtgggctggtgtgtggaactgctgcaagctttcttcctggtggcagatgacatcatggattcatcccttacccgccggggacagatctgctggtatcagaagccgggcgtgggtttggatgccatcaatgatgctaacctcctggaagcatgtatctaccgcctgctgaagctctattgccgggagcagccctattacctgaacctgatcgagctcttcctgcagagttcctatcagactgagattgggcagaccctggacctcctcacagccccccagggcaatgtggatcttgtcagattcactgaaaagttcctatagctgcagccatgtacatggcaggaattgatggcgagaaggagcacgccaatgccaagaagatcctgctggagatgggggagttctttcagattcaggatgattaccttgacctctttggggaccccagtgtgaccggcaaaattggcactgacatccaggacaacaaatgcagctggctggtggttcagtgtctgcaacgggccactccagaacagtaccagatcctgaaggaaaattacgggcagaaggaggctgagaaagtggcccgggtgaaggcgctatatgaggagctggatctgccagcagtgttcttgcaatatgaggaagacagttacagccacattatggctctcattgaacagtacgcagcacccctgcccccagccgtctttctggggcttgcgcgcaaaatctacaagcggagaaagtgacctagagattgcaagggcggggagaggaggctctcaataaataatcgtgtaaccttaaaaaaaaaaaatcgggattctttgggggggaaaaagttgaaggcacggctactgttctgcccttttgacaggggaatcgcccaagagctatcgaccgactag

SEQ ID NO: 383184 - DNA, 880 bp, Homo sapiens
aatacggctaggtacgaggctgggtgttaatcggccgaggggggagagcgggaactactcgacccacagagccgatcgcggagcggattctgcttttaggagtacccgccaacaagcgggaccgagcaggaatccgtatctgggaacagagccctttgctcctccctcagaatgaacggagaccagaattcagatgtttatgcccaagaaaagcaggatttcgttcagcacttctcccagatcgttagggtgctgactgaggatgagatggggcacccagagataggagatgctattgcccggctcaaggaggtcctggagtacaatgccattggaggcaagtataaccggggtttgacggtggtagtagcattccgggagctggtggagccaaggaaacaggatgctgatagtctccagcgggcctggactgtgggctggtgtgtggaactgctgcaagctttcttcctggtggcagatgacatcatggattcatcccttacccgccggggacagatctgctggtatcagaagccgggcgtgggtttggatgccatcaatgatgctaacctcctggaagcatgtatctaccgcctgctgaagctctattgccgggagcagccctattacctgaacctgatcgagctcttcctgcagagttcctatcagactgagattgggcagaccctggacctcctcacagccccccagggcaatgtggatcttgtcagattcactgaaaagaggtacaaatctattgtcaagtacaagacagctttctactccttctaccttcctatagctgcagccatgtacattggcaggaattgatggcgagaaggagcacgccaatgccaagaagatctgctggagatggggg

SEQ ID NO: 383185 - DNA, 2176 bp, Homo sapiens
aatacggctaggtacgaggctgggtgttaatcggccgaggggggagagcgggaactactcgacccacagagccgatcgcggagcggattctgcttttaggagtacccgccaacaagcgggaccgagcaggaatccgtatctgggaacagagccctttgctcctccctcagaatgaacggagaccagaattcagatgtttatgcccaagaaaagcaggatttcgttcagcacttctcccagatcgttagggtgctgactgaggatgagatggggcacccagagataggagatgctattgcccggctcaaggaggtcctggagtacaatgccattggaggcaagtataaccggggtttgacggtggtagtagcattccgggagctggtggagccaaggaaacaggatgctgatagtctccagcgggcctggactgtgggctggtgtgtggaactgctgcaagctttcttcctggtggcagatgacatcatggattcatcccttacccgccggggacagatctgctggtatcagaagccgggcgtgggtttggatgccatcaatgatgctaacctcctggaagcatgtatctaccgcctgctgaagctctattgccgggagcagccctattacctgaacctgatcgagctcttcctgcagagttcctatcagactgagattgggcagaccctggacctcctcacagccccccagggcaatgtggatcttgtcagattcactgaaaagaggtgaggggaggtgagggacagcgcgaaccatgtctggacagcgagggagggctcaggatgtgcattgccctcctgaggagtttctcttctccccttactcaggtacaaatctattgtcaagtacaagacagctttctactccttctaccttcctatagctgcagccatgtacatggtgagtgagcctcctcacccctctctgctctgctgatgggggcttttggacagcaaggcatagagcagaaaacgtgaacactgctacccctggtgaaaaactgtgtgaccttgagcaagtcggtctcgctcagtctctttcctcagctggggataaaattcctacttcacaggactgtaaagattaagcaaggcaagggatatgaaagtgcttagcacataataggggaacaatatatcctgtatctgagtatggataggagtgtggagatcatccaggttgagagggagaagagtggattaaagacagtcagtgggattaagtgtctaccctgaccttgcttctctacatttccttttcatcttgaaagaagttggaggtggcaaaaatattaggaaggtggatcagaatgacttggggactgacatttgtgagggaagagacaggctgtgcacctctagaatggattcatctcttttatgactcccaggaaggcctagccaaaaataagtgggattgaggttggaccatcagtcaggactgtctaggtcagggaagccaagatgtctgaagagagaggaaagatttggggctgcagtagggcaagaccccatgggaggaagcagccaggaagatgccggcacccctggggtttggcttattaacccccctttccctgcaggcaggaattgatggcgagaaggagcacgccaatgccaagaagatcctgctggagatgggggagttctttcagattcaggatgattaccttgacctctttggggaccccagtgtgaccggcaaaattggcactgacatccaggacaacaaatgcagctggctggtggttcagtgtctgcaacgggccactccagaacagtaccagatcctgaaggaaaattacgggcagaaggaggctgagaaagtggcccgggtgaaggcgctatatgaggagctggatctgccagcagtgttcttgcaatatgaggaagacagttacagccacattatggctctcattgaacagtacgcagcacccctgcccccagccgtctttctggggcttgcgcgcaaaatctacaagcggagaaagtgacctagagattgcaagggcggggagaggaggctctcaataaataatcgtgtaaccttaaaaaaaaaaaatcgggattctttgggggggaaaaagttgaaggcacggctactgttctgcccttttgacaggggaatcgcccaagagctatcgaccgactag

SEQ ID NO: 383186 - DNA, 855 bp, Homo sapiens
aatacggctaggtacgaggctgggtgttaatcggccgaggggggagagcgggaactactcgacccacagagccgatcgcggagcggattctgcttttaggagtacccgccaacaagcgggaccgagcaggaatccgtatctgggaacagagccctttgctcctccctcagaatgaacggagaccagaattcagatgtttatgcccaagaaaagcaggatttcgttcagcacttctcccagatcgttagggtgctgactgaggatgagatggggcacccagagataggagatgctattgcccggctcaaggaggtcctggagtacaatgccattggaggcaagtataaccggggtttgacggtggtagtagcattccgggagctggtggagccaaggaaacaggatgctgatagtctccagcgggcctggactgtgggctggtgtgtggaactgctgcaagctttcttcctggtggcagatgacatcatggattcatcccttacccgccggggacagatctgctggtatcagaagccgggcgtgggtttggatgccatcaatgatgctaacctcctggaagcatgtatctaccgcctgctgaagctctattgccgggagcagccctattacctgaacctgatcgagctcttcctgcagagttcctatcagactgagattgggcagaccctggacctcctcacagccccccagggcaatgtggatcttgtcagattcactgaaaagaggtacaaatctattgtcaagtacaagacagctttctactccttctacctggcaggaattgatggcgagaaggagcacgccaatgccaagaagatctgctggagatggggg

SEQ ID NO: 383187 - DNA, 1479 bp, Homo sapiens
aatacggctaggtacgaggctgggtgttaatcggccgaggggggagagcgggaactactcgacccacagagccgatcgcggagcggattctgcttttaggagtacccgccaacaagcgggaccgagcaggaatccgtatctgggaacagagccctttgctcctccctcagaatgaacggagaccagaattcagatgtttatgcccaagaaaagcaggatttcgttcagcacttctcccagatcgttagggtgctgactgaggatgagatggggcacccagagataggagatgctattgcccggctcaaggaggtcctggagtacaatgccattggaggcaagtataaccggggtttgacggtggtagtagcattccgggagctggtggagccaaggaaacaggatgctgatagtctccagcgggcctggactgtgggctggtgtgtggaactgctgcaagctttcttcctggtggcagatgacatcatggattcatcccttacccgccggggacagatctgctggtatcagaagccgggcgtgggtttggatgccatcaatgatgctaacctcctggaagcatgtatctaccgcctgctgaagctctattgccgggagcagccctattacctgaacctgatcgagctcttcctgcaggtgtattgcagacagggcccgatgcccagagggtgcccatggtagccttggcctctataggacatgctcatctagctggtttcagagagttcctatcagactgagattgggcagaccctggacctcctcacagccccccagggcaatgtggatcttgtcagattcactgaaaagaggtacaaatctattgtcaagtacaagacagctttctactccttctaccttcctatagctgcagccatgtacatggcaggaattgatggcgagaaggagcacgccaatgccaagaagatcctgctggagatgggggagttctttcagattcaggatgattaccttgacctctttggggaccccagtgtgaccggcaaaattggcactgacatccaggacaacaaatgcagctggctggtggttcagtgtctgcaacgggccactccagaacagtaccagatcctgaaggaaaattacgggcagaaggaggctgagaaagtggcccgggtgaaggcgctatatgaggagctggatctgccagcagtgttcttgcaatatgaggaagacagttacagccacattatggctctcattgaacagtacgcagcacccctgcccccagccgtctttctggggcttgcgcgcaaaatctacaagcggagaaagtgacctagagattgcaagggcggggagaggaggctctcaataaataatcgtgtaaccttaaaaaaaaaaaatcgggattctttgggggggaaaaagttgaaggcacggctactgttctgcccttttgacaggggaatcgcccaagagctatcgaccgactag

SEQ ID NO: 383188 - DNA, 1765 bp, Homo sapiens
aatacggctaggtacgaggctgggtgttaatcggccgaggggggagagcgggaactactcgacccacagagccgatcgcggagcggattctgcttttaggagtacccgccaacaagcgggaccgagcaggaatccgtatctgggaacagagccctttgctcctccctcagaatgaacggagaccagaattcagatgtttatgcccaagaaaagcaggatttcgttcagcacttctcccagatcgttagggtgctgactgaggatgagatggggcacccagagataggagatgctattgcccggctcaaggaggtcctggagtacaatgccattggaggcaagtataaccggggtttgacggtggtagtagcattccgggagctggtggagccaaggaaacaggatgctgatagtctccagcgggcctggactgtgggctggtgtgtggaactgctgcaagctttcttcctggtggcagatgacatcatggattcatcccttacccgccggggacagatctgctggtatcagaagccgggcgtgggtttggatgccatcaatgatgctaacctcctggaagcatgtatctaccgcctgctgaagctctattgccgggagcagccctattacctgaacctgatcgagctcttcctgcaggtgtattgcagacagggcccgatgcccagagggtgcccatggtagccttggcctctataggacatgctcatctagctggtttcagggtacaggattgcagcgtgcctggaagggaaagaaagcgaggaagggtgttgggaagtggggttgtggtagtggcaagaaagggcttctctgtcctgtgtaattggaagaaagggtgataaaggactgtgtgtatgaatatgggccttaagttttggggctttctccccttctgttgcctttctgattctgcccagttgtcagctggtatgggatgttgggcttgggataccagggtttcgcatatctggagaaagcctggctcatggaccgtctttgtcttgcttagagttcctatcagactgagattgggcagaccctggacctcctcacagccccccagggcaatgtggatcttgtcagattcactgaaaagaggtacaaatctattgtcaagtacaagacagctttctactccttctaccttcctatagctgcagccatgtacatggcaggaattgatggcgagaaggagcacgccaatgccaagaagatcctgctggagatgggggagttctttcagattcaggatgattaccttgacctctttggggaccccagtgtgaccggcaaaattggcactgacatccaggacaacaaatgcagctggctggtggttcagtgtctgcaacgggccactccagaacagtaccagatcctgaaggaaaattacgggcagaaggaggctgagaaagtggcccgggtgaaggcgctatatgaggagctggatctgccagcagtgttcttgcaatatgaggaagacagttacagccacattatggctctcattgaacagtacgcagcacccctgcccccagccgtctttctggggcttgcgcgcaaaatctacaagcggagaaagtgacctagagattgcaagggcggggagaggaggctctcaataaataatcgtgtaaccttaaaaaaaaaaaatcgggattctttgggggggaaaaagttgaaggcacggctactgttctgcccttttgacaggggaatcgcccaagagctatcgaccgactag

SEQ ID NO: 383189 - DNA, 1392 bp, Homo sapiens
aatacggctaggtacgaggctgggtgttaatcggccgaggggggagagcgggaactactcgacccacagagccgatcgcggagcggattctgcttttaggagtacccgccaacaagcgggaccgagcaggaatccgtatctgggaacagagccctttgctcctccctcagaatgaacggagaccagaattcagatgtttatgcccaagaaaagcaggatttcgttcagcacttctcccagatcgttagggtgctgactgaggatgagatggggcacccagagataggagatgctattgcccggctcaaggaggtcctggagtacaatgccattggaggcaagtataaccggggtttgacggtggtagtagcattccgggagctggtggagccaaggaaacaggatgctgatagtctccagcgggcctggactgtgggctggtgtgtggaactgctgcaagctttcttcctggtggcagatgacatcatggattcatcccttacccgccggggacagatctgctggtatcagaagccgggcgtgggtttggatgccatcaatgatgctaacctcctggaagcatgtatctaccgcctgctgaagctctattgccgggagcagccctattacctgaacctgatcgagctcttcctgcagagttcctatcagactgagattgggcagaccctggacctcctcacagccccccagggcaatgtggatcttgtcagattcactgaaaagaggtgaggggaggtgagggacagcgcgaaccatgtctggacagcgagggagggctcaggatgtgcattgccctcctgaggagtttctcttctccccttactcaggtacaaatctattgtcaagtacaagacagctttctactccttctaccttcctatagctgcagccatgtacatggcaggaattgatggcgagaaggagcacgccaatgccaagaagatcctgctggagatgggggagttctttcagattcaggatgattaccttgacctctttggggaccccagtgtgaccggcgattattggcactgacatccaggacaacaaatgcagctggctggtggttcagtgtctgcaacgggccactccagaacagtaccagatcctgaaggaaaattacgggcagaaggaggctgagaaagtggcccgggtgaaggcgctatatgaggagctggatctgccagcagtgttcttgcaatatgaggaagacagttacagccacattatggctctcattgaacagtacgcagcacccctgcccccagccgtctttctggggcttgcgcgcaaaatctacaagcggagaaagtgacctagagattgcaagggcggggagaggaggctctcaataaataatcgtgtaacctt

SEQ ID NO: 383190 - DNA, 1561 bp, Homo sapiens
taaaagtctatatttttatattggggggagggagtagaaaagcaagcccctatactgggccctattcagtggcagcttcttgttccataggattaaggaagactctgaggaaataaaagttgtttggaaaaatccaggtgtagttgctttgtatgttgtgatgggtagaagggatgaagtgaagtgtgaaggcccctcataccctccatcttgcctcagactatgtcctggaaccctggggcggagaaagcgccactttcattcctgcttcttgggattgttgacggccacgtagtgatagagaacgacaagcaagaagagcgacacgcccagcatgttggcgaagatggcgagctgcacgtccgtgatcatcctgaccagtccggctcggctccgacgccaccagcgaacctgggaacagagccctttgctcctccctcagaatgaacggagaccagaattcagatgtttatgcccaagaaaagcaggatttcgttcagcacttctcccagatcgttagggtgctgactgaggatgagatggggcacccagagataggagatgctattgcccggctcaaggaggtcctggagtacaatgccattggaggcaagtataaccggggtttgacggtggtagtagcattccgggagctggtggagccaaggaaacaggatgctgatagtctccagcgggcctggactgtgggctggtgtgtggaactgctgcaagctttcttcctggtggcagatgacatcatggattcatcccttacccgccggggacagatctgctggtatcagaagccgggcgtgggtttggatgccatcaatgatgctaacctcctggaagcatgtatctaccgcctgctgaagctctattgccgggagcagccctattacctgaacctgatcgagctcttcctgcagagttcctatcagactgagattgggcagaccctggacctcctcacagccccccagggcaatgtggatcttgtcagattcactgaaaagaggtacaaatctattgtcaagtacaagacagctttctactccttctaccttcctatagctgcagccatgtacatggcaggaattgatggcgagaaggagcacgccaatgccaagaagatcctgctggagatgggggagttctttcagattcaggatgattaccttgacctctttggggaccccagtgtgaccggcaaaattggcactgacatccaggacaacaaatgcagctggctggtggttcagtgtctgcaacgggccactccagaacagtaccagatcctgaaggaaaattacgggcagaaggaggctgagaaagtggcccgggtgaaggcgctatatgaggagctggatctgccagcagtgttcttgcaatatgaggaagacagttacagccacattatggctctcattgaacagtacgcagcacccctgcccccagccgtctttctggggcttgcgcgcaaaatctacaagcggagaaagtgacctagagattgcaagggcggggagaggaggctctcaataaataatcgtgtaacctt

SEQ ID NO: 383191 - DNA, 913 bp, Homo sapiens
tctgtgccccgccgggcggggacgtgggagccgcggacaagcccaaggccggagcggttccaggaggaccctggtctgcacctgtggttgccaggtaggtggatgtgagagaccctacccttctggttctctagaagccatcccatcgccgctagcatcatgctgtcccctcagagagctttactctgcaacctcaaccacatccacctccagcacgtctccctgggcctgcacttgtcccgccgtcctgagctacaggaggggcctttgagcacaccccctcctccaggagacactgggggcaaggagagcaggggcccctgcagtggcaccctggtggacgccaattccaacagcccagctgtgccctgccggtgctgccaggagcacggtccgggcctagaaaaccggcaggacccgtcacaggaggaagagggggctgcctctccctcagacccaggctgctcctcctcactcagctcctgctcagatcttagccccgatgagtcccctgtctcagtctacttgcgggacctccctggtgatgaggatgcccaccctcagcccagtatcatccccctggagcagggctccccactggcttcagcaggccctggcacctgctcaccggacagcttctgctgctctcctgattcctgctccggagcttcttcttcacccgatcctggcctggactcgaactgcaacgccctgaccacctgccaggacgtcccttccccaggcttggaggaagaggacgagagggcggagcaggatctccctacctctgagctcttagaggcggatgatgggaaaatcgacgctgggaaaacggagcccagttggaagattaacccaatttggaaaattgacacagagaaaactaaagctgaatggaaaaccactgaaaaca

SEQ ID NO: 383192 - DNA, 801 bp, Homo sapiens
  misc_feature (740)..(740): n is a, c, g, or t
tggtacggtcggagtattgggatggagcggattctgcttttaggagtacccgccaacaagcgggaccgagcaggaatccgtatctgggaacagagccctttgctcctccctcagaatgaacggagaccagaattcagatgtttatgcccaagaaaagcaggatttcgttcagcacttctcccagatcgttagggtgctgactgaggatgagatggggcacccagagataggagatgctattgcccggctcaaggaggtcctggagtacaatgccattggaggcaagtataaccggggtttgacggtggtagtagcattccgggagctggtggagccaaggaaacaggatgctgatagtctccagcgggcctggactgtgggctggtgtgtggaactgctgcaagctttcttcctggtggcagatgacatcatggattcatcccttacccgccggggacagatctgctggtatcagaagccgggcgtgggtttggatgccatcaatgatgctaacctcctggaagcatgtatctaccgcctgctgaagctctattgccgggagcagccctattacctgaacctgatcgagctcttcctgcagagttcctatcagactgagattgggcagaccctggacctcctcacagccccccagggcaatgtggatcttgtcagattcactgaaaagaggtacaaatctattgtcaagtacaagacagctttctactccttctaccttnctatagctgaaccctgacataggaagaattattgcgaaaagacccccccatcccaaccccc

SEQ ID NO: 383193 - DNA, 1720 bp, Homo sapiens
  misc_feature (1301)..(1301): n is a, c, g, or t
  misc_feature (1304)..(1304): n is a, c, g, or t
  misc_feature (1312)..(1313): n is a, c, g, or t
  misc_feature (1316)..(1316): n is a, c, g, or t
  misc_feature (1319)..(1319): n is a, c, g, or t
  misc_feature (1322)..(1322): n is a, c, g, or t
aatacggctaggtacgaggctgggtgttaatcggccgaggggggagagcgggaactactcgacccacagagccgatcgcggagcggattctgcttttaggagtacccgccaacaagcgggaccgagcaggaatccgtatctgggaacagagccctttgctcctccctcagaatgaacggagaccagaattcagatgtttatgcccaagaaaagcaggatttcgttcagcacttctcccagatcgttagggtgctgactgaggatgagatggggcacccagagataggagatgctattgcccggctcaaggaggtcctggagtacaatgccattggaggcaagtataaccggggtttgacggtggtagtagcattccgggagctggtggagccaaggaaacaggatgctgatagtctccagcgggcctggactgtgggctggtgtgtggaactgctgcaagctttcttcctggtggcagatgacatcatggattcatcccttacccgccggggacagatctgctggtatcagaagccgggcgtgggtttggatgccatcaatgatgctaacctcctggaagcatgtatctaccgcctgctgaagctctattgccgggagcagccctattacctgaacctgatcgagctcttcctgcagagttcctatcagactgagattgggcagaccctggacctcctcacagccccccagggcaatgtggatcttgtcagattcactgaaaagaggtacaaatctattgtcaagtacaagacagctttctactccttctaccttcctatagctgcagccatgtacatggcaggaattgatggcgagaaggagcacgccaatgccaagaagatcctgctggagatgggggagttctttcagattcaggatgattaccttgacctctttggggaccccagtgtgaccggcaaaattggcactgacatccaggacaacaaatgcagctggctggtggttcagtgtctgcaacgggccactccagaacagtaccagatcctgaaggaaaattacgggcagaaggaggctgagaaagtggcccgggtgaaggcgctatatgaggagctggatctgccagcagtgttcttgcaatatgaggaagacagttacagccacattatggctctcattgaacagtacgcagcacccctgcccccagccgtctttctggggcttgcgcgcaaaatctacaagcggagaaagtgacctagagattgcaagggcggggagaggaggctctcaataaataatcgtgtaaccttaaaaaaaaaaanaanaaaaaaannaanaanaanaaggataaaaaaatctaaaaattgagggggtgccccgctacccactttgccctatatagaaatagattacaatgcaatgggcgaacaattacaccttgggggactccaaaacccatatttttgcaaaatggagtcgctttgcaattaacgtggcctttctgtaacatggcgtaatatggaaaaacccggggtttcccgaccctatcaccagtggggcaaaaccgacttttataatggttaattaataagctttagcgcctccgtacgaaactcccctttaaaacaattggacaaccaggatttggcataggccaatattgtggcgttaatcttttggctaaatcggcctaacaattgtccaagaagagtttatttttaaataacacgcggaaaaaggg

SEQ ID NO: 383194 - DNA, 1368 bp, Homo sapiens
aatacggctaggtacgaggctgggtgttaatcggccgaggggggagagcgggaactactcgacccacagagccgatcgcggagcggattctgcttttaggagtacccgccaacaagcgggaccgagcaggaatccgtatctgggaacagagccctttgctcctccctcagaatgaacggagaccagaattcagatgtttatgcccaagaaaagcaggatttcgttcagcacttctcccagatcgttagggtgctgactgaggatgagatggggcacccagagataggagatgctattgcccggctcaaggaggtcctggagtacaatgccattggaggcaagtataaccggggtttgacggtggtagtagcattccgggagctggtggagccaaggaaacaggatgctgatagtctccagcgggcctggactgtgggctggtgtgtggaactgctgcaagctttcttcctggtggcagatgacatcatggattcatcccttacccgccggggacagatctgctggtatcagaagccgggcgtgggtttggatgccatcaatgatgctaacctcctggaagcatgtatctaccgcctgctgaagctctattgccgggagcagccctattacctgaacctgatcgagctcttcctgcagagttcctatcagactgagattgggcagaccctggacctcctcacagccccccagggcaatgtggatcttgtcagattcactgaaaagaggtacaaatctattgtcaagtacaagacagctttctactccttctaccttcctatagctgcagccatgtacatggcaggaattgatggcgagaaggagcacgccaatgccaagaagatcctgctggagatgggggagttctttcagattcaggatgattaccttgacctctttggggaccccagtgtgaccggcaaaattggcactgacatccaggacaacaaatgcagctggctggtggttcagtgtctgcaacgggccactccagaacagtaccagatcctgaaggaaaattacgggcagaaggaggctgagaaagtggcccgggtgaaggcgctatatgaggagctggatctgccagcagtgttcttgcaatatgaggaagacagttacagccacattatggctctcattgaacagtacgcagcacccctgcccccagccgtctttctggggcttgcgcgcaaaatctacaagcggagaaagtgacctagagattgcaagggcggggagaggaggctctcaataaataatcgtgtaaccttcaaaaaacacacacatttcacccacaacaaaacgaaacagacaaaaaaacttttttgggcccctctgggccccgggaac

SEQ ID NO: 383195 - DNA, 1297 bp, Homo sapiens
aatacggctaggtacgaggctgggtgttaatcggccgaggggggagagcgggaactactcgacccacagagccgatcgcggagcggattctgcttttaggagtacccgccaacaagcgggaccgagcaggaatccgtatctgggaacagagccctttgctcctccctcagaatgaacggagaccagaattcagatgtttatgcccaagaaaagcaggatttcgttcagcacttctcccagatcgttagggtgctgactgaggatgagatggggcacccagagataggagatgctattgcccggctcaaggaggtcctggagtacaatgccattggaggcaagtataaccggggtttgacggtggtagtagcattccgggagctggtggagccaaggaaacaggatgctgatagtctccagcgggcctggactgtgggctggtgtgtggaactgctgcaagctttcttcctggtggcagatgacatcatggattcatcccttacccgccggggacagatctgctggtatcagaagccgggcgtgggtttggatgccatcaatgatgctaacctcctggaagcatgtatctaccgcctgctgaagctctattgccgggagcagccctattacctgaacctgatcgagctcttcctgcagagttcctatcagactgagattgggcagaccctggacctcctcacagccccccagggcaatgtggatcttgtcagattcactgaaaagaggtacaaatctattgtcaagtacaagacagctttctactccttctaccttcctatagctgcagccatgtacatggcaggaattgatggcgagaaggagcacgccaatgccaagaagatcctgctggagatgggggagttctttcagattcaggatgattaccttgacctctttggggaccccagtgtgaccggcaaaattggcactgacatccaggacaacaaatgcagctggctggtggttcagtgtctgcaacgggccactccagaacagtaccagatcctgaaggaaaattacgggcagaaggaggctgagaaagtggcccgggtgaaggcgctatatgaggagctggatctgccagcagtgttcttgcaatatgaggaagacagttacagccacattatggctctcattgaacagtacgcagcacccctgcccccagccgtctttctggggcttgcgcgcaaaatccaccaccgccaccccttccttggtgagggtatcccctgtgtgtgccggctctctataatttatcggcgcacccccaaaaaaa

SEQ ID NO: 383196 - DNA, 1192 bp, Homo sapiens
aatacggctaggtacgaggctgggtgttaatcggccgaggggggagagcgggaactactcgacccacagagccgatcgcggagcggattctgcttttaggagtacccgccaacaagcgggaccgagcaggaatccgtatctgggaacagagccctttgctcctccctcagaatgaacggagaccagaattcagatgtttatgcccaagaaaagcaggatttcgttcagcacttctcccagatcgttagggtgctgactgaggatgagatggggcacccagagataggagatgctattgcccggctcaaggaggtcctggagtacaatgccattggaggcaagtataaccggggtttgacggtggtagtagcattccgggagctggtggagccaaggaaacaggatgctgatagtctccagcgggcctggactgtgggctggtgtgtggaactgctgcaagctttcttcctggtggcagatgacatcatggattcatcccttacccgccggggacagatctgctggtatcagaagccgggcgtgggtttggatgccatcaatgatgctaacctcctggaagcatgtatctaccgcctgctgaagctctattgccgggagcagccctattacctgaacctgatcgagctcttcctgcagagttcctatcagactgagattgggcagaccctggacctcctcacagccccccagggcaatgtggatcttgtcagattcactgaaaagaggtacaaatctattgtcaagtacaagacagctttctactccttctaccttcctatagctgcagccatgtacatggcaggaattgatggcgagaaggagcacgccaatgccaagaagatcctgctggagatgggggagttctttcagattcaggatgattaccttgacctctttggggaccccagtgtgaccggcaaaattggcactgacatccaggacaacaaatgcagctggctggtggttcagtgtctgcaacgggccactccagaacagtaccagatcctgaaggaaaattacgggcagaaggaggctgagaaagtggcccgggtgacttgtatcatcagttgttagtatttgttttagctggggaggcagctggagcatgaagtcaacaggaacaatgatgatctgcagggaggaaagccctaggatggcgggatattaccat

SEQ ID NO: 383197 - DNA, 1107 bp, Homo sapiens
  misc_feature (1031)..(1031): n is a, c, g, or t
  misc_feature (1036)..(1036): n is a, c, g, or t
aatacggctaggtacgaggctgggtgttaatcggccgaggggggagagcgggaactactcgacccacagagccgatcgcggagcggattctgcttttaggagtacccgccaacaagcgggaccgagcaggaatccgtatctgggaacagagccctttgctcctccctcagaatgaacggagaccagaattcagatgtttatgcccaagaaaagcaggatttcgttcagcacttctcccagatcgttagggtgctgactgaggatgagatggggcacccagagataggagatgctattgcccggctcaaggaggtcctggagtacaatgccattggaggcaagtataaccggggtttgacggtggtagtagcattccgggagctggtggagccaaggaaacaggatgctgatagtctccagcgggcctggactgtgggctggtgtgtggaactgctgcaagctttcttcctggtggcagatgacatcatggattcatcccttacccgccggggacagatctgctggtatcagaagccgggcgtgggtttggatgccatcaatgatgctaacctcctggaagcatgtatctaccgcctgctgaagctctattgccgggagcagccctattacctgaacctgatcgagctcttcctgcagagttcctatcagactgagattgggcagaccctggacctcctcacagccccccagggcaatgtggatcttgtcagattcactgaaaagaggtacaaatctattgtcaagtacaagacagctttctactccttctaccttcctatagctgcagccatgtacatggcaggaattgatggcgagaaggagcacgccaatgccaagaagatcctgctggagatgggggagttctttcagattcaggatgattaccttgacctctttggggaccccagtgtgaccggcaaaattggcactgacatccaggacacaaatgcagctggtggtggtcagtgtccgcagggccctccgaacgtccgatcctggggaatcggcgnagggngggaaaaggcggggaagggcaaagagaggggagcacccagggtgtgccattgggaagacccccatgggcca

SEQ ID NO: 383198 - DNA, 1290 bp, Homo sapiens
aatacggctaggtacgaggctgggtgttaatcggccgaggggggagagcgggaactactcgacccacagagccgatcgcggagcggattctgcttttaggagtacccgccaacaagcgggaccgagcaggaatccgtatctgggaacagagccctttgctcctccctcagaatgaacggagaccagaattcagatgtttatgcccaagaaaagcaggatttcgttcagcacttctcccagatcgttagggtgctgactgaggatgagatggggcacccagagataggagatgctattgcccggctcaaggaggtcctggagtacaatgccattggaggcaagtataaccggggtttgacggtggtagtagcattccgggagctggtggagccaaggaaacaggatgctgatagtctccagcgggcctggactgtgggctggtgtgtggaactgctgcaagctttcttcctggtggcagatgacatcatggattcatcccttacccgccggggacagatctgctggtatcagaagccgggcgtgggtttggatgccatcaatgatgctaacctcctggaagcatgtatctaccgcctgctgaagctctattgccgggagcagccctattacctgaacctgatcgagctcttcctgcagagttcctatcagactgagattgggcagaccctggacctcctcacagccccccagggcaatgtggatcttgtcagattcactgaaaagaggtacaaatctattgtcaagtacaagacagctttctactccttctaccttcctatagctgcagccatgtacatggcaggaattgatggcgagaaggagcacgccaatgccaagaagatcctgctggagatgggggagttctttcagattcaggatgattaccttgacctctttggggaccccagtgtgaccggcgattattggcactgacatccaggacaacaaatgcagctggctggtggttcagtgtctgcaacgggccactccagaacagtaccagatcctgaaggaaaattacgggcagaaggaggctgagaaagtggcccgggtgaaggcgctatatgaggagctggatctgccagcagtgttcttgcaatatgaggaagacagttacagccacattatggctctcattgaacagtacgcagcacccctgcccccagccgtctttctggggcttgcgcgcaaaatctacaagcggagaaagtgacctagagattgcaagggcggggagaggaggctctcaataaataatcgtgtaacctt

SEQ ID NO: 383199 - DNA, 1148 bp, Homo sapiens
aatacggctaggtacgaggctgggtgttaatcggccgaggggggagagcgggaactactcgacccacagagccgatcgcggagcggattctgcttttaggagtacccgccaacaagcgggaccgagcaggaatccgtatctgggaacagagccctttgctcctccctcagaatgaacggagaccagaattcagatgtttatgcccaagaaaagcaggatttcgttcagcacttctcccagatcgttagggtgctgactgaggatgagatggggcacccagagataggagatgctattgcccggctcaaggaggtcctggagtacaatgccattggaggcaagtataaccggggtttgacggtggtagtagcattccgggagctggtggagccaaggaaacaggatgctgatagtctccagcgggcctggactgtgggctggtgtgtggaactgctgcaagctttcttcctggtggcagatgacatcatggattcatcccttacccgccggggacagatctgctggtatcagaagccgggcgtgggtttggatgccatcaatgatgctaacctcctggaagcatgtatctaccgcctgctgaagctctattgccgggagcagccctattacctgaacctgatcgagctcttcctgcagagttcctatcagactgagattgggcagaccctggacctcctcacagccccccagggcaatgtggatcttgtcagattcactgaaaagaggtacaaatctattgtcaagtacaagacagctttctactccttctaccttcctatagctgcagccatgtacatggcaggaattgatggcgagaaggagcacgccaatgccaagaagatcctgctggagatgggggagttctttcagattcaggatgattaccttgacctctttggggaccccagtgtgaaggcgctatatgaggagctggatctgccagcagtgttcttgcaatatgaggaagacagttacagccacattatggctctcattgaacagtacgcagcacccctgcccccagccgtctttctggggcttgcgcgcaaaatctacaagcggagaaagtgacctagagattgcaagggcggggagaggaggctctcaataaataatcgtgtaacctt

SEQ ID NO: 383200 - DNA, 1291 bp, Homo sapiens
aatacggctaggtacgaggctgggtgttaatcggccgaggggggagagcgggaactactcgacccacagagccgatcgcggagcggattctgcttttaggagtacccgccaacaagcgggaccgagcaggaatccgtatctgggaacagagccctttgctcctccctcagaatgaacggagaccagaattcagatgtttatgcccaagaaaagcaggatttcgttcagcacttctcccagatcgttagggtgctgactgaggatgagatggggcacccagagataggagatgctattgcccggctcaaggaggtcctggagtacaatgccattggaggcaagtataaccggggtttgacggtggtagtagcattccgggagctggtggagccaaggaaacaggatgctgatagtctccagcgggcctggactgtgggctggtgtgtggaactgctgcaagctttcttcctggtggcagatgacatcatggattcatcccttacccgccggggacagatctgctggtatcagaagccgggcgtgggtttggatgccatcaatgatgctaacctcctggaagcatgtatctaccgcctgctgaagctctattgccgggagcagccctattacctgaacctgatcgagctcttcctgcagagttcctatcagactgagattgggcagaccctggacctcctcacagccccccagggcaatgtggatcttgtcagattcactgaaaagaggtacaaatctattgtcaagtacaagacagctttctactccttctaccttcctatagctgcagccatgtacatggcaggaattgatggcgagaaggagcacgccaatgccaagaagatcctgctggagatgggggagagttcctatcagactgagaatgggcagaccctggacctcctcacaacgccccagccggcaaaattggcactgacatccaggacaacaaatgcagctggctggtggttcagtgtctgcaacgggccactccagaacagtaccagatcctgaaggaaaattacgggcagaaggaggctgagaaagtggcccgggtgaaggcgctatatgaggagctggatctgccagcagtgttcttgcaatatgaggaagacagttacagccacattatggctctcattgaacagtacgcagcacccctgcccccagccgtctttctggggcttgcgcgcaaaatctacaagcggagaaagtgacctagagattgcaagggcggggagaggaggctctcaataaataatcgtgtaacctt

SEQ ID NO: 383201 - DNA, 1139 bp, Homo sapiens
aatacggctaggtacgaggctgggtgttaatcggccgaggggggagagcgggaactactcgacccacagagccgatcgcggagcggattctgcttttaggagtacccgccaacaagcgggaccgagcaggaatccgtatctgggaacagagccctttgctcctccctcagaatgaacggagaccagaattcagatgtttatgcccaagaaaagcaggatttcgttcagcacttctcccagatcgttagggtgctgactgaggatgagatggggcacccagagataggagatgctattgcccggctcaaggaggtcctggagtacaatgccattggaggcaagtataaccggggtttgacggtggtagtagcattccgggagctggtggagccaaggaaacaggatgctgatagtctccagcgggcctggactgtgggctggtgtgtggaactgctgcaagctttcttcctggtggcagatgacatcatggattcatcccttacccgccggggacagatctgctggtatcagaagccgggcgtgggtttggatgccatcaatgatgctaacctcctggaagcatgtatctaccgcctgctgaagctctattgccgggagcagccctattacctgaacctgatcgagctcttcctgcagagttcctatcagactgagattgggcagaccctggacctcctcacagccccccagggcaatgtggatcttgtcagattcactgaaaagaggtacaaatctattgtcaagtacaagacagctttctactccttctaccttcctatagctgcagccatgtacatggcaggaattgatggcgagaaggagcacgccaatgccaagaagatcctgctggagatgggggaggaaaattacgggcagaaggaggctgagaaagtggcccgggtgaaggcgctatatgaggagctggatctgccagcagtgttcttgcaatatgaggaagacagttacagccacattatggctctcattgaacagtacgcagcacccctgcccccagccgtctttctggggcttgcgcgcaaaatctacaagcggagaaagtgacctagagattgcaagggcggggagaggaggctctcaataaataatcgtgtaacctt

SEQ ID NO: 383202 - DNA, 1105 bp, Homo sapiens
  misc_feature (875)..(875): n is a, c, g, or t
aatacggctaggtacgaggctgggtgttaatcggccgaggggggagagcgggaactactcgacccacagagccgatcgcggagcggattctgcttttaggagtacccgccaacaagcgggaccgagcaggaatccgtatctgggaacagagccctttgctcctccctcagaatgaacggagaccagaattcagatgtttatgcccaagaaaagcaggatttcgttcagcacttctcccagatcgttagggtgctgactgaggatgagatggggcacccagagataggagatgctattgcccggctcaaggaggtcctggagtacaatgccattggaggcaagtataaccggggtttgacggtggtagtagcattccgggagctggtggagccaaggaaacaggatgctgatagtctccagcgggcctggactgtgggctggtgtgtggaactgctgcaagctttcttcctggtggcagatgacatcatggattcatcccttacccgccggggacagatctgctggtatcagaagccgggcgtgggtttggatgccatcaatgatgctaacctcctggaagcatgtatctaccgcctgctgaagctctattgccgggagcagccctattacctgaacctgatcgagctcttcctgcagagttcctatcagactgagattgggcagaccctggacctcctcacagccccccagggcaatgtggatcttgtcagattcactgaaaagaggtacaaatctattgtcaagtacaagacagctttctactccttctaccttcctatagctgcagccatgtacatggcaggaattgatggcgagaaggagcacgcaatgcagaaacctgtggaaagggggantcttcagatcaggatgatacctgtacttttggggcccagtgtgccggcattgcgctgctcagaacaaatgcgtgctggggtcaatgtggagggctcaaggacatctgtgaatcggcagagcgcgaaggcgggagccatagggtcgcccgtctcgagagggtcctgttctatgccgcccttggcataacacaggggggtaaaaaagggaggcgcgtatacttatcgtagac

SEQ ID NO: 383203 - DNA, 1110 bp, Homo sapiens
aatacggctaggtacgaggctgggtgttaatcggccgaggggggagagcgggaactactcgacccacagagccgatcgcggagcggattctgcttttaggagtacccgccaacaagcgggaccgagcaggaatccgtatctgggaacagagccctttgctcctccctcagaatgaacggagaccagaattcagatgtttatgcccaagaaaagcaggatttcgttcagcacttctcccagatcgttagggtgctgactgaggatgagatggggcacccagagataggagatgctattgcccggctcaaggaggtcctggagtacaatgccattggaggcaagtataaccggggtttgacggtggtagtagcattccgggagctggtggagccaaggaaacaggatgctgatagtctccagcgggcctggactgtgggctggtgtgtggaactgctgcaagctttcttcctggtggcagatgacatcatggattcatcccttacccgccggggacagatctgctggtatcagaagccgggcgtgggtttggatgccatcaatgatgctaacctcctggaagcatgtatctaccgcctgctgaagctctattgccgggagcagccctattacctgaacctgatcgagctcttcctgcagagttcctatcagactgagattgggcagaccctggacctcctcacagccccccagggcaatgtggatcttgtcagattcactgaaaagaggtacaaatctattgtcaagtacaagacagctttctactccttctaccttcctatagctgcagccatgtacatggcaggaattgatggcgagaaggagcacgccaatgtcaaggtaatcatcctgaataccagaatgcagatgtttatgcccgagaaaagccggattccgcttcggcagcattctcccagtgtcgctcagggtgctgactcggggactgcgatggggcaccaagagactgggagatgcgtatcgccgggtcacggaggtctgcggtacactgccttggctgccggttttccgggcgtcgccggggagaacttccccgggctgtgggcctggagacgggtgctgtcgctccacggc

SEQ ID NO: 383204 - DNA, 1562 bp, Homo sapiens
aatacggctaggtacgaggctgggtgttaatcggccgaggggggagagcgggaactactcgacccacagagccgatcgcggagcggattctgcttttaggagtacccgccaacaagcgggaccgagcaggaatccgtatctgggaacagagccctttgctcctccctcagaatgaacggagaccagaattcagatgtttatgcccaagaaaagcaggatttcgttcagcacttctcccagatcgttagggtgctgactgaggatgagatggggcacccagagataggagatgctattgcccggctcaaggaggtcctggagtacaatgccattggaggcaagtataaccggggtttgacggtggtagtagcattccgggagctggtggagccaaggaaacaggatgctgatagtctccagcgggcctggactgtgggctggtgtgtggaactgctgcaagctttcttcctggtggcagatgacatcatggattcatcccttacccgccggggacagatctgctggtatcagaagccgggcgtgggtttggatgccatcaatgatgctaacctcctggaagcatgtatctaccgcctgctgaagctctattgccgggagcagccctattacctgaacctgatcgagctcttcctgcagagttcctatcagactgagattgggcagaccctggacctcctcacagccccccagggcaatgtggatcttgtcagattcactgaaaagaggtacaaatctattgtcaagtacaagacagctttctactccttctaccttcctatagctgcagccatgtacatggtgagtgagcctcctcacccctctctgctctgctgatgggggcttttggacagcaaggcatagagcagaaaacgtgaacactgctacccctggtgaaaaactgtgtgaccttgagcaagtcggtctcgctcagtctctttcctcagctggggataaaattcctacttcacaggactgtaaagattaagcaaggcaagggatatgaaagtgcttagcacataataggggaacaatatatcctgtatctgagtatggataggagtgtggagatcatccaggttgagagggagaagagtggattaaagacagtcagtgggattaagtgtctaccctgaccttgcttctctacatttccttttcatcttgaaagaagttggaggtggcaaaaatattaggaaggtggatcagaatgacttggggactgacatttgtgagggaagagacaggctgtgcacctctagaatggattcatctcttttatgactcccaggaaggcctagccaaaaataagtgggattgaggttggaccatcagtcaggactgtctaggtcagggaagccaagatgtctgaagagagaggaaagatttggggctgcagtagggcaagaccccatgggaggaagcagccaggaagatgccggcacccctggggtttggcttattaacccccctttccctgcatggcaggaattgatggcgagaaggagcacgccaatgccaagaagatctgctggagatggggg

SEQ ID NO: 383205 - DNA, 857 bp, Homo sapiens
  misc_feature (796)..(796): n is a, c, g, or t
aatacggctaggtacgaggctgggtgttaatcggccgaggggggagagcgggaactactcgacccacagagccgatcgcggagcggattctgcttttaggagtacccgccaacaagcgggaccgagcaggaatccgtatctgggaacagagccctttgctcctccctcagaatgaacggagaccagaattcagatgtttatgcccaagaaaagcaggatttcgttcagcacttctcccagatcgttagggtgctgactgaggatgagatggggcacccagagataggagatgctattgcccggctcaaggaggtcctggagtacaatgccattggaggcaagtataaccggggtttgacggtggtagtagcattccgggagctggtggagccaaggaaacaggatgctgatagtctccagcgggcctggactgtgggctggtgtgtggaactgctgcaagctttcttcctggtggcagatgacatcatggattcatcccttacccgccggggacagatctgctggtatcagaagccgggcgtgggtttggatgccatcaatgatgctaacctcctggaagcatgtatctaccgcctgctgaagctctattgccgggagcagccctattacctgaacctgatcgagctcttcctgcagagttcctatcagactgagattgggcagaccctggacctcctcacagccccccagggcaatgtggatcttgtcagattcactgaaaagaggtacaaatctattgtcaagtacaagacagctttctactccttctaccttnctatagctgaaccctgacataggaagaattattgcgaaaagacccccccatcccaaccccc

SEQ ID NO: 383206 - DNA, 1867 bp, Homo sapiens
aatacggctaggtacgaggctgggtgttaatcggccgaggggggagagcgggaactactcgacccacagagccgatcgcggagcggattctgcttttaggagtacccgccaacaagcgggaccgagcaggaatccgtatctgggaacagagccctttgctcctccctcagaatgaacggagaccagaattcagatgtttatgcccaagaaaagcaggatttcgttcagcacttctcccagatcgttagggtgctgactgaggatgagatggggcacccagagataggagatgctattgcccggctcaaggaggtcctggagtacaatgccattggaggcaagtataaccggggtttgacggtggtagtagcattccgggagctggtggagccaaggaaacaggatgctgatagtctccagcgggcctggactgtgggctggtgtgtggaactgctgcaagctttcttcctggtggcagatgacatcatggattcatcccttacccgccggggacagatctgctggtatcagaagccgggcgtgggtttggatgccatcaatgatgctaacctcctggaagcatgtatctaccgcctgctgaagctctattgccgggagcagccctattacctgaacctgatcgagctcttcctgcaggtgtattgcagacagggcccgatgcccagagggtgcccatggtagccttggcctctataggacatgctcatctagctggtttcagggtacaggattgcagcgtgcctggaagggaaagaaagcgaggaagggtgttgggaagtggggttgtggtagtggcaagaaagggcttctctgtcctgtgtaattggaagaaagggtgataaaggactgtgtgtatgaatatgggccttaagttttggggctttctccccttctgttgcctttctgattctgcccagttgtcagctggtatgggatgttgggcttgggataccagggtttcgcatatctggagaaagcctggctcatggaccgtctttgtcttgcttagagttcctatcagactgagattgggcagaccctggacctcctcacagccccccagggcaatgtggatcttgtcagattcactgaaaagaggtgaggggaggtgagggacagcgcgaaccatgtctggacagcgagggagggctcaggatgtgcattgccctcctgaggagtttctcttctccccttactcaggtacaaatctattgtcaagtacaagacagctttctactccttctaccttcctatagctgcagccatgtacatggcaggaattgatggcgagaaggagcacgccaatgccaagaagatcctgctggagatgggggagttctttcagattcaggatgattaccttgacctctttggggaccccagtgtgaccggcaaaattggcactgacatccaggacaacaaatgcagctggctggtggttcagtgtctgcaacgggccactccagaacagtaccagatcctgaaggaaaattacgggcagaaggaggctgagaaagtggcccgggtgaaggcgctatatgaggagctggatctgccagcagtgttcttgcaatatgaggaagacagttacagccacattatggctctcattgaacagtacgcagcacccctgcccccagccgtctttctggggcttgcgcgcaaaatctacaagcggagaaagtgacctagagattgcaagggcggggagaggaggctctcaataaataatcgtgtaaccttaaaaaaaaaaaatcgggattctttgggggggaaaaagttgaaggcacggctactgttctgcccttttgacaggggaatcgcccaagagctatcgaccgactag

SEQ ID NO: 383207 - DNA, 1303 bp, Homo sapiens
aatacggctaggtacgaggctgggtgttaatcggccgaggggggagagcgggaactactcgacccacagagccgatcgcggagcggattctgcttttaggagtacccgccaacaagcgggaccgagcaggaatccgtatctgggaacagagccctttgctcctccctcagaatgaacggagaccagaattcagatgtttatgcccaagaaaagcaggatttcgttcagcacttctcccagatcgttagggtgctgactgaggatgagatggggcacccagagataggagatgctattgcccggctcaaggaggtcctggagtacaatgccattggaggcaagtataaccggggtttgacggtggtagtagcattccgggagctggtggagccaaggaaacaggatgctgatagtctccagcgggcctggactgtgggctggtgtgtggaactgctgcaagctttcttcctggtggcagatgacatcatggattcatcccttacccgccggggacagatctgctggtatcagaagccgggcgtgggtttggatgccatcaatgatgctaacctcctggaagcatgtatctaccgcctgctgaagctctattgccgggagcagccctattacctgaacctgatcgagctcttcctgcaggtacaaatctattgtcaagtacaagacagctttctactccttctaccttcctatagctgcagccatgtacatggcaggaattgatggcgagaaggagcacgccaatgccaagaagatcctgctggagatgggggagttctttcagattcaggatgattaccttgacctctttggggaccccagtgtgaccggcaaaattggcactgacatccaggacaacaaatgcagctggctggtggttcagtgtctgcaacgggccactccagaacagtaccagatcctgaaggaaaattacgggcagaaggaggctgagaaagtggcccgggtgaaggcgctatatgaggagctggatctgccagcagtgttcttgcaatatgaggaagacagttacagccacattatggctctcattgaacagtacgcagcacccctgcccccagccgtctttctggggcttgcgcgcaaaatctacaagcggagaaagtgacctagagattgcaagggcggggagaggaggctctcaataaataatcgtgtaaccttaaaaaaaaaaaatcgggattctttgggggggaaaaagttgaaggcacggctactgttctgcccttttgacaggggaatcgcccaagagctatcgaccgactag

SEQ ID NO: 383208 - DNA, 299 bp, Homo sapiens
gttctgaaagatgctaaaacattaacatggcaaatatttactttttgacacacaaacagcaaagagtaatctttagatttatgattttatttatacagttctacaactgtatatcaaaaataaggagattatataaaatcttaaaacaattaaagcaagaatgtattcaccaattcaaatatgaaaactgtgtttcggtgtcagtatgtatttcttaaatcagtcaaatactaaagataatgtgcaactgaagagcaaagaccaagtggacagttgaatcagtgtatcgagtcatatga

SEQ ID NO: 383209 - DNA, 142 bp, Homo sapiens
  misc_feature (5)..(5): n is a, c, g, or t
  misc_feature (32)..(32): n is a, c, g, or t
ctgangggaagaggtcaatgggaatgggtggnggtggttaaagggagtgggtttcttttggggagatgaaaatgttctacagttgattgtggtgatggttgcataaactctgatcacacaaaagtcattagattgtatactt

SEQ ID NO: 383210 - DNA, 116 bp, Homo sapiens
agctccctggtgattatagtgtgcagcagaatgtgagaaccacaccttgaaaccattgtgccatggccctaccaaatggatgagtcagcagattaaatcttccccaaaatatgaca

SEQ ID NO: 383211 - DNA, 343 bp, Homo sapiens
agcaaaaagcatacatcctttggggaccgtccccttcctccctcccgtcctgccttcccagcttggctgtgtgtttgaagctccggtgaaagtgtcatatggtttgcgtcgggattctggagccagttgcctcaaaccttgttttctcattattagactattttttttgtttgttttaagtacatacttctgccaccttctctccctaccttgatgccttcaaccaaaaaatgaaaggaaaggaatgttttcctgcaggtgatttagaaggtgtgcaaggccagatgttttggtgaattttagcagatttcgcctgcatgccctccttctcctggagcagctg

SEQ ID NO: 383212 - DNA, 1736 bp, Homo sapiens
acagtttttttttttacttgatcattctttttatttttacaaagcatggcaaaatgaggaaaccactgacaggtgaagaatttgcacaatggaaaaccaccttgaccatctcatgactttatacaggaatcggaggtaagtgttcctttaaagtgattttgtcatgaaagagtcatctgaaatgactctcgtgatggaggaaaggaaagtaatgaaatcaacattcatggttatttaaaatgccttaaaagctaagcataatatacatagtaactccttttcctagtataaaaatagtgccagaaactatatttgttcaaatatattgaaaaggtataagaatacaaatagatattaacagtggctagtgatgcctcataaggttttcttaaactgtaatataaatttatattttcaactatttacattgctttcaacaacattcattaagacatgtttacacaggcttttagtaagtatatggaatggtaaagtgagctttaatactttcttcttcactctctgtagtagagcagaaggggtccaaaaccatgcacaatttaacagtccagaagaactgtgtaatctttacctggctagcacatggaaaaaataaactatatacaagaatacaaaactcctaaagtgttcttcaactatcagcaggttaagtgattcatacttgcaaaaagacaggatgtttgtttactggtagattcttagtaagtttcaggtaaagaaggtgcataaaacatatgttattgatgaaaatggaaatgatgcagtataccccatgttctcacattaaattggcagtatcagaagctaagtctcttctctagcacctccttcagggaccgtgagctccttggggtcactgctctgtctccacagcagagcacggtacctaacatgtggcaggactcaataaaaggtgggtcagtgtatttctgatacaaaacaattaaattgtgccaccttattttgactacagttgttcataagagaggataacgatgacattttgtatcctctcatattaaatcaatcttgtaaacaaaagacaattgcttgtgatggcctgttaagttttaggagtacaatctggtgaaaaacacagaaaaaaattgtagatcaaattggaacaggtctaatatttatttgctatgctgaaaataaaggcacttcactgctaggcaagaatatatctgtgactgaacagttttctccaagaatccaatatttccagtatattttcatatactttcttatctctaatactcctattaaaggaaactattattcaaaattaagagacagtggtgacaacatcatcatcctgggtttgtaccttgaagcaatatactcaatgagctctaaatctcacattcactagtgatctgcaagtgaagctgaataaatatattctctttgttcagtcatggaaactcaacattagaaatgacatgtgggaatagatcaccttctctctagactaatatcccatttctgacagtggtctccatggcccattggggcttataaagtagctgccttctgtgacattctgcttgaagacaaaggctttgcccaaacataactccttttaaaaaagcacaacttgtttaggcacacagaggttaagtgacttacacaaatccacccaggattgtgattggcacggtctaatctactgaaaaatataaggccaggcaattatatagatatcttttaac

SEQ ID NO: 383213 - DNA, 522 bp, Homo sapiens
  misc_feature (519)..(521): n is a, c, g, or t
gaaagatattactggctataatctgatgcatccattgcacctagtgaaggctcaccatatggtcagaatactcgatgcacactgatacaactctctacatccatctctgtgttagggacaaatgttactttactcttgcacagaacttggacagtcacttttaatatctgtcttttctttttctattttcattactgataccctctgccccttctttctgactaaaactctcattcaataaaattatagtcaaatcttgcaattggaaaagtattcagacttttaaagttatatttatatatctaaatgttgctccattagggttttaattctaaatttaacctttaaaaagttatcatattttctttatttccaggttcctaggagaatgttaacagtccagacctttttcactacatcaaccacggatgattggcatataaaatcctacttaacctttacataactgcaataccaggaaacaaatatgtcaataaaaggaaacatcattcaaaaaannna

SEQ ID NO: 383214 - DNA, 889 bp, Homo sapiens
cgcgctcttgtgaggtcgcaggggaccgccactcacgcggagccaatcggaactcgcggcggggctgctgggtcttccaggagcgcgcttgagcggacgctgcctaccggtggccgggcgggatgtaacccgctgctgagctggcagctctgtgtcgctaggcttcggcccggccgccgccgcacataagctgcgaggaggagctttacgacttcccggtcttcggggccgggcgcagcaagggccagactctgcgctagcaggcgctgcgcgccaaccggccggcacctgtcgcagaaggtgcaaccgatcgcactgtcgcgccgaagctcctcaatggccagcgccagctgcagccccggccgcccactcgcctcacctgagcctggctggcagcctgttatcaattacattgatattaaatttgaggactacctaaatgcagaatcgcgagtgaacagatgtcagatgcctggtaacagggtgcagtgttgtttatacttcattgctccttcaggacatggagacagatctcattatgttgcccaggtgatccttgatctcctggcctcaagtgatcctccaacttggtctcccaaagtgctgggattacagatgtgaactaccaacccagtcaacgtgcagaaggttttcagtttgatgtagtctgatgtagtctcatgtattttatccttgtggtgttgcctgagctttggtgtgatatccaaaatatcattgcagatcatatcagaactttcccctatgttcttacagaactttatggttcagattccatcaattggatatcgggctgcgcggaaagggccggccccggtggttcattctaacatttggggaattcgccccgggtctgaggctggcaaaagtt

SEQ ID NO: 383215 - DNA, 570 bp, Homo sapiens
  misc_feature (567)..(569): n is a, c, g, or t
gtctatgacatgtaagacaaattatccacaaccatgacattttccatgctacaactgtaggtacataagtatagtccagaaatcaaattcttagttttgtcacccttgtaaagcagcaggaacactggaaattttcccccttatatttgggatctacttgagaacctcccttcaccccacacaaaacccgactaaagaaatcatttcttttcctttctttttatttacaaagaatttttctctccaaaatctacatttgcctacttttggctctgtcatcaagtagggtgatacaaaatgtatgccaagaaaagtctgattgtttcattttttatttttttcttacttgtctgacacagtgacaggatcacagaatgtgaattttgaacagatctgaaaagttattaagttcaactccacagaggttcctaggagaatgttaacagtccagacctttttcactacatcaaccacggatgattggcatataaaatcctacttaacctttacataactgcaataccaggaaacaaatatgtcaataaaaggaaacatcattcaaaaaannna

SEQ ID NO: 383216 - DNA, 746 bp, Homo sapiens
gtctatgacatgtaagacaaattatccacaaccatgacattttccatgctacaactgtaggtacataagtatagtccagaaatcaaattcttagttttgtcacccttgtaaagcagcaggaacactggaaattttcccccttatatttgggatctacttgagaacctcccttcaccccacacaaaacccgactaaagaaatcatttcttttcctttctttttatttacaaagaatttttctctccaaaatctacatttgcctacttttggctctgtcatcaagtagggtgatacaaaatgtatgccaagaaaagtctgattgtttcattttttatttttttcttacttgtctgacacagtgacaggatcacagaatgtgaattttgaacagatctgaaaagttattaagttcaactccacagaggtgagtaatgtgcccataagtgtggctgaagatgagtggcgctaacacaatgctgtgagtccgacccccagtccagcactctttccatgtcgtctaactcgctctcatttaccttcacataaagtgacaaaggggcctgatgcgtaacttcctccagccactccccgttcccagttattattccaaagaaatgttgctggggaaaagtgaagatgtgacttgatggggcaagctgccactctgccttccttcctatgataacttactagtaaataatgcattccttctggaatttaatttcacattttcaaaggccaaagac

SEQ ID NO: 383217 - DNA, 586 bp, Homo sapiens
atgcacatttaagttatgtattacatgtctttagtggtgatcactattttatcagttcctctgtctttctttataccaagtatgactcataaacccagtattaatttgccaagagattggcatactatttgtatatatgcttttctttcaaataatctggatttccaatgcccacaatcattgatcctaaagaaaatgtgggagtaggtaaactcaaacatccctaccatcacccctggtaggaaatcactggtgtaatgtatgatattaacatctgcaccaattactgttataggtggaaccaaagttttaatcaaagaaggtggtgttcagttgctgcttacaatagttgataccccaggatttggagatgcagtggataacagtaattgctggcagcctgttatcaattacattgatattaaatttgaggactacctaaatgcagaatcgcgagtgaacagatgtcagatgcctggtaacagggtgcagtgttgtttatacttcattgctccttcaggacatgggtcagtaacctgatagttctgattcctttttgttgttgttgcttactgttacctttatg

SEQ ID NO: 383218 - DNA, 467 bp, Homo sapiens
  misc_feature (464)..(466): n is a, c, g, or t
ttattaacaagccatgagaagtcagaaatcctttcaagctcttgtactctgcttctttgaccatcacaagagaattcaactttctgtttaacttagaaaggcttgggataaagggctcaagcacctcttactgcctcctcactctggaaccaaatgccttactgtctgcactgctccccattgccttccctcccgcctcaccagttgatccctatacctccttcccaatgacctccaggaggcctctaacttacagtgacaggatcacagaatgtgaattttgaacagatctgaaaagttattaagttcaactccacagaggttcctaggagaatgttaacagtccagacctttttcactacatcaaccacggatgattggcatataaaatcctacttaacctttacataactgcaataccaggaaacaaatatgtcaataaaaggaaacatcattcaaaaaannna

SEQ ID NO: 383219 - DNA, 374 bp, Homo sapiens
  misc_feature (371)..(373): n is a, c, g, or t
ttattaacaagccatgagaagtcagaaatcctttcaagctcttgtactctgcttctttgaccatcacaagagaattcaactttctgtttaacttagaaaggcttgggataaagggctcaagcacctcttactgcctcctcactctggaaccaaatgccttacttgacaggatcacagaatgtgaattttgaacagatctgaaaagttattaagttcaactccacagaggttcctaggagaatgttaacagtccagacctttttcactacatcaaccacggatgattggcatataaaatcctacttaacctttacataactgcaataccaggaaacaaatatgtcaataaaaggaaacatcattcaaaaaannna

SEQ ID NO: 383220 - DNA, 434 bp, Homo sapiens
gtctatgacatgtaagacaaattatccacaaccatgacattttccatgctacaactgtaggtacataagtatagtccagaaatcaaattcttagttttgtcacccttgtaaagcagcaggaacactggaaattttcccccttatatttgggatctacttgagaacctcccttcaccccacacaaaacccgactaaagaaatcatttcttttcctttctttttatttacaaagaatttttctctccaaaatctacatttgcctacttttggctctgtcatcaagtagggtgatacaaaatgtatgccaatcatccgcggttggtgtagtgaaaaagggctggactgtgaagcattgctcctaggaacctctgaggagtgtgagctgaattaatctatagcagatctggtggggactcctcgtagaggtcgacgcg

SEQ ID NO: 383221 - DNA, 1537 bp, Homo sapiens
  misc_feature (1534)..(1536): n is a, c, g, or t
cgcgctcttgtgaggtcgcaggggaccgccactcacgcggagccaatcggaactcgcggcggggctgctgggtcttccaggagcgcgcttgagcggacgctgcctaccggtggccgggcgggatgtaacccgctgctgagctggcagctctgtgtcgctaggcttcggcccggccgccgccgcacataagctgcgaggaggagctttacgacttcccggtcttcggggccgggcgcagcaagggccagactctgcgctagcaggcgctgcgcgccaaccggccggcacctgtcgcagaaggtgcaaccgatcgcactgtcgcgccgaagctcctcaatggccagcgccagctgcagccccggccgcccactcgcctcacctgagcctgggagcttgaaaaatcacatttgagaagaggattggatcctagccataacataaatataagggtggaaccaaagttttaatcaaagaaggtggtgttcagttgctgcttacaatagttgataccccaggatttggagatgcagtggataacagtaattgctggcagcctgttatcaattacattgatattaaatttgaggactacctaaatgcagaatcgcgagtgaacagatgtcagatgcctggtaacagggtgcagtgttgtttatacttcattgctccttcaggacatggaccattacataactgaagactcccaccttcaggcaggattgggtagtacgtgtttgtaactacctggcattgccttttgttgaggaagggtagatgtctacccaaatggaatattgagtatcagagacttcaaatgataacttttgtttgtttggagaaaatcttgaggacgtgatcactgtacaaaagcatggcaaaatgaggaaaccactgacaggtgaagaatttgcacaatggaaaaccaccttgaccatctcatgactttatacaggaatcggagacatccaaggccattccatttctaaatcacacttatccctcaatcaagtcagtgactggatcatctcctaaggtttcacctgctttgcatcagtgagttggactatggatcaggtactgtgctcagcatcagaaaatgggatgacaatgaacagagtaacaggactatatttctgaaaaaggatgaacttactggaaacaggattgcgtgcctgaaatatacccaaatggatataaatgtcaactcagttctgggctggagatatagatttggaatgcaccaacaatgcagatggtaatcctggcatgcgagtagggctcaagcacctcttactgcctcctcactctggaaccaaatgccttacttgacaggatcacagaatgtgaattttgaacagatctgaaaagttattaagttcaactccacagaggttcctaggagaatgttaacagtccagacctttttcactacatcaaccacggatgattggcatataaaatcctacttaacctttacataactgcaataccaggaaacaaatatgtcaataaaaggaaacatcattcaaaaaannna

SEQ ID NO: 383222 - DNA, 1753 bp, Homo sapiens
  misc_feature (1750)..(1752): n is a, c, g, or t
cgcgctcttgtgaggtcgcaggggaccgccactcacgcggagccaatcggaactcgcggcggggctgctgggtcttccaggagcgcgcttgagcggacgctgcctaccggtggccgggcgggatgtaacccgctgctgagctggcagctctgtgtcgctaggcttcggcccggccgccgccgcacataagctgcgaggaggagctttacgacttcccggtcttcggggccgggcgcagcaagggccagactctgcgctagcaggcgctgcgcgccaaccggccggcacctgtcgcagaaggtgcaaccgatcgcactgtcgcgccgaagctcctcaatggccagcgccagctgcagccccggccgcccactcgcctcacctgagcctgggagcttgaaaaatcacatttgagaagaggattggatcctagccataacataaatataagggtggaaccaaagttttaatcaaagaaggtggtgttcagttgctgcttacaatagttgataccccaggatttggagatgcagtggataacagtaattgctggcagcctgttatcaattacattgatattaaatttgaggactacctaaatgcagaatcgcgagtgaacagatgtcagatgcctggtaacagggtgcagtgttgtttatacttcattgctccttcaggacatggaccattacataactgaagactcccaccttcaggcaggattgggtagtacgtgtttgtaactacctggcattgccttttgttgaggttagatcttgggacagcccacatacctagacaaacttaggctttccagcttgcactggaccagggtggaaaggaagggtagatgtctacccaaatggaatattgagtatcagagacttcaaatgataacttttgtttgtttggagaaaatcttgaggacgtgatcactgtacaaaagcatggcaaaatgaggaaaccactgacaggtgaagaatttgcacaatggaaaaccaccttgaccatctcatgactttatacaggaatcggagacatccaaggccattccatttctaaatcacacttatccctcaatcaagtcagtgactggatcatctcctaaggtttcacctgctttgcatcagtgagttggactatggatcaggtactgtgctcagcatcagaaaatgggatgacaatgaacagagtaacaggactatatttctgaaaaaggatgaacttactggaaacaggattgcgtgcctgaaatatacccaaatggatataaatgtcaactcagttctgggctggagatatagatttggaatgcaccaacaatgcagatggtaatcctggcatgcgagtaggtgagatcatccagggagatggcctataatgagagcctacaacatgtcagggctcaagcacctcttactgcctcctcactctggaaccaaatgccttactgtctgcactgctccccattgccttccctcccgcctcaccagttgatccctatacctccttcccaatgacctccaggaggcctctaacttacagtgacaggatcacagaatgtgaattttgaacagatctgaaaagttattaagttcaactccacagaggttcctaggagaatgttaacagtccagacctttttcactacatcaaccacggatgattggcatataaaatcctacttaacctttacataactgcaataccaggaaacaaatatgtcaataaaaggaaacatcattcaaaaaannna

SEQ ID NO: 383223 - DNA, 1467 bp, Homo sapiens
cgcgctcttgtgaggtcgcaggggaccgccactcacgcggagccaatcggaactcgcggcggggctgctgggtcttccaggagcgcgcttgagcggacgctgcctaccggtggccgggcgggatgtaacccgctgctgagctggcagctctgtgtcgctaggcttcggcccggccgccgccgcacataagctgcgaggaggagctttacgacttcccggtcttcggggccgggcgcagcaagggccagactctgcgctagcaggcgctgcgcgccaaccggccggcacctgtcgcagaaggtgcaaccgatcgcactgtcgcgccgaagctcctcaatggccagcgccagctgcagccccggccgcccactcgcctcacctgagcctgggagcttgaaaaatcacatttgagaagaggattggatcctagccataacataaatataagggtggaaccaaagttttaatcaaagaaggtggtgttcagttgctgcttacaatagttgataccccaggatttggagatgcagtggataacagtaattgctggcagcctgttatcaattacattgatattaaatttgaggactacctaaatgcagaatcgcgagtgaacagatgtcagatgcctggtaacagggtgcagtgttgtttatacttcattgctccttcaggacatggaccattacataactgaagactcccaccttcaggcaggattgggtagtacgtgtttgtaactacctggcattgccttttgttgaggaagggtagatgtctacccaaatggaatattgagtatcagagacttcaaatgataacttttgtttgtttggagaaaatcttgaggacgtgatcactgtacaaaagcatggcaaaatgaggaaaccactgacaggtgaagaatttgcacaatggaaaaccaccttgaccatctcatgactttatacaggaatcggagacatccaaggccattccatttctaaatcacacttatccctcaatcaagtcagtgactggatcatctcctaaggtttcacctgctttgcatcagggcagggttccactcccattgcccaggctggagtgcagtggcgtgatcttggctcactgcaaccccctcctcccctattcaagcaattcttctgcctcagtcttctaagtggctgggactacaagcgcgtgccaccacacccgcgcttataatagaaaataatttttctgtttttttgtagggatggggtttcaccatgttggccaggctggcctcgaactcctgagctcaagtgatcaacctgcctctgcctcccaaagtgctgggattacaggtgtaagccaccatgcccggcctctgatttttctatagtgagaacataactatttctgtaataatattaaaaatacttgtcagtatcacatagaattttcaacagcagattcaaataaaatgaatccttgtgtgtgtgt

SEQ ID NO: 383224 - DNA, 1378 bp, Homo sapiens
cgcgctcttgtgaggtcgcaggggaccgccactcacgcggagccaatcggaactcgcggcggggctgctgggtcttccaggagcgcgcttgagcggacgctgcctaccggtggccgggcgggatgtaacccgctgctgagctggcagctctgtgtcgctaggcttcggcccggccgccgccgcacataagctgcgaggaggagctttacgacttcccggtcttcggggccgggcgcagcaagggccagactctgcgctagcaggcgctgcgcgccaaccggccggcacctgtcgcagaaggtgcaaccgatcgcactgtcgcgccgaagctcctcaatggccagcgccagctgcagccccggccgcccactcgcctcacctgagcctgggagcttgaaaaatcacatttgagaagaggattggatcctagccataacataaatataagggtggaaccaaagttttaatcaaagaaggtggtgttcagttgctgcttacaatagttgataccccaggatttggagatgcagtggataacagtaattgctggcagcctgttatcaattacattgatattaaatttgaggactacctaaatgcagaatcgcgagtgaacagatgtcagatgcctggtaacagggtgcagtgttgtttatacttcattgctccttcaggacatggaccattacataactgaagactcccaccttcaggcaggattgggtagtacgtgtttgtaactacctggcattgccttttgttgaggaagggtagatgtctacccaaatggaatattgagtatcagagacttcaaatgataacttttgtttgtttggagaaaatcttgaggacgtgatcactgtacaaaagcatggcaaaatgaggaaaccactgacaggtgaagaatttgcacaatggaaaaccaccttgaccatctcatgactttatacaggaatcggagacatccaaggccattccatttctaaatcacacttatccctcaatcaagtcagtgactggatcatctcctaaggtttcacctgctttgcatcagtgagttggactatggatcaggtactgtgctcagcatcagaaaatgggatgacaatgaacagagtaacaggactatatttctgaaaaaggatgaacttactggaaacaggattgcgtgcctgaaatatacccaaatggatataaatgtcaactcagttctgggctggagatatagatttggaatgcaccaacaatgcagatggtaatcctggcatgcgagtaggtgagatcatccagggagatggcctataatgagagcctacaacatgtcaggtgtacaaagcaaacttctaatgcactgctggtttacatttcctgtattttc

SEQ ID NO: 383225 - DNA, 1593 bp, Homo sapiens
cgcgctcttgtgaggtcgcaggggaccgccactcacgcggagccaatcggaactcgcggcggggctgctgggtcttccaggagcgcgcttgagcggacgctgcctaccggtggccgggcgggatgtaacccgctgctgagctggcagctctgtgtcgctaggcttcggcccggccgccgccgcacataagctgcgaggaggagctttacgacttcccggtcttcggggccgggcgcagcaagggccagactctgcgctagcaggcgctgcgcgccaaccggccggcacctgtcgcagaaggtgcaaccgatcgcactgtcgcgccgaagctcctcaatggccagcgccagctgcagccccggccgcccactcgcctcacctgagcctgggagcttgaaaaatcacatttgagaagaggattggatcctagccataacataaatataagggtggaaccaaagttttaatcaaagaaggtggtgttcagttgctgcttacaatagttgataccccaggatttggagatgcagtggataacagtaattgctggcagcctgttatcaattacattgatattaaatttgaggactacctaaatgcagaatcgcgagtgaacagatgtcagatgcctggtaacagggtgcagtgttgtttatacttcattgctccttcaggacatggaccattacataactgaagactcccaccttcaggcaggattgggtagtacgtgtttgtaactacctggcattgccttttgttgaggaagggtagatgtctacccaaatggaatattgagtatcagagacttcaaatgataacttttgtttgtttggagaaaatcttgaggacgtgatcactgtacaaaagcatggcaaaatgaggaaaccactgacaggtgaagaatttgcacaatggaaaaccaccttgaccatctcatgactttatacaggaatcggagacatccaaggccattccatttctaaatcacacttatccctcaatcaagtcagtgactggatcatctcctaaggtttcacctgctttgcatcagtgagttggactatggatcaggtactgtgctcagcatcagaaaatgggatgacaatgaacagagtaacaggactatatttctgaaaaaggatgaacttactggaaacaggattgcgtgcctgaaatatacccaaatggatataaatgtcaactcagttctgggctggagatatagatttggaatgcaccaacaatgcagatggtaatcctggcatgcgagtaggtgagatcatccagggagatggcctataatgagagcctacaacatgtcagtcagatctccaggctctcaagatctccaacctgaccagagatcatctcattcatgggtaaaatggactttacccagtttgaacttcacacatgattttgtgctgtgtgtagtgcccttttaagtctctcacatcctgctgaccctctattcccactgtgccagaccatgacttcagctcacttctgtcctctattagagcagagaagacagtcatgggatagaacaagttctcccaggacaaatatacagtgtgactgtggctacca

SEQ ID NO: 383226 - DNA, 875 bp, Homo sapiens
cgcgctcttgtgaggtcgcaggggaccgccactcacgcggagccaatcggaactcgcggcggggctgctgggtcttccaggagcgcgcttgagcggacgctgcctaccggtggccgggcgggatgtaacccgctgctgagctggcagctctgtgtcgctaggcttcggcccggccgccgccgcacataagctgcgaggaggagctttacgacttcccggtcttcggggccgggcgcagcaagggccagactctgcgctagcaggcgctgcgcgccaaccggccggcacctgtcgcagaaggtgcaaccgatcgcactgtcgcgccgaagctcctcaatggccagcgccagctgcagccccggccgcccactcgcctcacctgagcctgggagcttgaaaaatcacatttgagaagaggattggatcctagccataacataaatataagggtggaaccaaagttttaatcaaagaaggtggtgttcagttgctgcttacaatagttgataccccaggatttggagatgcagtggataacagtaattgctggcagcctgttatcaattacattgatattaaatttgaggactacctaaatgcagaatcgcgagtgaacagatgtcagatgcctggtaacagggtgcagtgttgtttatacttcattgctccttcaggacatggaccattacataactgaagactcccaccttcaggcaggattgggtagtacgtgtttgtaactacctggcattgccttttgttgaggtaatttcagtttttattattattagtagtagtagtatactttaagttctacggtatatcttcacaatgtgcaggtttgttacatatgtatacatgtgccatgtttgttt

SEQ ID NO: 383227 - DNA, 610 bp, Homo sapiens
cttacaatagttgataccccaggatttggagatgcagtggataacagtaattggtaagaaggatttgtcctcacaactttccagtgtatttggggtattggggtggttaaactttctcttcttaacattttaaaactcttcttagcaaaggtcaccaaacttcaagtaacatgacaggtttgtataccaactttgccacttatttgacaaagtttaacttcaaagttaaacaaagaagtttaacttctttgaacccatttacttttcgataaaatggagataatacctatcataaaattgtttttaagacatattccaaaataacgtagctagatagaagaattctcattattgtaagaaatttaaaactgtttgctttaattttatccatttgtataaattctatctcaatcctaatttaaacctgatatttagaccttcagtttttccataagtcctaagtgaagaaaacaactatgaaattttagtctgaagtaattatcttagtattttataaataacttttatttttgtttgaattcacattgtttttgaggtatttttctgtcaactcttaaaactcctaagttcatcatgaagtttttatatt

SEQ ID NO: 383228 - DNA, 2635 bp, Homo sapiens
cgcgctcttgtgaggtcgcaggggaccgccactcacgcggagccaatcggaactcgcggcggggctgctgggtcttccaggagcgcgcttgagcggacgctgcctaccggtggccgggcgggatgtaacccgctgctgagctggcagctctgtgtcgctaggcttcggcccggccgccgccgcacataagctgcgaggaggagctttacgacttcccggtcttcggggccgggcgcagcaagggccagactctgcgctagcaggcgctgcgcgccaaccggccggcacctgtcgcagaaggtgcaaccgatcgcactgtcgcgccgaagctcctcaatggccagcgccagctgcagccccggccgcccactcgcctcacctgagcctgggagcttgaaaaatcacatttgagaagaggattggatcctagccataacataaatataagggtggaaccaaagttttaatcaaagaaggtggtgttcagttgctgcttacaatagttgataccccaggatttggagatgcagtggataacagtaattgctggcagcctgttatcaattacattgatattaaatttgaggactacctaaatgcagaatcgcgagtgaacagatgtcagatgcctggtaacagggtgcagtgttgtttatacttcattgctccttcaggacatggaccattacataactgaagactcccaccttcaggcaggattgggtagtacgtgtttgtaactacctggcattgccttttgttgaggttagatcttgggacagcccacatacctagacaaacttaggctttccagcttgcactggaccagggtggaaaggaagggtagatgtctacccaaatggaatattgagtatcagagacttcaaatgataacttttgtttgtttggagaaaatcttgaggacgtgatcactgtacaaaagcatggcaaaatgaggaaaccactgacaggtgaagaatttgcacaatggaaaaccaccttgaccatctcatgactttatacaggaatcggaggtaagtgttcctttaaagtgattttgtcatgaaagagtcatctgaaatgactctcgtgatggaggaaaggaaagtaatgaaatcaacattcatggttatttaaaatgccttaaaagctaagcataatatacatagtaactccttttcctagtataaaaatagtgccagaaactatatttgttcaaatatattgaaaaggtataagaatacaaatagatattaacagtggctagtgatgcctcataaggttttcttaaactgtaatataaatttatattttcaactatttacattgctttcaacaacattcattaagacatgtttacacaggcttttagtaagtatatggaatggtaaagtgagctttaatactttcttcttcactctctgtagtagagcagaaggggtccaaaaccatgcacaatttaacagtccagaagaactgtgtaatctttacctggctagcacatggaaaaaataaactatatacaagaatacaaaactcctaaagtgttcttcaactatcagcaggttaagtgattcatacttgcaaaaagacaggatgtttgtttactggtagattcttagtaagtttcaggtaaagaaggtgcataaaacatatgttattgatgaaaatggaaatgatgcagtataccccatgttctcacattaaattggcagtatcagaagctaagtctcttctctagcacctccttcagggaccgtgagctccttggggtcactgctctgtctccacagcagagcacggtacctaacatgtggcaggactcaataaaaggtgggtcagtgtatttctgatacaaaacaattaaattgtgccaccttattttgactacagttgttcataagagaggataacgatgacattttgtatcctctcatattaaatcaatcttgtaaacaaaagacaattgcttgtgatggcctgttaagttttaggagtacaatctggtgaaaaacacagaaaaaaattgtagatcaaattggaacaggtctaatatttatttgctatgctgaaaataaaggcacttcactgctaggcaagaatatatctgtgactgaacagttttctccaagaatccaatatttccagtatattttcatatactttcttatctctaatactcctattaaaggaaactattattcaaaattaagagacagtggtgacaacatcatcatcctgggtttgtaccttgaagcaatatactcaatgagctctaaatctcacattcactagtgatctgcaagtgaagctgaataaatatattctctttgttcagtcatggaaactcaacattagaaatgacatgtgggaatagatcaccttctctctagactaatatcccatttctgacagtggtctccatggcccattggggcttataaagtagctgccttctgtgacattctgcttgaagacaaaggctttgcccaaacataactccttttaaaaaagcacaacttgtttaggcacacagaggttaagtgacttacacaaatccacccaggattgtgattggcacggtctaatctactgaaaaatataaggccaggcaattatatagatatcttttaac

SEQ ID NO: 383229 - DNA, 1898 bp, Homo sapiens
  misc_feature (1895)..(1897): n is a, c, g, or t
cgcgctcttgtgaggtcgcaggggaccgccactcacgcggagccaatcggaactcgcggcggggctgctgggtcttccaggagcgcgcttgagcggacgctgcctaccggtggccgggcgggatgtaacccgctgctgagctggcagctctgtgtcgctaggcttcggcccggccgccgccgcacataagctgcgaggaggagctttacgacttcccggtcttcggggccgggcgcagcaagggccagactctgcgctagcaggcgctgcgcgccaaccggccggcacctgtcgcagaaggtgcaaccgatcgcactgtcgcgccgaagctcctcaatggccagcgccagctgcagccccggccgcccactcgcctcacctgagcctgggagcttgaaaaatcacatttgagaagaggattggatcctagccataacataaatataagggtggaaccaaagttttaatcaaagaaggtggtgttcagttgctgcttacaatagttgataccccaggatttggagatgcagtggataacagtaattgctggcagcctgttatcaattacattgatattaaatttgaggactacctaaatgcagaatcgcgagtgaacagatgtcagatgcctggtaacagggtgcagtgttgtttatacttcattgctccttcaggacatggaccattacataactgaagactcccaccttcaggcaggattgggtagtacgtgtttgtaactacctggcattgccttttgttgaggaagggtagatgtctacccaaatggaatattgagtatcagagacttcaaatgataacttttgtttgtttggagaaaatcttgaggacgtgatcactgtacaaaagcatggcaaaatgaggaaaccactgacaggtgaagaatttgcacaatggaaaaccaccttgaccatctcatgactttatacaggaatcggagacatccaaggccattccatttctaaatcacacttatccctcaatcaagtcagtgactggatcatctcctaaggtttcacctgctttgcatcagggcagggttccactcccattgcccaggctggagtgcagtggcgtgatcttggctcactgcaaccccctcctcccctattcaagcaattcttctgcctcagtcttctaagtggctgggactacaagcgcgtgccaccacacccgcgcttataatagaaaataatttttctgtttttttgtagggatggggtttcaccatgttggccaggctggcctcgaactcctgagctcaagtgatcaacctgcctctgcctcccaaagtgctgggattacaggtgtaagccaccatgcccggcctctgatttttctatatgagttggactatggatcaggtactgtgctcagcatcagaaaatgggatgacaatgaacagagtaacaggactatatttctgaaaaaggatgaacttactggaaacaggattgcgtgcctgaaatatacccaaatggatataaatgtcaactcagttctgggctggagatatagatttggaatgcaccaacaatgcagatggtaatcctggcatgcgagtaggtgagatcatccagggagatggcctataatgagagcctacaacatgtcagggctcaagcacctcttactgcctcctcactctggaaccaaatgccttacttgacaggatcacagaatgtgaattttgaacagatctgaaaagttattaagttcaactccacagaggttcctaggagaatgttaacagtccagacctttttcactacatcaaccacggatgattggcatataaaatcctacttaacctttacataactgcaataccaggaaacaaatatgtcaataaaaggaaacatcattcaaaaaannna

SEQ ID NO: 383230 - DNA, 489 bp, Homo sapiens
ctttctctgagcctatactacttaattaaaatctgcttggaaaatctcagttaagttagtaaaatcatctagttctaacaactattgtctgtttacagccttaggcaatttagtgggcaaaactgtaattgtgtatttctaaacatgagaaatttcaagatttctcctctgaggggtatcagggcatataaaatcaatcatgtaaatatttgcttcttttactttcaggattacacaaatatatttttaaataccaagtcttttttgagaaaacaaaaacaaacatttgctccgtgattctttccttttctgatttttaactgtgtgaaaaactagaaagatcaagtccttcaaggcttttatgccagtttgcctaggagagatacctgccccaagccccaattttaattactcaagccagttgaatggtgtgtgtatgtcagcctaggcaagcgacttcacagttatattttaaatatgaagatttca

SEQ ID NO: 383231 - DNA, 385 bp, Homo sapiens
gttactgtggaagaaaaaaatgaataatcccctcaaaattccaatcaggttctgttactactttttaaagtccctttgatagcttttcatcatctttaaaaaagcctctcatcatccttcttaaatatatttctcagctcccgctccattatggcctgattttcttctggttgctcctgcttttaccttttacccctccgtcagaggggccttggcacaggactgctgttccctcttttctcctgttcattcttcaggatcctgcctcattttctaaagtcctcaggggaaggcattcccaggacttccttaaggggcagggggcccatttccaattggctgttcaggaggactttccaggaggctggcagtaccttgtgattct

SEQ ID NO: 383232 - DNA, 589 bp, Homo sapiens
tgcttaaccgcatccctggtctctactcactcaatgccagtagccttcttcctgcctgttgtgacatcaaaaatgtcatacattgccaaatgtccccaagaaagagtggggctgagggaggacaaaatcctacccacagtttaaaaccaccgccttatctcatcctcacagtaactaaccacagtaaccccagggtggtaagtactgttaatgccccatattgcaagtgaggagaccaacagaacagagtttgggtgacattcctgagaacacacagctccgagattcacgcccaggcactgtgactccagagctcacctgcccattatgcaagaacatctgatcttggctgggagcagtggctcacacctgtaatcccagcactttgggagtccaaggcgggcagatcacgaggtcaggagatcgagaccgtcctggccaacatggtgaaaccctgtctctactaaaaatacaaaaaattagccttggtggcaggtgcctgtaatcccagctacttgggaggctgaggcaagaggactgcctgaggccaggagttcgagaccagcttaggcaacatagcaagaccctg

SEQ ID NO: 383233 - DNA, 485 bp, Homo sapiens
aaccaccgccttatctcatcctcacagtaactaaccacagtaaccccagggtggtaagtactgttaatgccccatattgcaagtgaggagaccaacagaacagagtttgggtgacattcctgagaacacacagctccgagattcacgcccaggcactgtgactccagagctcacctgcccattatgcaagaacatctgatcttggctgggagcagtggctcacacctgtaatcccagcactttgggagtccaaggcgggcagatcacgaggtcaggagatcgagaccgtcctggccaacatggtgaaaccctgtctctactaaaaatacaaaaaattagccttggtggcaggtgcctgtaatcccagctacttgggaggctgaggcaggataatcgcttgaaccagggaggcgaggttgcagtgagccgagattgtgccactgcactccagcctgggtgacagagcaagactctgtctcaaaaaa

SEQ ID NO: 383234 - DNA, 1708 bp, Homo sapiens
gcgcgtgttcctttagggaccgcgcgcgccgcggcctcgctctggggccggtacttgcgcgcccgcaccccgcgctccccgccccgctccccgtcccgcgctccacgcgcgccccagcgttgggggcttctcctccgcggcgggaatgtctggccggctccggcagcacggcgcggcccaggtccccgcgcccacgacgggccagcgcgctgggccatgatccggctgggcggctggtgtgcgcggcggctctgcagcgcggcggttcccgcggggcggcgcggggcggcgggcgggctgggcctggcgggaggccgcgccctacgggtgctggtggacatggacggcgtgctggctgacttcgagggcggattcctcaggaagttccgcgcgcgctttcccgaccagcccttcatcgcgctggaggaccggcgcggcttctgggtgtcggagcagtacggccgcctgcggccagggctgagcgtgagcgtccccgccccgccccgcgccgggcctccttctcgccccgagccccagacaccgcccctgcgccggtgaccttggacggagaaggccatcagcatttgggagtcaaagaatttcttttttgaacttgagcctctgccaggggccgtggaagctgtcaaggagatggccagcctacaaaacactgacgtcttcatctgcacaagccccatcaagatgttcaagtactgtccctatgagaagtatgcctgggtggagaagtactttggccctgactttctggagcagattgtgctgaccagagacaagaccgtggtctctgctgaccttctcatagacgaccggccggacatcacaggggccgagccaacccccagctgggagcatgtcctcttcaccgcctgccacaaccagcacctgcagctgcagcccccccgccgcaggctgcactcgtgggcggacgactggaaggccattctggacagcaagcggccctgctgagctggactgtgcttcgggctcctctgtggggctctgacctcagggctcccagctcggggcctgtggggccagtatgctggtctgggagtccctcctagactcctgggccccatgacctcctgctgcatgtcccttcccttccccagccctgccaggccttaacctgatcacggggcagggctgggccctctgggcgcttggacatagacacgtggtcccaggccgttcagcctgacctcaggcagcaggcaccaagctgccagaagcccaggggctcaggacagggaggagttgaggccactgttcagggggctggtggccgtctccactccctaggcaagttctctgaggcagaagggggttccctgttcccagagtctgcagccatcagcaaggaggaccaggaacccggcgactgaggtgcttccaggtggggacaagcccctcttggtctcagccacagcaccccttattccagctgccctgcccaacctgctcaccccacatgaccttctgtgtattcagcaaacactcactaggtgacagcggccaccaggctctgtgctgggggacgatactggccctggcctcgaccagcttagaggtttctcacacctctgttcccagggccccgctcagggcccagcagagagtccgtaggcttgaacatgtgttgagtgcatgaaaaataaatgctgttcatgtgtgtaaaaaaaaaaac

SEQ ID NO: 383235 - DNA, 1756 bp, Homo sapiens
gcgcgtgttcctttagggaccgcgcgcgccgcggcctcgctctggggccggtacttgcgcgcccgcaccccgcgctccccgccccgctccccgtcccgcgctccacgcgcgccccagcgttgggggcttctcctccgcggcgggaatgtctggccggctccggcagcacggcgcggcccaggtccccgcgcccacgacgggccagcgcgctgggccatgatccggctgggcggctggtgtgcgcggcggctctgcagcgcggcggttcccgcggggcggcgcggggcggcgggcgggctgggcctggcgggaggccgcgccctacgggtgctggtggacatggacggcgtgctggctgacttcgagggcggattcctcaggaagttccgcgcgcgctttcccgaccagcccttcatcgcgctggaggaccggcgcggcttctgggtgtcggagcagtacggccgcctgcggccagggctgagcagctggccttgctgaacacctgagctcaacccctaccatccgactcccgaggtgttctgtccaggatggatagaggggaaagatccaaggagggacgtttacacacagatcttggagaaggccatcagcatttgggagtcaaagaatttcttttttgaacttgagcctctgccaggggccgtggaagctgtcaaggagatggccagcctacaaaacactgacgtcttcatctgcacaagccccatcaagatgttcaagtactgtccctatgagaagtatgcctgggtggagaagtactttggccctgactttctggagcagattgtgctgaccagagacaagaccgtggtctctgctgaccttctcatagacgaccggccggacatcacaggcaagtggcctgcgacaggggccgagccaacccccagctgggagcatgtcctcttcaccgcctgccacaaccagcacctgcagctgcagcccccccgccgcaggctgcactcgtgggcggacgactggaaggccattctggacagcaagcggccctgctgagctggactgtgcttcgggctcctctgtggggctctgacctcagggctcccagctcggggcctgtggggccagtatgctggtctgggagtccctcctagactcctgggccccatgacctcctgctgcatgtcccttcccttccccagccctgccaggccttaacctgatcacggggcagggctgggccctctgggcgcttggacatagacacgtggtcccaggccgttcagcctgacctcaggcagcaggcaccaagctgccagaagcccaggggctcaggacagggaggagttgaggccactgttcagggggctggtggccgtctccactccctaggcaagttctctgaggcagaagggggttccctgttcccagagtctgcagccatcagcaaggaggaccaggaacccggcgactgaggtgcttccaggtggggacaagcccctcttggtctcagccacagcaccccttattccagctgccctgcccaacctgctcaccccacatgaccttctgtgtattcagcaaacactcactaggtgacagcggccaccaggctctgtgctgggggacgatactggccctggcctcgaccagcttagaggtttctcacacctctgttcccagggccccgctcagggcccagcagagagtccgtaggcttgaacatgtgttgagtgcatgaaaaataaatgctgttcatgtgtgtaaaaaaaaaaac

SEQ ID NO: 383236 - DNA, 1491 bp, Homo sapiens
gcgcgtgttcctttagggaccgcgcgcgccgcggcctcgctctggggccggtacttgcgcgcccgcaccccgcgctccccgccccgctccccgtcccgcgctccacgcgcgccccagcgttgggggcttctcctccgcggcgggaatgtctggccggctccggcagcacggcgcggcccaggtccccgcgcccacgacgggccagcgcgctgggccatgatccggctgggcggctggtgtgcgcggcggctctgcagcgcggcggttcccgcggggcggcgcggggcggcgggcgggctgggcctggcgggaggccgcgccctacgggtgctggtggacatggacggcgtgctggctgacttcgagggcggattcctcaggaagttccgcgcgcgctttcccgaccagcccttcatcgcgctggaggaccggcgcggcttctgggtgtcggagcagtacggccgcctgcggccagggctgagcgtgagcgtccccgccccgccccgcgccgggcctccttctcgccccgagccccagacaccgcccctgcgccggtgaccttggacggagaaggccatcagcatttgggagtcaaagaatttcttttttgaacttgagcctctgccaggggccgtggaagctgtcaaggagatggccagcctacaaaacactgacgtcttcatctgcacaagccccatcaagatgttcaagtactgtccctatgagaagtatgcctgggtggagaagtactttggccctgactttctggagcagattgtgctgaccagagacaagaccgtggtctctgctgaccttctcatagacgaccggccggacatcacaggcaagtggcctgcgacaggggccgagccaacccccagctgggagcatgtcctcttcaccgcctgccacaaccagcacctgcagctgcagcccccccgccgcaggctgcactcgtgggcggacgactggaaggccattctggacagcaagcggccctgctgagctggactgtgcttcgggctcctctgtggggctctgacctcagggacagggaggagttgaggccactgttcagggggctggtggccgtctccactccctaggcaagttctctgaggcagaagggggttccctgttcccagagtctgcagccatcagcaaggaggaccaggaacccggcgactgaggtgcttccaggtggggacaagcccctcttggtctcagccacagcaccccttattccagctgccctgcccaacctgctcaccccacatgaccttctgtgtattcagcaaacactcactaggtgacagcggccaccaggctctgtgctgggggacgatactggccctggcctcgaccagcttagaggtttctcacacctctgttcccagggccccgctcagggcccagcagagagtccgtaggcttgaacatgtgttgagtgcatgaaaaataaatgctgttcatgtgtgtaaaaaaaaaaac

SEQ ID NO: 383237 - DNA, 726 bp, Homo sapiens
agggaagtcgggggaacaccatgtggtgtaagccatcaggaggcggggcacatgtcccttgccagtgctggtggtgacagtgacccgcagtcagtccctgttgactgagcactggctgcgcgtgctgacggcctccttgccgcatctcgtgccatcctcacacccgctgcgaaggcgggtgtgcgtgcagtcacccctttacagaggaaacaagttttggcaaggccagatgcctgcctggatacccaggtttccaccctaggcggctgcgctccaggtctccactgctgagctgaatgccgctttcccacccacaggggccgagccaacccccagctgggagcatgtcctcttcaccgcctgccacaaccagcacctgcagctgcagcccccccgccgcaggctgcactcgtgggcggacgactggaaggccattctggacagcaagcggccctgctgagctggactgtgcttcgggctcctctgtggggctctgacctcagggctcccagctcggggcctgtggggccagtatgctggtctgggagtccctcctagactcctgggccccatgacctcctgctgcatgtcccttcccttccccagccctgccaggccttaacctgatcacggggcagggctgggccctctgggcgcttggacatagacacgtggtcccaggccgttcagcctgacctcaggcagcaggcaccaagctgccagaag

SEQ ID NO: 383238 - DNA, 1624 bp, Homo sapiens
gcgcgtgttcctttagggaccgcgcgcgccgcggcctcgctctggggccggtacttgcgcgcccgcaccccgcgctccccgccccgctccccgtcccgcgctccacgcgcgccccagcgttgggggcttctcctccgcggcgggaatgtctggccggctccggcagcacggcgcggcccaggtccccgcgcccacgacgggccagcgcgctgggccatgatccggctgggcggctggtgtgcgcggcggctctgcagcgcggcggttcccgcggggcggcgcggggcggcgggcgggctgggcctggcgggaggccgcgccctacgggtgctggtggacatggacggcgtgctggctgacttcgagggcggattcctcaggaagttccgcgcgcgctttcccgaccagcccttcatcgcgctggaggaccggcgcggcttctgggtgtcggagcagtacggccgcctgcggccagggctgagcgagaaggccatcagcatttgggagtcaaagaatttcttttttgaacttgagcctctgccaggggccgtggaagctgtcaaggagatggccagcctacaaaacactgacgtcttcatctgcacaagccccatcaagatgttcaagtactgtccctatgagaagtatgcctgggtggagaagtactttggccctgactttctggagcagattgtgctgaccagagacaagaccgtggtctctgctgaccttctcatagacgaccggccggacatcacaggggccgagccaacccccagctgggagcatgtcctcttcaccgcctgccacaaccagcacctgcagctgcagcccccccgccgcaggctgcactcgtgggcggacgactggaaggccattctggacagcaagcggccctgctgagctggactgtgcttcgggctcctctgtggggctctgacctcagggctcccagctcggggcctgtggggccagtatgctggtctgggagtccctcctagactcctgggccccatgacctcctgctgcatgtcccttcccttccccagccctgccaggccttaacctgatcacggggcagggctgggccctctgggcgcttggacatagacacgtggtcccaggccgttcagcctgacctcaggcagcaggcaccaagctgccagaagcccaggggctcaggacagggaggagttgaggccactgttcagggggctggtggccgtctccactccctaggcaagttctctgaggcagaagggggttccctgttcccagagtctgcagccatcagcaaggaggaccaggaacccggcgactgaggtgcttccaggtggggacaagcccctcttggtctcagccacagcaccccttattccagctgccctgcccaacctgctcaccccacatgaccttctgtgtattcagcaaacactcactaggtgacagcggccaccaggctctgtgctgggggacgatactggccctggcctcgaccagcttagaggtttctcacacctctgttcccagggccccgctcagggcccagcagagagtccgtaggcttgaacatgtgttgagtgcatgaaaaataaatgctgttcatgtgtgtaaaaaaaaaaac

SEQ ID NO: 383239 - DNA, 1421 bp, Homo sapiens
ggcctcaggtcccagagagctccagcaggtgtaggagtccatgggcctgacacctttgctggtctctgctggatcccgacgaagtcaggtcctttctggaaaggggttcgaagtccacatactctccgcactacccccaggaagtacgtccttgggtgtgtgtttgggggagtgagaggaatgaagaaccactccccctatagcctggccatactccccaagatgagggcagtaaggtgctgaggaccctggaagtaacttgcttttctcaacttctcaggagaaggccatcagcatttgggagtcaaagaatttcttttttgaacttgagcctctgccaggggccgtggaagctgtcaaggagatggccagcctacaaaacactgacgtcttcatctgcacaagccccatcaagatgttcaagtactgtccctatgagaagtatgcctgggtggagaagtactttggccctgactttctggagcagattgtgctgaccagagacaagaccgtggtctctgctgaccttctcatagacgaccggccggacatcacaggggccgagccaacccccagctgggagcatgtcctcttcaccgcctgccacaaccagcacctgcagctgcagcccccccgccgcaggctgcactcgtgggcggacgactggaaggccattctggacagcaagcggccctgctgagctggactgtgcttcgggctcctctgtggggctctgacctcagggctcccagctcggggcctgtggggccagtatgctggtctgggagtccctcctagactcctgggccccatgacctcctgctgcatgtcccttcccttccccagccctgccaggccttaacctgatcacggggcagggctgggccctctgggcgcttggacatagacacgtggtcccaggccgttcagcctgacctcaggcagcaggcaccaagctgccagaagcccaggggctcaggacagggaggagttgaggccactgttcagggggctggtggccgtctccactccctaggcaagttctctgaggcagaagggggttccctgttcccagagtctgcagccatcagcaaggaggaccaggaacccggcgactgaggtgcttccaggtggggacaagcccctcttggtctcagccacagcaccccttattccagctgccctgcccaacctgctcaccccacatgaccttctgtgtattcagcaaacactcactaggtgacagcggccaccaggctctgtgctgggggacgatactggccctggcctcgaccagcttagaggtttctcacacctctgttcccagggccccgctcagggcccagcagagagtccgtaggcttgaacatgtgttgagtgcatgaaaaataaatgctgttcatgtgtgtaaaaaaaaaaac

SEQ ID NO: 383240 - DNA, 3304 bp, Homo sapiens
acgcggaggcgggcgcgcgccccgcaggggagggggcggagagcgcgagaaggagggaggaggcgtccccgtgcgggagcccggctgaccgcgccagacccagacagagcatcgcggctttggctgcaacaggcggtgggctcggctcgggggcggaggcggcgaaagggcggggagcgcgaggaggagcgacctggcctcaccgctgccgcctcttccccgccgcatggacgagcgcctcagccttctgcgctcgccgccgccgccctcagcccgccaccgcgcccaccctcctcagcgcccagcgagcagcggcggtgcccacacgctggtgaaccacggctacgcggagcccgccgcaggccgcgagctgccgcccgacatgaccgtggtgcccggggaccacctgctggagccggaggtggccgatggtggaggggccccgcctcaaggcggctgtggcggcggcggctgcgaccgctacgagccgctgccgccctcactgccggccgcgggcgagcaggactgctgcggggagcgcgtggtcatcaacatctccgggctgcgcttcgagacgcagctgaagaccctttgccagttccccgagacgctgctgggcgaccccaagcggcgcatgaggtacttcgacccgctccgcaacgagtacttcttcgaccgcaaccggcccagcttcgacgccatcctctactactatcagtccgggggccgcatccgccggccggtcaacgtgcccatcgacattttctccgaggagatccgcttctaccagctgggcgaggaggccatggagaagttccgcgaggacgagggcttcctgcgggaggaggagcggcccttgccccgccgcgacttccagcgccaggtgtggctgctcttcgagtaccccgagagctccgggccggcccggggcatcgccatcgtgtccgtgctggtcatcctcatctccattgtcatcttctgcctggagacgctgccggagttccgcgacgagaaggactaccccgcctcgacgtcgcaggactcattcgaagcagccggcaacagcacgtcggggtcccgcgcaggagcctccagcttctccgatcccttcttcgtggtggagacgctgtgcatcatctggttctccttcgaactgctggtgcggttcttcgcttgtcctagcaaagccaccttctcgcgaaacatcatgaacctgatcgacattgtggccatcattccttattttatcactctgggtaccgagctggccgaacgacagggcaatggacagcaggccatgtctctggccatcctgagggtcatccgcctggtaagggtcttccgcatcttcaagctgtcgcgccactccaaggggctgcagatcctcgggcaaacgctgaaggcgtccatgcgggagctgggattgctcatcttcttcctctttattggggtcatccttttctccagcgcggtctactttgccgaggcagacgaccccacttcaggtttcagcagcatcccggatgccttctggtgggcagtggtaaccatgacaacagtgggttacggcgatatgcacccagtgaccatagggggcaagattgtgggatctctctgtgccatcgccggtgtcttgaccatcgcattgccagttcccgtgattgtttccaacttcaattacttctaccaccgggagacagaaggggaagagcaatcccagtacatgcacgtgggaagttgccagcacctctcctcttcagccgaggagctccgaaaagcaaggagtaactcgactctgagtaagtcggagtatatggtgatcgaagaggggggtatgaaccatagcgctttcccccagacccctttcaaaacgggcaattccactgccacctgcaccacgaacaataatcccaactcttgtgtcaacatcaaaaagatattcaccgatgtttaatatgtgatacaagtgacatgctgtgctcagtattgtgtggaacgtgcccccttggtctgcctatgcccttgttttatacatttccagaccattcatcaaggaaaggacctgaagaagtggaaagcacacttcattctccctctccctgctgcttcatactgaaacaggtgcctgttttgcaagtgggctgcattctctcagctctccttttccctcttaccctctctctctgaacattgtaaacaacagacttacgttaaacttcatttctagtacacgccctatttaaaaaagagcagtacatcctgggaggaaatgaaactaaagaacagttagagtaactgtttaacctcagaattttaaaggcagttgtttctttcctaagcacatcaattcgtagtaaatgatgcttcggtttgatggacctttcaacgttatttattgaatatgtatttcggtgtgcctaccctgtagatatgtggatgaagagtctaactagaataatgacttgtaaacccaccatgagttatttggtttttgacttaaattcctatttgaatcccctttcccggaattttaagtgtctctacaactttgaataaagggaaatgcccccaagatgtcctgatctgacatattagtttaattctttcgggcttgctaagcatttctaaagcattagactaacagattcctgtgaagttctgtgcatatgtcccagccccaacaactatcaaagtctagaaacagatgttttcagtgttgctgagagaaacaaaaaatttcctaatgcatctgagagataagcttcggcagtatcacaagaagattaaagtggcagacaccccttccagcggaagttactaattcggacctgactgatgcagtttccatagcaacccatgtttcctgggaaacccgaaaaaggttgtcatggcatctcttgcacagtaacctttccagatggttcctacttaaatgatttcataaggaaaaccactgtttgaataagccgcacaaaaaataaagttaagtctgagactctaaggaggtgaaatgaatcccaaatgcattttttaactatgaaaatcattatgtcattccataatgactgaatcaaggaggaaaatatggtgtttggaatgttagatattaaccacaataaggcatgatctggattaaatgccatttattaggcaataatttttaaagatgcttcccaagaactttcaagccaacaaatgaaatttaaaagcaaatgtaaaagtgttcctgtacataagcaaatgagagattcgatcagtgtgcctgaaaccttactacaagggaccttcaggccttttctctttt

SEQ ID NO: 383241 - DNA, 530 bp, Homo sapiens
gatgcagtttccatagcaacccatgtttcctgggaaacccgaaaaaggttgtcatggcatctcttgctctctagccccacctcccagcccctgccgtttccacagtaacctttccagatggttcctacttaaatgatttcataaggaaaaccactgtttgaataagccgcacaaaaaataaagttaagtctgagactctaaggaggtgaaatgaatcccaaatgcattttttaactatgaaaatcattatgtcattccataatgactgaatcaaggaggaaaatatggtgtttggaatgttagatattaaccacaataaggcatgatctggattaaatgccatttattaggcaataatttttaaagatgcttctctacagttttctttctccaagaactttcaagccaacaaatgaaatttaaaagcaaatgtaaaagtgttcctgtacataagcaaatgagagattcgatcagtgtgcctgaaaccttactacaagggaccttcaggccttttctcttttaaaaaaaaa

SEQ ID NO: 383242 - DNA, 403 bp, Homo sapiens
cctggcctcggataaattcccttggtgtagccgtgaaatgacctatatacccagaaaccagttaattattgccctaggatcttcaagctaaatatgaatagacaaaaacagtcctcctatagaggaatggttcacagagtggatggaagtcccaggggtatgatatgggcagggaactgtcatgtgtattgaggtaaggtacaaaaagctgctttcgcttcagacacaagggacattttattcctaggagaacaccctttgtaaatgtggatgttcacagttatgagtggggtatgagcctgcagtgtatgttttgcagctctcggagctctggcggtccaccaggaaatacctgcagcctgacaacctttccaaggctgaggctgtcagaaacttcctggcc

SEQ ID NO: 383243 - DNA, 393 bp, Homo sapiens
attccactgtgtgcctcagtcaagcaaccaatgcaaaactttgtaaaactgtaggttgctttcttggacccaagaataaagccagtctcacccaagtcttcttcaatgtatggtcatgcatatatctaaggtatatgatttttcaggcagtagtggaagctaagaagttaatcctgggaggacttgaaaaagcagagaaaaaagaggacaccaggatgtatctgctggctttgaagaatgccctgcttccagaaggcatcccaagtcttctgaagtatgcagaagcaggagaagggcccatcagccacctggctaccactgctctccagagatatgatctccctttcataactgatgaggtaaaatctccaagaatatttgcaacatttacag

SEQ ID NO: 383244 - DNA, 3939 bp, Homo sapiens
gttctgaagagggtcactccctcactggctgccattgaaagagtccacttctcagtgactcctagctgggcactggatgcagttgaggattgctggtcaatatgattcttcttgctgtgctttttctctgcttcatttcctcatattcagcttctgttaaaggtcacacaactggtctctcattaaataatgaccggctgtacaagctcacgtactccactgaagttcttcttgatcggggcaaaggaaaactgcaagacagcgtgggctaccgcatttcctccaacgtggatgtggccttactatggaggaatcctgatggtgatgatgaccagttgatccaaataacgatgaaggatgtaaatgttgaaaatgtgaatcagcagagaggagagaagagcatcttcaaaggaaaaagcccatctaaaataatgggaaaggaaaacttggaagctctgcaaagacctacgctccttcatctaatccatggaaaggtcaaagagttctactcatatcaaaatgaggcagtggccatagaaaatatcaagagaggtctggctagcctatttcagacacagttaagctctggaaccaccaatgaggtagatatctctggaaattgtaaagtgacctaccaggctcatcaagacaaagtgatcaaaattaaggccttggattcatgcaaaatagcgaggtctggatttacgaccccaaatcaggtcttgggtgtcagttcaaaagctacatctgtcaccacctataagatagaagacagctttgttatagctgtgcttgctgaagaaacacacaattttggactgaatttcctacaaaccattaaggggaaaatagtatcgaagcagaaattagagctgaagacaaccgaagcaggcccaagattgatgtctggaaagcaggctgcagccataatcaaagcagttgattcaaagtacacggccattcccattgtggggcaggtcttccagagccactgtaaaggatgtccttctctctcggagctctggcggtccaccaggaaatacctgcagcctgacaacctttccaaggctgaggctgtcagaaacttcctggccttcattcagcacctcaggactgcgaagaaagaagagatccttcaaatactaaagatggaaaataaggaagtattacctcagctggtggatgctgtcacctctgctcagacctcagactcattagaagccattttggactttttggatttcaaaagtgacagcagcattatcctccaggagaggtttctctatgcctgtggatttgcttctcatcccaatgaagaactcctgagagccctcattagtaagttcaaaggttctattggtagcagtgacatcagagaaactgttatgatcatcactgggacacttgtcagaaagttgtgtcagaatgaaggctgcaaactcaaagcagtagtggaagctaagaagttaatcctgggaggacttgaaaaagcagagaaaaaagaggacaccaggatgtatctgctggctttgaagaatgccctgcttccagaaggcatcccaagtcttctgaagtatgcagaagcaggagaagggcccatcagccacctggctaccactgctctccagagatatgatctccctttcataactgatgaggtgaagaagaccttaaacagaatataccaccaaaaccgtaaagttcatgaaaagactgtgcgcactgctgcagctgctatcattttaaataacaatccatcctacatggacgtcaagaacatcctgctgtctattggggagcttccccaagaaatgaataaatacatgctcgccattgttcaagacatcctacgttttgaaatgcctgcaagcaaaattgtccgtcgagttctgaaggaaatggtcgctcacaattatgaccgtttctccaggagtggatcttcttctgcctacactggctacatagaacgtagtccccgttcggcatctacttacagcctagacattctctactcgggttctggcattctaaggagaagtaacctgaacatctttcagtacattgggaaggctggtcttcacggtagccaggtggttattgaagcccaaggactggaagccttaatcgcagccacccctgacgagggggaggagaaccttgactcctatgctggtatgtcagccatcctctttgatgttcagctcagacctgtcacctttttcaacggatacagtgatttgatgtccaaaatgctgtcagcatctggcgaccctatcagtgtggtgaaaggacttattctgctaatagatcattctcaggaacttcagttacaatctggactaaaagccaatatagaggtccagggtggtctagctattgatatttcaggtgcaatggagtttagcttgtggtatcgtgagtctaaaacccgagtgaaaaatagggtgactgtggtaataaccactgacatcacagtggactcctcttttgtgaaagctggcctggaaaccagtacagaaacagaagcaggcttggagtttatctccacagtgcagttttctcagtacccattcttagtttgcatgcagatggacaaggatgaagctccattcaggcaatttgagaaaaagtacgaaaggctgtccacaggcagaggttatgtctctcagaaaagaaaagaaagcgtattagcaggatgtgaattcccgctccatcaagagaactcagagatgtgcaaagtggtgtttgcccctcagccggatagtacttccagcggatggttttgaaactgacctgtgatattttacttgaatttgtctccccgaaagggacacaatgtggcatgactaagtacttgctctctgagagcacagcgtttacatatttacctgtatttaagatttttgtaaaaagctacaaaaaactgcagtttgatcaaatttgggtatatgcagtatgctacccacagcgtcattttgaatcatcatgtgacgctttcaacaacgttcttagtttacttatacctctctcaaatctcatttggtacagtcagaatagttattctctaagaggaaactagtgtttgttaaaaacaaaaataaaaacaaaaccacacaaggagaacccaattttgtttcaacaatttttgatcaatgtatatgaagctcttgataggacttccttaagcatgacgggaaaaccaaacacgttccctaatcaggaaaaaaaaaaaaaaaaaaaagtaagacacaaacaaaccattttttttctctttttttggagttgggggcccagggagaagggacaagacttttaaaagacttgttagccaacttcaagaattaatatttatgtctctgttattgttagttttaagccttaaggtagaaggcacatagaaataacatctcatctttctgctgaccattttagtgaggttgttccaaagacattcaggtctctacctccagccctgcaaaaatattggacctagcacagaggaatcaggaaaattaatttcagaaactccatttgatttttcttttgctgtgtctttttgagactgtaatatggtacactgtcctctaagggacatcctcattttatctcacctttttgggggtgagagctctagttcatttaactgtactctgcacaatagctaggatgactaagagaacattgcttcaagaaactggtggatttggatttccaaaatatgaaataaggaaaaaaatgtttttatttgtatgaattaaaagatccatgttgaacatttgcaaatatttattaataaacagatgtggtgataaacccaaaacaaatgacaggtgcttattttccactaaacacagacacatgaaatgaaagtttagctagcccactatttgttgtaaattgaaaacgaagtgtgataaaataaatatgtagaaatcaaaa

SEQ ID NO: 383245 - DNA, 968 bp, Homo sapiens
  misc_feature (769)..(769): n is a, c, g, or t
  misc_feature (774)..(774): n is a, c, g, or t
  misc_feature (776)..(776): n is a, c, g, or t
  misc_feature (783)..(784): n is a, c, g, or t
  misc_feature (793)..(793): n is a, c, g, or t
  misc_feature (808)..(808): n is a, c, g, or t
  misc_feature (816)..(816): n is a, c, g, or t
  misc_feature (819)..(819): n is a, c, g, or t
  misc_feature (822)..(822): n is a, c, g, or t
  misc_feature (826)..(826): n is a, c, g, or t
  misc_feature (840)..(840): n is a, c, g, or t
  misc_feature (849)..(849): n is a, c, g, or t
gagcgggcttacacagtatggccggcgacattagctagcgctcgctctactctctctaacgggaaagcagcggaatacaagagactgaactgtatctgcctctatttccaaaagactcacgttcaactttcgctcacacaaagccgggaaaattttattagtcctttttttaaaaaaagttaatataaaattatagcaaaaaaaaaaaggaacctgaactttagtaacacagctggaacaatccgcagcggcggcggcagcggcgggagaagaggtttaatttagttgattttctgtggttgttggttgttcgctagtctcacggtgatggaagctgcacattttttcgaagggaccgagaagctgctggaggtttggttctcccggcagcagcccgacgcaaaccaaggatctggggatcttcgcactatcccaagatctgagtgggacatacttttgaaggatgtgcaatgttcaatcataagtgtgacaaaaactgacaagcaggaagcttatgtactcagtgagagtagcatgtttgtctccaagagacgtttcattttgaagacatgtggtaccaccctcttgctgaaagcactggttcccctgttgaagcttgctagggattacagtgggtttgactcaattcaaagcttcttttattctcgtaagaatttcatgaagccttctcaccaagggtacccacaccggaatttccaggaagaaatagagtttcttaatgcaattttcccaaaatggagcagatatngttgngnacggttnnaattctgcntgtggtattattatntctggatnccnaanaagngggtatcagtgcanataacttgnaatttgttagtgagtgaccggtttgaccctttttacttaagaggtgttcgccggggctcgggaagggatgacgaaagttttgagcaggcactgtttcaggagaagggtgtgtcccacat

SEQ ID NO: 383246 - DNA, 749 bp, Homo sapiens
aggcaaaggggaagctgttgattgcaaggtgtcagcccagaaactgctgagcttactgaaaaggacgagttcaagtctgaagcccacgtggacttctatgacaaataagcccatgtttttggcttcttgaacctttttgcccccactgttagacataccccagagccctgtggctccccacaccctgccataggggcagtcctgccttacacatagaagcattcatgcctgctgccctgccctcaggcacagccagctgtgagctcacaggtcattggccttaccagttgtcaggagtctgtgctgtgcaccctgggttataaggaggcttaggagagaggttatgggtattggtgtctctatccccaggaatagaacttaaggggtgggaagaacaggaacctcgtgccgaattcggcacgaggtggactttgttcgtaaacaatatcccaatagatttgttgacttgaggtctggtttggttttgtttttgttttgttttgttttgttttgtttccaatagaattaagaattctaatgttgaaaaactgcacaaatttttatgggacaaagcctagaaaagagaaatgtagtttgaatcataatctaaatcatcgtatgatagaagagggaaagttttggtgccataatttctcctttcactggtgttggacttaaatcagttgaaatgtatttctgtaccacaatttacgcttcaataaaagtttaattgtctagtgacattcaga

SEQ ID NO: 383247 - DNA, 287 bp, Homo sapiens
gagcgggcttacacagtatggccggcgacattagctagcgctcgctctactctctctaacgggaaagcagcggaatacaagagactgaactgtatctgcctctatttccaaaagactcacgttcaactttcgctcacacaaagccgggaaaattttattagtcctttttttaaaaaaagttaatataaaattatagcaaaaaaaaaaaggaacctgaactttagtaacacagctggaacaatccgcagcggcggcggcacttgggcgacagagtgagacttcatctc

SEQ ID NO: 383248 - DNA, 3598 bp, Homo sapiens
gagcgggcttacacagtatggccggcgacattagctagcgctcgctctactctctctaacgggaaagcagcggaatacaagagactgaactgtatctgcctctatttccaaaagactcacgttcaactttcgctcacacaaagccgggaaaattttattagtcctttttttaaaaaaagttaatataaaattatagcaaaaaaaaaaaggaacctgaactttagtaacacagctggaacaatccgcagcggcggcggcagcggcgggagaagaggtttaatttagttgattttctgtggttgttggttgttcgctagtctcacggtgatggaagctgcacattttttcgaagggaccgagaagctgctggaggtttggttctcccggcagcagcccgacgcaaaccaaggatctggggatcttcgcactatcccaagatctgagtgggacatacttttgaaggatgtgcaatgttcaatcataagtgtgacaaaaactgacaagcaggaagcttatgtactcagtgagagtagcatgtttgtctccaagagacgtttcattttgaagacatgtggtaccaccctcttgctgaaagcactggttcccctgttgaagcttgctagggattacagtgggtttgactcaattcaaagcttcttttattctcgtaagaatttcatgaagccttctcaccaagggtacccacaccggaatttccaggaagaaatagagtttcttaatgcaattttcccaaatggagcagcatattgtatgggacgtatgaattctgactgttggtacttatatactctggatttcccagagagtcgggtaatcagtcagccagatcaaaccttggaaattctgatgagtgagcttgacccagcagttatggaccagttctacatgaaagatggtgttactgcaaaggatgtcactcgtgagagtggaattcgtgacctgataccaggttctgtcattgatgccacaatgttcaatccttgtgggtattcgatgaatggaatgaaatcggatggaacttattggactattcacatcactccagaaccagaattttcttatgttagctttgaaacaaacttaagtcagacctcctatgatgacctgatcaggaaagttgtagaagtcttcaagccaggaaaatttgtgaccaccttgtttgttaatcagagttctaaatgtcgcacagtgcttgcttcgccccagaagattgaaggttttaagcgtcttgattgccagagtgctatgttcaatgattacaattttgtttttaccagttttgctaagaagcagcaacaacagcagagttgattaagaaaaatgaagaaaaaacgcaaaaagagaacacatgtagaaggtggtggatgctttctagatgtcgatgctgggggcagtgctttccataaccaccactgtgtagttgcagaaagccctagatgtaatgatagtgtaatcattttgaattgtatgcattattatatcaaggagttagatatcttgcatgaatgctctcttctgtgtttaggtattctctgccactcttgctgtgaaattgaagtgcatgtagaaaaaaccttttactatatgaaactttacaacacttgtgaaagcaactcaatttggtttatgcacagtgtaatatttctccaagtatcatccaaaattccccacagacaaggctttcgtcctcattaggtgttggcctcagcctaaccctctaggactgttctattaaattgctgccagaattttacatccagttacctccactttctagaacatattctttactaatgttattgaaaccaatttctacttcatactgatgtttttggaaacagcaattaaagtttttcttccatgagttgagtccttaagaaaatgattccagttactcattttgcatatttgctattttaacattattggaccctgcatttatagtcctttgatttcttccctctccctggtgtctcccccaagaccccaaataaagcaatacactgttaacactgtgggtttatatactaattctataccccagatggggaatgggggagatggtccctgggcttaatattctttaaagggcatgggaatttagcctctcttttattgtaatgtgctcttttggaaaatagttggttagcagggaagacccagagttgtagattgagattagggtgtactggctgaactgtggaaaacatacaattctgtgttcctcagtaaatgagattagcgtctaatgagtagcacccctttactaacttagtagtagtataaaatcatttttatttagttaattaccagagagatttagcataattttgttctggattcagtaaatcaagtcagcttggatcattcaccttaacttttcctttagcagccatttccactagtttccattaagtagtgttctataaactttgatccaaagcagaatcaatgtcttttccatctcgtgacttaaagttctgtgactgtgatgcatgtgagtgttccgacttcatctgttcctcttaactacggtgtttcccttaccatggcattcataggatgaaatgaatgactgcccagaatgagaatttgtccagattattcagataaacatcataaagcagaatacattataaataagtagaatatgaataaatagaataataaaattccaaaatactcaatgggaaatgactagtaatataggctttcaagagttggtaccttttagctatatttgcagattctctgggattttaaggaactgagaaaacagcaaagttgactaaattttatatttcttgtcctctaaatattttgataatttctggattgatgcagtgatgtttttgttccttccgtatttataaatgaaacacctttttttagtgtttctaaacctaaaatctacttggtttgaaatcaagtggttggaacactgtttgacttttatttgaagcatgttgttgattgaaaatttcattgaggaagttttcaatcagtgtgatcagtttgattctgtaatgagcacagcacctaatattttgaggagctctgttttgaggaccaatgcttaaggtggactttgttcgtaaacaatatcccaatagatttgttgacttgaggtctggtttggttttgtttttgttttgttttgttttgttttgtttccaatagaattaagaattctaatgttgaaaaactgcacaaatttttatgggacaaagcctagaaaagagaaatgtagtttgaatcataatctaaatcatcgtatgatagaagagggaaagttttggtgccataatttctcctttcactggtgttggacttaaatcagttgaaatgtatttctgtaccacaatttacgcttcaataaaagtttaattgtctagtgacattcagaaaaaaaaaggggggcgcacaaaataccccaagggcccagttccgtacccactttttcaagggctaaggagggtataaagagagaggccggaacagcgcgggaacgtctggcttggaggccctctggggatggacccgaaccggaaaaagataggccttccgaacattaaag

SEQ ID NO: 383249 - DNA, 3524 bp, Homo sapiens
gagcgggcttacacagtatggccggcgacattagctagcgctcgctctactctctctaacgggaaagcagcggaatacaagagactgaactgtatctgcctctatttccaaaagactcacgttcaactttcgctcacacaaagccgggaaaattttattagtcctttttttaaaaaaagttaatataaaattatagcaaaaaaaaaaaggaacctgaactttagtaacacagctggaacaatccgcagcggcggcggcagcggcgggagaagaggtttaatttagttgattttctgtggttgttggttgttcgctagtctcacggtgatggaagctgcacattttttcgaagggaccgagaagctgctggaggtttggttctcccggcagcagcccgacgcaaaccaaggatctggggatcttcgcactatcccaagatctgagtgggacatacttttgaaggatgtgcaatgttcaatcataagtgtgacaaaaactgacaagcaggaagcttatgtactcagtgagagtagcatgtttgtctccaagagacgtttcattttgaagacatgtggtaccaccctcttgctgaaagcactggttcccctgttgaagcttgctagggattacagtgggtttgactcaattcaaagcttcttttattctcgtaagaatttcatgaagccttctcaccaagggtacccacaccggaatttccaggaagaaatagagtttcttaatgcaattttcccaaatggagcagcatattgtatgggacgtatgaattctgactgttggtacttatatactctggatttcccagagagtcgggtaatcagtcagccagatcaaaccttggaaattctgatgagtgagcttgacccagcagttatggaccagttctacatgaaagatggtgttactgcaaaggatgtcactcgtgagagtggaattcgtgacctgataccaggttctgtcattgatgccacaatgttcaatccttgtgggtattcgatgaatggaatgaaatcggatggaacttattggactattcacatcactccagaaccagaattttcttatgttagctttgaaacaaacttaagtcagacctcctatgatgacctgatcaggaaagttgtagaagtcttcaagccaggaaaatttgtgaccaccttgtttgttaatcagagttctaaatgtcgcacagtgcttgcttcgccccagaagattgaaggttttaagcgtcttgattgccagagtgctatgttcaatgattacaattttgtttttaccagttttgctaagaagcagcaacaacagcagagttgattaagaaaaatgaagaaaaaacgcaaaaagagaacacatgtagaaggtggtggatgctttctagatgtcgatgctgggggcagtgctttccataaccaccactgtgtagttgcagaaagccctagatgtaatgatagtgtaatcattttgaattgtatgcattattatatcaaggagttagatatcttgcatgaatgctctcttctgtgtttaggtattctctgccactcttgctgtgaaattgaagtgcatgtagaaaaaaccttttactatatgaaactttacaacacttgtgaaagcaactcaatttggtttatgcacagtgtaatatttctccaagtatcatccaaaattccccacagacaaggctttcgtcctcattaggtgttggcctcagcctaaccctctaggactgttctattaaattgctgccagaattttacatccagttacctccactttctagaacatattctttactaatgttattgaaaccaatttctacttcatactgatgtttttggaaacagcaattaaagtttttcttccatgagttgagtccttaagaaaatgattccagttactcattttgcatatttgctattttaacattattggaccctgcatttatagtcctttgatttcttccctctccctggtgtctcccccaagaccccaaataaagcaatacactgttaacactgtgggtttatatactaattctataccccagatggggaatgggggagatggtccctgggcttaatattctttaaagggcatgggaatttagcctctcttttattgtaatgtgctcttttggaaaatagttggttagcagggaagacccagagttgtagattgagattagggtgtactggctgaactgtggaaaacatacaattctgtgttcctcagtaaatgagattagcgtctaatgagtagcacccctttactaacttagtagtagtataaaatcatttttatttagttaattaccagagagatttagcataattttgttctggattcagtaaatcaagtcagcttggatcattcaccttaacttttcctttagcagccatttccactagtttccattaagtagtgttctataaactttgatccaaagcagaatcaatgtcttttccatctcgtgacttaaagttctgtgactgtgatgcatgtgagtgttccgacttcatctgttcctcttaactacggtgtttcccttaccatggcattcataggatgaaatgaatgactgcccagaatgagaatttgtccagattattcagataaacatcataaagcagaatacattataaataagtagaatatgaataaatagaataataaaattccaaaatactcaatgggaaatgactagtaatataggctttcaagagttggtaccttttagctatatttgcagattctctgggattttaaggaactgagaaaacagcaaagttgactaaattttatatttcttgtcctctaaatattttgataatttctggattgatgcagtgatgtttttgttccttccgtatttataaatgaaacacctttttttagtgtttctaaacctaaaatctacttggtttgaaatcaagtggttggaacactgtttgacttttatttgaagcatgttgttgattgaaaatttcattgaggaagttttcaatcagtgtgatcagtttgattctgtaatgagcacagcacctaatattttgaggagctctgttttgaggaccaatgcttaaggtggactttgttcgtaaacaatatcccaatagatttgttgacttgaggtctggtttggttttgtttttgttttgttttgttttgttttgtttccaatagaattaagaattctaatgttgaaaaactgcacaaatttttatgggacaaagcctagaaaagagaaatgtagtttgaatcataatctaaatcatcgtatgatagaagagggaaagttttggtgccataatttctcctttcactggtgttggacttaaatcagttgaaatgtatttctgtaccacaatttacgcttcaataaaagtttaattgtctagtgacattcagaataaaaaaaaagagaaaaacaagaggggaaaggaaaaaaaaaatattgtggggggtctgaaatttaaaaattgggggggccaagagagaaagaagtc

SEQ ID NO: 383250 - DNA, 3502 bp, Homo sapiens
gagcgggcttacacagtatggccggcgacattagctagcgctcgctctactctctctaacgggaaagcagcggaatacaagagactgaactgtatctgcctctatttccaaaagactcacgttcaactttcgctcacacaaagccgggaaaattttattagtcctttttttaaaaaaagttaatataaaattatagcaaaaaaaaaaaggaacctgaactttagtaacacagctggaacaatccgcagcggcggcggcagcggcgggagaagaggtttaatttagttgattttctgtggttgttggttgttcgctagtctcacggtgatggaagctgcacattttttcgaagggaccgagaagctgctggaggtttggttctcccggcagcagcccgacgcaaaccaaggatctggggatcttcgcactatcccaagatctgagtgggacatacttttgaaggatgtgcaatgttcaatcataagtgtgacaaaaactgacaagcaggaagcttatgtactcagtgagagtagcatgtttgtctccaagagacgtttcattttgaagacatgtggtaccaccctcttgctgaaagcactggttcccctgttgaagcttgctagggattacagtgggtttgactcaattcaaatggagtttcgctcttgtttcccaggctggaatgcaatagcacgatctcagctcactgcaatctgcacctcccagagcttcttttattctcgtaagaatttcatgaagccttctcaccaagggtacccacaccggaatttccaggaagaaatagagtttcttaatgcaattttcccaaatggagcagcatattgtatgggacgtatgaattctgactgttggtacttatatactctggatttcccagagagtcgggtaatcagtcagccagatcaaaccttggaaattctgatgagtgagcttgacccagcagttatggaccagttctacatgaaagatggtgttactgcaaaggatgtcactcgtgagagtggaattcgtgacctgataccaggttctgtcattgatgccacaatgttcaatccttgtgggtattcgatgaatggaatgaaatcggatggaacttattggactattcacatcactccagaaccagaattttcttatgttagctttgaaacaaacttaagtcagacctcctatgatgacctgatcaggaaagttgtagaagtcttcaagccaggaaaatttgtgaccaccttgtttgttaatcagagttctaaatgtcgcacagtgcttgcttcgccccagaagattgaaggttttaagcgtcttgattgccagagtgctatgttcaatgattacaattttgtttttaccagttttgctaagaagcagcaacaacagcagagttgattaagaaaaatgaagaaaaaacgcaaaaagagaacacatgtagaaggtggtggatgctttctagatgtcgatgctgggggcagtgctttccataaccaccactgtgtagttgcagaaagccctagatgtaatgatagtgtaatcattttgaattgtatgcattattatatcaaggagttagatatcttgcatgaatgctctcttctgtgtttaggtattctctgccactcttgctgtgaaattgaagtgcatgtagaaaaaaccttttactatatgaaactttacaacacttgtgaaagcaactcaatttggtttatgcacagtgtaatatttctccaagtatcatccaaaattccccacagacaaggctttcgtcctcattaggtgttggcctcagcctaaccctctaggactgttctattaaattgctgccagaattttacatccagttacctccactttctagaacatattctttactaatgttattgaaaccaatttctacttcatactgatgtttttggaaacagcaattaaagtttttcttccatgagttgagtccttaagaaaatgattccagttactcattttgcatatttgctattttaacattattggaccctgcatttatagtcctttgatttcttccctctccctggtgtctcccccaagaccccaaataaagcaatacactgttaacactgtgggtttatatactaattctataccccagatggggaatgggggagatggtccctgggcttaatattctttaaagggcatgggaatttagcctctcttttattgtaatgtgctcttttggaaaatagttggttagcagggaagacccagagttgtagattgagattagggtgtactggctgaactgtggaaaacatacaattctgtgttcctcagtaaatgagattagcgtctaatgagtagcacccctttactaacttagtagtagtataaaatcatttttatttagttaattaccagagagatttagcataattttgttctggattcagtaaatcaagtcagcttggatcattcaccttaacttttcctttagcagccatttccactagtttccattaagtagtgttctataaactttgatccaaagcagaatcaatgtcttttccatctcgtgacttaaagttctgtgactgtgatgcatgtgagtgttccgacttcatctgttcctcttaactacggtgtttcccttaccatggcattcataggatgaaatgaatgactgcccagaatgagaatttgtccagattattcagataaacatcataaagcagaatacattataaataagtagaatatgaataaatagaataataaaattccaaaatactcaatgggaaatgactagtaatataggctttcaagagttggtaccttttagctatatttgcagattctctgggattttaaggaactgagaaaacagcaaagttgactaaattttatatttcttgtcctctaaatattttgataatttctggattgatgcagtgatgtttttgttccttccgtatttataaatgaaacacctttttttagtgtttctaaacctaaaatctacttggtttgaaatcaagtggttggaacactgtttgacttttatttgaagcatgttgttgattgaaaatttcattgaggaagttttcaatcagtgtgatcagtttgattctgtaatgagcacagcacctaatattttgaggagctctgttttgaggaccaatgcttaaggtggactttgttcgtaaacaatatcccaatagatttgttgacttgaggtctggtttggttttgtttttgttttgttttgttttgttttgtttccaatagaattaagaattctaatgttgaaaaactgcacaaatttttatgggacaaagcctagaaaagagaaatgtagtttgaatcataatctaaatcatcgtatgatagaagagggaaagttttggtgccataatttctcctttcactggtgttggacttaaatcagttgaaatgtatttctgtaccacaatttacgcttcaataaaagtttaattgtctagtgacattcaga

SEQ ID NO: 383251 - DNA, 3046 bp, Homo sapiens
ggcggcaggggccccaggtgggggtcgggggcgcctgcgcgggttgcctccggcagatctgagtgggacatacttttgaaggatgtgcaatgttcaatcataagtgtgacaaaaactgacaagcaggaagcttatgtactcagtgagagtagcatgtttgtctccaagagacgtttcattttgaagacatgtggtaccaccctcttgctgaaagcactggttcccctgttgaagcttgctagggattacagtgggtttgactcaattcaaagcttcttttattctcgtaagaatttcatgaagccttctcaccaagggtacccacaccggaatttccaggaagaaatagagtttcttaatgcaattttcccaaatggagcagcatattgtatgggacgtatgaattctgactgttggtacttatatactctggatttcccagagagtcgggtaatcagtcagccagatcaaaccttggaaattctgatgagtgagcttgacccagcagttatggaccagttctacatgaaagatggtgttactgcaaaggatgtcactcgtgagagtggaattcgtgacctgataccaggttctgtcattgatgccacaatgttcaatccttgtgggtattcgatgaatggaatgaaatcggatggaacttattggactattcacatcactccagaaccagaattttcttatgttagctttgaaacaaacttaagtcagacctcctatgatgacctgatcaggaaagttgtagaagtcttcaagccaggaaaatttgtgaccaccttgtttgttaatcagagttctaaatgtcgcacagtgcttgcttcgccccagaagattgaaggttttaagcgtcttgattgccagagtgctatgttcaatgattacaattttgtttttaccagttttgctaagaagcagcaacaacagcagagttgattaagaaaaatgaagaaaaaacgcaaaaagagaacacatgtagaaggtggtggatgctttctagatgtcgatgctgggggcagtgctttccataaccaccactgtgtagttgcagaaagccctagatgtaatgatagtgtaatcattttgaattgtatgcattattatatcaaggagttagatatcttgcatgaatgctctcttctgtgtttaggtattctctgccactcttgctgtgaaattgaagtgcatgtagaaaaaaccttttactatatgaaactttacaacacttgtgaaagcaactcaatttggtttatgcacagtgtaatatttctccaagtatcatccaaaattccccacagacaaggctttcgtcctcattaggtgttggcctcagcctaaccctctaggactgttctattaaattgctgccagaattttacatccagttacctccactttctagaacatattctttactaatgttattgaaaccaatttctacttcatactgatgtttttggaaacagcaattaaagtttttcttccatgagttgagtccttaagaaaatgattccagttactcattttgcatatttgctattttaacattattggaccctgcatttatagtcctttgatttcttccctctccctggtgtctcccccaagaccccaaataaagcaatacactgttaacactgtgggtttatatactaattctataccccagatggggaatgggggagatggtccctgggcttaatattctttaaagggcatgggaatttagcctctcttttattgtaatgtgctcttttggaaaatagttggttagcagggaagacccagagttgtagattgagattagggtgtactggctgaactgtggaaaacatacaattctgtgttcctcagtaaatgagattagcgtctaatgagtagcacccctttactaacttagtagtagtataaaatcatttttatttagttaattaccagagagatttagcataattttgttctggattcagtaaatcaagtcagcttggatcattcaccttaacttttcctttagcagccatttccactagtttccattaagtagtgttctataaactttgatccaaagcagaatcaatgtcttttccatctcgtgacttaaagttctgtgactgtgatgcatgtgagtgttccgacttcatctgttcctcttaactacggtgtttcccttaccatggcattcataggatgaaatgaatgactgcccagaatgagaatttgtccagattattcagataaacatcataaagcagaatacattataaataagtagaatatgaataaatagaataataaaattccaaaatactcaatgggaaatgactagtaatataggctttcaagagttggtaccttttagctatatttgcagattctctgggattttaaggaactgagaaaacagcaaagttgactaaattttatatttcttgtcctctaaatattttgataatttctggattgatgcagtgatgtttttgttccttccgtatttataaatgaaacacctttttttagtgtttctaaacctaaaatctacttggtttgaaatcaagtggttggaacactgtttgacttttatttgaagcatgttgttgattgaaaatttcattgaggaagttttcaatcagtgtgatcagtttgattctgtaatgagcacagcacctaatattttgaggagctctgttttgaggaccaatgcttaaggtggactttgttcgtaaacaatatcccaatagatttgttgacttgaggtctggtttggttttgtttttgttttgttttgttttgttttgtttccaatagaattaagaattctaatgttgaaaaactgcacaaatttttatgggacaaagcctagaaaagagaaatgtagtttgaatcataatctaaatcatcgtatgatagaagagggaaagttttggtgccataatttctcctttcactggtgttggacttaaatcagttgaaatgtatttctgtaccacaatttacgcttcaataaaagtttaattgtctagtgacattcaga

SEQ ID NO: 383252 - DNA, 2926 bp, Homo sapiens
agcactgtgcgacatttagaactctgattaacaaacaaggtggtcacaaattttcctggcttgaagacatgtggtaccaccctcttgctgaaagcactggttcccctgttgaagcttgctagggattacagtgggtttgactcaattcaaagcttcttttattctcgtaagaatttcatgaagccttctcaccaagggtacccacaccggaatttccaggaagaaatagagtttcttaatgcaattttcccaaatggagcagcatattgtatgggacgtatgaattctgactgttggtacttatatactctggatttcccagagagtcgggtaatcagtcagccagatcaaaccttggaaattctgatgagtgagcttgacccagcagttatggaccagttctacatgaaagatggtgttactgcaaaggatgtcactcgtgagagtggaattcgtgacctgataccaggttctgtcattgatgccacaatgttcaatccttgtgggtattcgatgaatggaatgaaatcggatggaacttattggactattcacatcactccagaaccagaattttcttatgttagctttgaaacaaacttaagtcagacctcctatgatgacctgatcaggaaagttgtagaagtcttcaagccaggaaaatttgtgaccaccttgtttgttaatcagagttctaaatgtcgcacagtgcttgcttcgccccagaagattgaaggttttaagcgtcttgattgccagagtgctatgttcaatgattacaattttgtttttaccagttttgctaagaagcagcaacaacagcagagttgattaagaaaaatgaagaaaaaacgcaaaaagagaacacatgtagaaggtggtggatgctttctagatgtcgatgctgggggcagtgctttccataaccaccactgtgtagttgcagaaagccctagatgtaatgatagtgtaatcattttgaattgtatgcattattatatcaaggagttagatatcttgcatgaatgctctcttctgtgtttaggtattctctgccactcttgctgtgaaattgaagtgcatgtagaaaaaaccttttactatatgaaactttacaacacttgtgaaagcaactcaatttggtttatgcacagtgtaatatttctccaagtatcatccaaaattccccacagacaaggctttcgtcctcattaggtgttggcctcagcctaaccctctaggactgttctattaaattgctgccagaattttacatccagttacctccactttctagaacatattctttactaatgttattgaaaccaatttctacttcatactgatgtttttggaaacagcaattaaagtttttcttccatgagttgagtccttaagaaaatgattccagttactcattttgcatatttgctattttaacattattggaccctgcatttatagtcctttgatttcttccctctccctggtgtctcccccaagaccccaaataaagcaatacactgttaacactgtgggtttatatactaattctataccccagatggggaatgggggagatggtccctgggcttaatattctttaaagggcatgggaatttagcctctcttttattgtaatgtgctcttttggaaaatagttggttagcagggaagacccagagttgtagattgagattagggtgtactggctgaactgtggaaaacatacaattctgtgttcctcagtaaatgagattagcgtctaatgagtagcacccctttactaacttagtagtagtataaaatcatttttatttagttaattaccagagagatttagcataattttgttctggattcagtaaatcaagtcagcttggatcattcaccttaacttttcctttagcagccatttccactagtttccattaagtagtgttctataaactttgatccaaagcagaatcaatgtcttttccatctcgtgacttaaagttctgtgactgtgatgcatgtgagtgttccgacttcatctgttcctcttaactacggtgtttcccttaccatggcattcataggatgaaatgaatgactgcccagaatgagaatttgtccagattattcagataaacatcataaagcagaatacattataaataagtagaatatgaataaatagaataataaaattccaaaatactcaatgggaaatgactagtaatataggctttcaagagttggtaccttttagctatatttgcagattctctgggattttaaggaactgagaaaacagcaaagttgactaaattttatatttcttgtcctctaaatattttgataatttctggattgatgcagtgatgtttttgttccttccgtatttataaatgaaacacctttttttagtgtttctaaacctaaaatctacttggtttgaaatcaagtggttggaacactgtttgacttttatttgaagcatgttgttgattgaaaatttcattgaggaagttttcaatcagtgtgatcagtttgattctgtaatgagcacagcacctaatattttgaggagctctgttttgaggaccaatgcttaaggtggactttgttcgtaaacaatatcccaatagatttgttgacttgaggtctggtttggttttgtttttgttttgttttgttttgttttgtttccaatagaattaagaattctaatgttgaaaaactgcacaaatttttatgggacaaagcctagaaaagagaaatgtagtttgaatcataatctaaatcatcgtatgatagaagagggaaagttttggtgccataatttctcctttcactggtgttggacttaaatcagttgaaatgtatttctgtaccacaatttacgcttcaataaaagtttaattgtctagtgacattcaga

SEQ ID NO: 383253 - DNA, 2984 bp, Homo sapiens
gcctgctgaagtagagtcttagggtgaccccaggggacgtaatgtttccgagaagaaggacagaaagaagactgggagacaccggaactcgaaagaaaatcgatggtactgccttttaaggtctattacttaaacataagtatggctctggttcttaccgcctttaccgtatccttcatgggaagttgatactgatcggaaactgacacagagccttctcacctacactaagggggcctagcatacagaaaggctgtacctggaggaaggaagtgcggagccagcctgagttgggagaagagctccagagaatggagcagcatattgtatgggacgtatgaattctgactgttggtacttatatactctggatttcccagagagtcgggtaatcagtcagccagatcaaaccttggaaattctgatgagtgagcttgacccagcagttatggaccagttctacatgaaagatggtgttactgcaaaggatgtcactcgtgagagtggaattcgtgacctgataccaggttctgtcattgatgccacaatgttcaatccttgtgggtattcgatgaatggaatgaaatcggatggaacttattggactattcacatcactccagaaccagaattttcttatgttagctttgaaacaaacttaagtcagacctcctatgatgacctgatcaggaaagttgtagaagtcttcaagccaggaaaatttgtgaccaccttgtttgttaatcagagttctaaatgtcgcacagtgcttgcttcgccccagaagattgaaggttttaagcgtcttgattgccagagtgctatgttcaatgattacaattttgtttttaccagttttgctaagaagcagcaacaacagcagagttgattaagaaaaatgaagaaaaaacgcaaaaagagaacacatgtagaaggtggtggatgctttctagatgtcgatgctgggggcagtgctttccataaccaccactgtgtagttgcagaaagccctagatgtaatgatagtgtaatcattttgaattgtatgcattattatatcaaggagttagatatcttgcatgaatgctctcttctgtgtttaggtattctctgccactcttgctgtgaaattgaagtgcatgtagaaaaaaccttttactatatgaaactttacaacacttgtgaaagcaactcaatttggtttatgcacagtgtaatatttctccaagtatcatccaaaattccccacagacaaggctttcgtcctcattaggtgttggcctcagcctaaccctctaggactgttctattaaattgctgccagaattttacatccagttacctccactttctagaacatattctttactaatgttattgaaaccaatttctacttcatactgatgtttttggaaacagcaattaaagtttttcttccatgagttgagtccttaagaaaatgattccagttactcattttgcatatttgctattttaacattattggaccctgcatttatagtcctttgatttcttccctctccctggtgtctcccccaagaccccaaataaagcaatacactgttaacactgtgggtttatatactaattctataccccagatggggaatgggggagatggtccctgggcttaatattctttaaagggcatgggaatttagcctctcttttattgtaatgtgctcttttggaaaatagttggttagcagggaagacccagagttgtagattgagattagggtgtactggctgaactgtggaaaacatacaattctgtgttcctcagtaaatgagattagcgtctaatgagtagcacccctttactaacttagtagtagtataaaatcatttttatttagttaattaccagagagatttagcataattttgttctggattcagtaaatcaagtcagcttggatcattcaccttaacttttcctttagcagccatttccactagtttccattaagtagtgttctataaactttgatccaaagcagaatcaatgtcttttccatctcgtgacttaaagttctgtgactgtgatgcatgtgagtgttccgacttcatctgttcctcttaactacggtgtttcccttaccatggcattcataggatgaaatgaatgactgcccagaatgagaatttgtccagattattcagataaacatcataaagcagaatacattataaataagtagaatatgaataaatagaataataaaattccaaaatactcaatgggaaatgactagtaatataggctttcaagagttggtaccttttagctatatttgcagattctctgggattttaaggaactgagaaaacagcaaagttgactaaattttatatttcttgtcctctaaatattttgataatttctggattgatgcagtgatgtttttgttccttccgtatttataaatgaaacacctttttttagtgtttctaaacctaaaatctacttggtttgaaatcaagtggttggaacactgtttgacttttatttgaagcatgttgttgattgaaaatttcattgaggaagttttcaatcagtgtgatcagtttgattctgtaatgagcacagcacctaatattttgaggagctctgttttgaggaccaatgcttaaggtggactttgttcgtaaacaatatcccaatagatttgttgacttgaggtctggtttggttttgtttttgttttgttttgttttgttttgtttccaatagaattaagaattctaatgttgaaaaactgcacaaatttttatgggacaaagcctagaaaagagaaatgtagtttgaatcataatctaaatcatcgtatgatagaagagggaaagttttggtgccataatttctcctttcactggtgttggacttaaatcagttgaaatgtatttctgtaccacaatttacgcttcaataaaagtttaattgtctagtgacattcaga
